United States Patent Application Publication US 2007/0214517 A1 - sequence listing, part 44

SEQ ID NO: 50999 - DNA, 601 bp, Glycine max
  misc_feature (1)..(601): Ceres Seq. ID no. 13594923
ccattcccctcccctccagcagtcctctctgctctcgcctagtcgcctccccgtctcccatccccccaccccgctgacccaaccctagcaatcaagcagatcgcgtcgccgccgatggatcagggctgggcgagctggttcggcgccggcgtcacctccgccttcttcgcctcgctcgagcgctgctcctgcatcaacctctccaccgacgacgacgacgacgacgacgccgacgccctcatgctcgcggccgccgccccctccgaccagccccagctcgacgccgcccccgcccccgccgtcgccgccggcaaggaggaggggcaggagcaggagcctcccctcccgcccgtgtgacccgctccctccccccatccatcgcttgcgtacgccttactcctcctctcgtccgcgtcctctgctctagatctggtgaactgctgctcgtcgctcgtggccgactaataaatcctgtcgattttactgctggccggccatgtttaaattaattgaactagtagtatgtctgcgtgtgtgtgtatgccattaccatgcctgttgtttgtgttcatgtgaatatatcatcatgccgtcgtgtggg

SEQ ID NO: 51000 - protein, 80 aa, Glycine max
  peptide (1)..(80): Ceres Seq. ID no. 13594924
MDQGWASWFGAGVTSAFFASLERCSCINLSTDDDDDDDADALMLAAAAPSDQPQLDAAPAPAVAAGKEEGQEQEPPLPPV

SEQ ID NO: 51001 - DNA, 719 bp, Glycine max
  misc_feature (1)..(719): Ceres Seq. ID no. 13595704
ctattattcgattccttttttttttttctggaagattgaatgttcgtctatatgaatctgagatttggtgatatgtgatttggtaatgacagagattagttcagcaccagccgacacaacatccaacctctgaggaacttagcattggcaaaatcaagttcaaggcttttgatttaggtggccatcagattgctcgaagagtttggaaagattactatgccaaggttgatgcagttgtctacctcgtggatgcttatgacaaggagagattttcagagtcaaaaagagagctagacgctcttctctcggatgaagcccttgcaactgtcccgtttctgattctcggaaacaagattgatatcccttatgcagcctccgaagatgagcttaggtatcacttgggtctcaccaacttcaccaccggtaagggcaaagtgacgacagctggaggagattttggtgttcgccccctcgaagtcttcatgtgcagcattgtccgcaaaatgggctacggcgagggattcaaatggctctctcagtacatcaactaaaagacatcatcatgccttgtctttctcatataatcaaaccaaacccatgaacatctgtcttttcttgagataaaagattcgtctatgatgatgtcataacactctttctcctttttgggtttttgtagttttcttgtttttaatataagtttggtgacttgcatttcc

SEQ ID NO: 51002 - DNA, 502 bp, Glycine max
  misc_feature (1)..(502): Ceres Seq. ID no. 13595346
cctttttagggttcatctgtgccatgatgcaatgccgaccaccctctattcgaagctgccgcctctaattaatcgtttgacattcttgctactggttctcacaatctaacaccattacataatccagtgcatccaatcgtcgtgattaagcctctcaagtcgtcaccgtagagtatcgcgttttttcgagcgggaagagagctttgcggcgtagtttgtcaaacacttcatcgtcactgagaaggaatatgacagaggagagagatgaaaaggccgatgattgcttttctgatgatcgtaaaagatgcgcttggatcgctccgaaatctgaccaatcttgcattgctttccataatgaagagtggggagttcctgtccatgatgacaattattaagcctccctgttgttctcccggaactatcctggaaatacattckgtttcamaaggcaatcattcaggaaatttttcaaggagtttgattcaattcctacatctgaact

SEQ ID NO: 51003 - protein, 79 aa, Glycine max
  peptide (1)..(79): Ceres Seq. ID no. 13595347
  misc_feature (58)..(58): Xaa is any aa, unknown or other
  misc_feature (61)..(61): Xaa is any aa, unknown or other
MKRPMIAFLMIVKDALGSLRNLTNLALLSIMKSGEFLSMMTIIKPPCCSPGTILEIHXVSXGNHSGNFSRSLIQFLHLN

SEQ ID NO: 51004 - protein, 75 aa, Glycine max
  peptide (1)..(75): Ceres Seq. ID no. 13595348
  misc_feature (54)..(54): Xaa is any aa, unknown or other
  misc_feature (57)..(57): Xaa is any aa, unknown or other
MIAFLMIVKDALGSLRNLTNLALLSIMKSGEFLSMMTIIKPPCCSPGTILEIHXVSXGNHSGNFSRSLIQFLHLN

SEQ ID NO: 51005 - protein, 70 aa, Glycine max
  peptide (1)..(70): Ceres Seq. ID no. 13595349
  misc_feature (49)..(49): Xaa is any aa, unknown or other
  misc_feature (52)..(52): Xaa is any aa, unknown or other
MIVKDALGSLRNLTNLALLSIMKSGEFLSMMTIIKPPCCSPGTILEIHXVSXGNHSGNFSRSLIQFLHLN

SEQ ID NO: 51006 - DNA, 489 bp, Glycine max
  misc_feature (1)..(489): Ceres Seq. ID no. 13582040
atcaaaagagaatggtacatcctttaaattcctaagaggcatatatattttagagaaatctttaataaacctcctatgaaaactagcatacctgagaaagcttcttacacctcttatatctctaggagaaggtagtttctctatagcctctatattagttctatcaactttagtacccctttcagagattctatgtcgaagaacaatacattcattcaccatgaagtggcacttctcccattcaagactaggttgcgttcttcacaccactgcaaactttatcgagattgcatagacaattatcgaaagatgtcccataaatggaaaaaatgtccatgaagaactcggtaatttgttcaacaaagcccatgaatatggcagtcatgcatctttaaaatgtggctggtgcattacacaaaccaatagttatatgtctgtaagcataagttccaaaaggaaagtaaagttacctttaaaaaaaaaaaaaaa

SEQ ID NO: 51007 - protein, 48 aa, Glycine max
  peptide (1)..(48): Ceres Seq. ID no. 13582041
MSKNNTFIHHEVALLPFKTRLRSSHHCKLYRDCIDNYRKMSHKWKKCP

SEQ ID NO: 51008 - DNA, 753 bp, Glycine max
  misc_feature (1)..(753): Ceres Seq. ID no. 13595158
aaacaaactaatgtttattgctcatctcattcatatgtatatttacatacacacataaaagcgtggcaaatctaatgttagcaaggggtgaaaaaaagaaaatttaaaagtacaggggtgaaaagtcaaaaaaaaaaaagatacaaaggaggagggaaggaagctgtctctctgtctctctatagttccgtcacgggacagtactcactgtgaaaatcatgaacaccagaagcagcccacagccgttgattaaactcttcttgcatctcgtccggaacaaacggcgttctacagagaggacacgtcttctgatcgtgatccatccaacggtcgagacagctccggtggaatatatgtctgcagtttctcagccaccggatctcttgctctccttcgaactcgtagaggcagacggcgcagctctccggcagatcttcgccggaagaggtcgtcacgtcttcgaacttgatgacgggtaagatctcgcggatgaggagggcggagaagggggagcggagctcgggtgttcgggtcgggtaagatgtgtagtcgggccaggtttggtccatttcgaggaagtcggagaggcccaagaagcggaagagggagaagacgacggttctgatgagactgaggattgagagtgtttgtacgaagagcttcgggaggaagacctctgtgtagcctacggggaagcccattggagctagagagagagagagagagagagtgagctctgttttaataaaggtt

SEQ ID NO: 51009 - protein, 86 aa, Glycine max
  peptide (1)..(86): Ceres Seq. ID no. 13595159
MNTRSSPQPLIKLFLHLVRNKRRSTERTRLLIVIHPTVETAPVEYMSAVSQPPDLLLSFELVEADGAALRQIFAGRGRHVFELDDG

SEQ ID NO: 51010 - DNA, 1336 bp, Glycine max
  misc_feature (1)..(1336): Ceres Seq. ID no. 13582264
caaatttttaattcagatttattaattaatgttatatggaattacatatacactaaaatcatagaaatagaaccttaccagttggcagcgttagcaatgacattacatcgcaaacctcccctggaataaagatgagtaatgtccccaacatgggtaaagaacttttgggcatcaatgttttttcctgcaattttagccttaactaaggacagaatctttgatttatgagacaagtcaacaagaacaagtctggcattcctaaacttatttgagaactctgcaaccttctcaacaataatatcagctgccttctcatggttgaattgaaaatcagatgttgaaatagatggaaatgccagagtgggaatatcatccagagaaacttgattggcatgggaatcaacagagccaactgcttggttttctacttccttcgtctctgagttgtcattatcaggaattgaggaaaatgtttgcttatctttgcagcaggagttatttttacccggagtctgggaagtagggtcttcaatgccactctctctagatgcagcagcaactgggacctctgctcttttaaggaacttcattataccaacttgaattttggaatcaggattcttctggccaaagcagccatattgaagactatccagtggcccaagtgtgctgtatgtgttaagagcattttttacatcactttcattctgacaaaatgttatccggctaaagccttcacttaatttgggaagctctttatgttgaagcattctattcacaactgcagcagcttttccaccctgcaaatttccttcatgcccagttcgtttgactgatcgagaaatacaaagcttagcaggaagatcaagtacaactgcatggacatctatttggggtccatcaccaagctttataaattctgaacgctgttctctgtcaagattgcacctatcaataaatacactcttcccatccttcaatgctttagttgcactgcttaggcactgagctttatttcctgctttaccatttccaatagtgtcctggcatacgcgaacccaagggcgagtagaggaacccataacttcttcgcagaaggtggacttcccgctccctggagcgcccaccaagatcaccaaaacgggctttctctctttaggtgcagaagcttcttccacgtccatgtccatcttcaaatccgagcgtttttcaccacattgtcattgtgaatttagatcgcaagcaatgggtacattctgctgtgttgtgagcgagttttggggttgtgttgggttttgtgttgtggccaatcatttttcgattggatgttctaggt

SEQ ID NO: 51011 - protein, 58 aa, Glycine max
  peptide (1)..(58): Ceres Seq. ID no. 13582265
MEMPEWEYHPEKLDWHGNQQSQLLGFLLPSSLSCHYQELRKMFAYLCSRSYFYPESGK

SEQ ID NO: 51012 - protein, 56 aa, Glycine max
  peptide (1)..(56): Ceres Seq. ID no. 13582266
MPEWEYHPEKLDWHGNQQSQLLGFLLPSSLSCHYQELRKMFAYLCSRSYFYPESGK

SEQ ID NO: 51013 - protein, 51 aa, Glycine max
  peptide (1)..(51): Ceres Seq. ID no. 13582267
MSIFKSERFSPHCHCEFRSQAMGTFCCVVSEFWGCVGFCVVANHFSIGCSR

SEQ ID NO: 51014 - DNA, 1563 bp, Glycine max
  misc_feature (1)..(1563): Ceres Seq. ID no. 13582281
ttggcagaatctatcaacacatgacgagtcttttcaaattaagtaaatcatgaagtcctttgcagaaaccatcaacacattctgactctacgttgtcgcttagtaagaagttcctcagtttgctatgattttctctcacttctcttccaacctcattcccatcatccatcacaattttcacagctttgcatacactttcttttgtgaacaacccatcttcttcacctttctcaatttccacaccaacccttaactttctactaaacattcggcaatttatgagttgatcagcacccagatgcggtaagaaaaccaacctacacttattcacaagcgcctctgtcaaagaagcagctccacagtgtgttatgaagcacccgacagaagggtgtcctaaaatcaattgttgttgcacccaaccttcatctacaatccctcttccttgaaccctttctctgaacccttctggaagtgcttcttcaatagactcaaaaccattagggggcttaagtgctgcaagaaatggaaaacctgttagctcaagaccaagcaacaactcttgaagttgattttgcggtaaccggctttcacttccataagcacagaaaacaacagaaccagggttgaatctcccaagccataaaacccattttccctctaaagtagtgttcggaggctcaggtaaaagaggccctgaaagtaaaacaggtttcccatacacagtttcaagatactcagcatatggtccatcaatttctttgcaacctttgaatcctattgcatctgccatgctcgctgcagtgtggtaccgatcatagagaagaaccccacttccaaactcgagtttccttactccaacgaggaaccgaagctcatgtggctgaaacttgatgcatgaatcagggaacccctgagggggcaccattagatcaagttcagttaactctcttcctttgcttttccttggtccgtttgcgaagtacgctgttgataacggattaataatgacatacataacactcttgatgcctagtcttctagtcaagtttggtagccaatgttggaaatcgaagaaaacaatttgtggcttcagttcccttaggagaatttcgatgtccttctcagtgcgatccatagcctcggcaataagtgggaataaagagaagggcacatctgaagtagtttcagcatcgtgaggaagaccattgacattaggaactttgatgggaacaaaggtgattagatgagggtgaagattgaggtgttgtagtttggtttgtgtttttttggggcctatgaaggagattctgtggcctctctgtgcaagcttgttggagaggtgaagagatggggttagatggcccatagcaaaccatggaaatattgctatgtgcaaaggagctgcatttgcggtatccatggctgctcctgtttgagttatttgcttactgtcttcgaaaataacgcatgcacgcgttcaaattaaatagtctccatcaactttctgtctctctctgattgcagaattatcaaagtttggtgccacgtaaaaaaaaaaaaaaa

SEQ ID NO: 51015 - protein, 63 aa, Glycine max
  peptide (1)..(63): Ceres Seq. ID no. 13582282
MTYITLLMPSLLVKFGSQCWKSKKTICGFSSLRRISMSFSVRSIASAISGNKEKGTSEVVSAS

SEQ ID NO: 51016 - protein, 56 aa, Glycine max
  peptide (1)..(56): Ceres Seq. ID no. 13582283
MPSLLVKFGSQCWKSKKTICGFSSLRRISMSFSVRSIASAISGNKEKGTSEVVSAS

SEQ ID NO: 51017 - protein, 42 aa, Glycine max
  peptide (1)..(42): Ceres Seq. ID no. 13582284
MAHSKPWKYCYVQRSCICGIHGCSCLSYLLTVFENNACTRSN

SEQ ID NO: 51018 - DNA, 1017 bp, Glycine max
  misc_feature (1)..(1017): Ceres Seq. ID no. 12611884
aaaaaaactgtcgaactcatctcttgaatcagaaagagaacctcagctaatacatgcacgcattataaaatttgggaactccacacaaaagcaaaatattaaaaactcaaggacataatcaatactgaataaatggatgacatgagttactgctacattattacatcaagcagccaaacaaacaacatttaaaaatagcaaattttagttattctggatgtgtgctggctcagttagacggtgcagcggcagcctctcgtgccttggcgaactcaagcagcctgcccacgtctggcagggccaccttggccgcgtcgagctcgctgaagcgctccacccatgcggccaggagcggggtcttggcggcatcgaagatcttgtcaccggacaacacctcgatcaccttcatccacgacagcacgcctcccagcgcaacgtcgacgagcccgaggccgtcgccgccgaagaagccccctcccttggagcattccctcagggccccttcaagaatctccaccgccgcgaacgcctgcttctttccctcggatttctcctcctctgtcttgcccctcaaccactgcctccatggggctaccagcttgtcgtcaacgtaggccatccagaagcgagcaatggcgcactcgtaggggtccgctgggagaagggacgggccggagccggcgaacacttcgtcgatgtactgcagaatgatcatggactcgcagaccggggcgccgttgtggatgagcacgggtatcttcttgtgcaccgggttggacttgaggagaagctcgctcttcttgtacaggtcctcctccacgtcctcgtagctcaggtccttcaaggcgagcgtgagcttcaccctggtaacaaatgggcttggccatgcgccgagcagcttcaggtcatcccctccggccatctccaactagctcgaagcctagaacgatggatgtgcgtgtgtgtgaaggctgagatcgttttagctgtttctgatttgctgggtactggcttgat

SEQ ID NO: 51019 - protein, 266 aa, Glycine max
  peptide (1)..(266): Ceres Seq. ID no. 12611885
MCAGSVRRCSGSLSCLGELKQPAHVWQGHLGRVELAEALHPCGQERGLGGIEDLVTGQHLDHLHPRQHASQRNVDEPEAVAAEEAPSLGAFPQGPFKNLHRRERLLLSLGFLLLCLAPQPLPPWGYQLVVNVGHPEASNGALVGVRWEKGRAGAGEHFVDVLQNDHGLADRGAVVDEHGYLLVHRVGLEEKLALLVQVLLHVLVAQVLQGERELHPGNKWAWPCAEQLQVIPSGHLQLARSLERWMCVCVKAEIVLAVSDLLGTGL

SEQ ID NO: 51020 - DNA, 1509 bp, Glycine max
  misc_feature (1)..(1509): Ceres Seq. ID no. 13504015
caaaaagaaaattttatttctccctctctcactgtatttgtgacgcctacaaatagaaaaactgcatttggacacacagtagatacatgctaaaatgcaaggaaaggaaacaaagaaaacaactaaatttttttgacattagatcatcccattcactttgaaaagtgaatgcatccttaccaaccaagaagcaatacctttaagagagccatcctaatatatagaccattctttgcctgccgaaagtaagcagctcttggatcactatcaacatccaccgtaatctcatcaagtcttggaagagggtgcataaccacggcatgtttttgcatcacatttaaaacatcttgatttacaatatacctgcctcttgcctcctcataaagttcaattttctctccaaatctttctttctgaatgcgagtttgataaaccacattgcacttagaagccacttccatcaaatcagcactttcttcccactccactccctttgatgtcagatagtcttttatgtcatccttcattttaaccacgttaggagagacaaaataaattttcacgtcctgatacttggctagtaagtatgcaagtgagcgaactgttctcccattagcaaggtctcccacaagcccaactctaattccgtccagtttccctatctctctttcaatggtataaacatctagcagtgcctgtgagggatgctgtccagggccatcccctgcattgattacaggaatgctagcagttgttgctgctcttttggcagcaccactttcaaagtgcctcatcacaattatatcagagtaaccttcaaccgttcttattgtatcttcaagcgtctctcctttagcagcagatgaaaactcccttgcattctcagttgtgagaacatccccacccaatcttttcatggcagactcaaatgaaagcctagttctagtggatggctcataaaacaaagtagccatgaggtaaccctttagcatttggctcctagatgacttgctttcaatgctctccatgctccttgcaacttcaaatatggcattgagagtctctctgtcaaattgctgagcctcaatcacatcatgaaggtgaaatttttgccccatggagaaggagggtgcactttccacttgaagggcccctgccctccacagaatctcatcacctttttgtgaaagtttagatttttccaaaactcctgaatgcccaaatggtgtttttgactttaaatgattccatggctgattgagcaaaccgcatggagaggattttgcagccactttgggatgagacacacccacatgcatagagcaggagaatagaaaagaagcagcgctcattgtgttcttttggagtggcgtgagtgaaggttgtgttgtgagaaatgagtagtttttgttttattttgaaggcagacaacggctacaaaacagcgttgctaccgtgcaagaaggaacaatatgtaggctatatatataagaggagacgacctggttt

SEQ ID NO: 51021 - protein, 53 aa, Glycine max
  peptide (1)..(53): Ceres Seq. ID no. 13504016
MLSRAIPCIDYRNASSCCCSFGSTTFKVPHHNYIRVTFNRSYCIFKRLSFSSR

SEQ ID NO: 51022 - protein, 37 aa, Glycine max
  peptide (1)..(37): Ceres Seq. ID no. 13504017
MSSFCFILKADNGYKTALLPCKKEQYVGYIYKRRRPG

SEQ ID NO: 51023 - protein, 30 aa, Glycine max
  peptide (1)..(30): Ceres Seq. ID no. 13504018
QKENFISPSLTVFVTPTNRKTAFGHTVDTC

SEQ ID NO: 51024 - DNA, 1371 bp, Glycine max
  misc_feature (1)..(1371): Ceres Seq. ID no. 13595548
cgatgcccgtgggaataagaacagacacagaacagtacagctctcatgctggtcggaagcagcacaacacagcgaaaatgacaaacactcctcctacatatcctcctagctaggcgtagcacataagccagcaggctcgtttattcggcaccaaacagcagccagtggtttagtacgtacgtacgtacaaactctggagcatcctatgtgccatcgtcctcaaccattgaccgaggccacgttcggagagcagagcaagggcgtagcacgtagttgttggttctaagcggtggcgatgaggttggagctgtggctgtccatggacttgaaggcctcgaacctgggctccttgtcctcgaacttgtggcgcacgtacagcttcatgtagtcctcgaacacgaacctggggtacgccccgcccgccgcctccgcctccaccagcgccggcgccgggaagatcaccgcgtcgccagccgggttgtagaaggaggcgatggacatccggttgccgtcggcctgcgcgaccacgcggtggaccacgctcttgtacctgccgttggtgatcacctccagctggtcgcccaggttgaccacgatggagtggcgcgtgggcggcacgtccacccactcgccgcccctgagcagctggagcccgccgacgcggtcgtcctggaagagcaggatgatgccgccggcgtcggtgtgggcgcggaggcccttgacgaggtccgggcgcgggcacggcgggtagctgctgaccttggtgccgaaggtgggggcgccgttggagccccggaacgcgcgcgtgaggtaccctttatcgaggccgaggttctcgcagagcaggtccagcagccgctccgccagcctctccagctccgacgcgaactgcttcatcacccgccggtagtcgtcgtcgaggtcaggtatctcggcgatgttgggctccgggaggtggcgcacgaagaaggtgctctcccagtccaggttctccgccgccctgccgccgtcctgcagcgtcttgctagcgaactcgaggaacctctgctcgcgcaccctcttgtagtgccccttggtcatcttctccacctcgtccatcagctccgtcgagatgccgtggtccaggacctggaagaatccccagttctcgcatgcgtcatgcagcaggtccatggccgcgggtcgctcctccccggccagcagccccatgtcgatgatcgggaacgacgaagccggcgccatttctagctctcgaacttgttctgcggcctgcggcgcctggtgctggaaccgatctcgggcagctctatggcttctctgcaagcgcttgctgtgcgtttgagtagtcagtgtttttcgattaggatgttc

SEQ ID NO: 51025 - protein, 85 aa, Glycine max
  peptide (1)..(85): Ceres Seq. ID no. 13595549
MDIRLPSACATTRWTTLLYLPLVITSSWSPRLTTMEWRVGGTSTHSPPLSSWSPPTRSSWKSRMMPPASVWARRPLTRSGRGHGG

SEQ ID NO: 51026 - protein, 76 aa, Glycine max
  peptide (1)..(76): Ceres Seq. ID no. 13595550
MPWSRTWKNPQFSHASCSRSMAAGRSSPASSPMSMIGNDEAGAISSSRTCSAACGAWCWNRSRAALWLLCKRLLCV

SEQ ID NO: 51027 - protein, 56 aa, Glycine max
  peptide (1)..(56): Ceres Seq. ID no. 13595551
MAAGRSSPASSPMSMIGNDEAGAISSSRTCSAACGAWCWNRSRAALWLLCKRLLCV

SEQ ID NO: 51028 - DNA, 559 bp, Glycine max
  misc_feature (1)..(559): Ceres Seq. ID no. 13582124
ctttatctggttatttcatttcatctcttataaataaagtcccagagaattgcataatttgtccaaataagcgccaaaaatataatgcaagacaaaaaaaacaataagattgccttaaaactttagaaagaaagaagagagtttttatctttccgtgagcttttggtcctatgactttgcctctaaacggggctttactgtggaggcttgccagcacttaagagctgtccgaccattccatttacctgccagtacttggaaacacaacggtcaatgcaactgttctcacccatgtttaactcagcttccttgtaccttttatccacacatttaacaaagcatgtttgagcaagcttgttgaagagttcaactcgatattccatctccgtttgtgccatgctaaacgcctgttccttagaaatgccggcgggaattggactgggagcagccatcttagcaatactttctcaaaaaaaaaaaagaaaaaacgaagatgttcagagagattgaatacggacaaggcttctcgcttttgcttgctcctcttttcgattaggat

SEQ ID NO: 51029 - protein, 37 aa, Glycine max
  peptide (1)..(37): Ceres Seq. ID no. 13582125
MLNACSLEMPAGIGLGAAILAILSQKKKRKNEDVQRD

SEQ ID NO: 51030 - protein, 34 aa, Glycine max
  peptide (1)..(34): Ceres Seq. ID no. 13582126
LSGYFISSLINKVPENCIICPNKRQKYNARQKKQ

SEQ ID NO: 51031 - DNA, 1515 bp, Glycine max
  misc_feature (1)..(1515): Ceres Seq. ID no. 12583469
aacttgaacttgtatatgatttttgtttttcatcaaattgtaatgctaccaacaagtaccatgtttttgttcaaactattacacacaagcatgaaagtgacaccccaaaaatcaaaaacattatttaacaatatgatggctgagcatttcaaaatagtttaattggtaaagaagaaagacccctccctagccgcaagcattggatcaaccaataggttggagatcacaatgttcatgaagagggaaagggggatcaaaaagagaaccatttagaatggcatgtgcaacaatcttgttcgctgcttccgtgaaatggatgccatcccagctcacatagctgtggggttcatcacaagcacttgctagcatatggccacacaaaattttagggttaaagttgtacacaccgcctccatacccacaacatgttctggtactatactttagtccataaaatgtggggtggtgaaagagctccaagagagcagagttggtgtccacgtaaataagggaagcatctactaaactttctctggttagactcaatgtatatttcaacagtttgttataatcatttacagcattgttgtaagaagccatgcatccaaactcatcatagtcagaagtagcatgaggaagctccaccaagtatccaggatagcatcccacaggaccaagattgaataccataaatctacgccccccttgtgcatatagctccttgatagcagcattaatttgtaaaacgatgtgaggaagggtgcccctcactgcatcaataccaccagtggctgctattttggaagtgaaatcattttggccaatatagaacgtgtaaagggcctttccaaatatatccggtgaaggaattttcgttccagatgatatccttgttcctggttgatgaaattcatcaactttggctttgaattgctccatttgcctgagttgaacagagagggaaaatggacttagcccactgacaaagaaggaagttgtgggcggaatcacagtggaggccgaagatgcaaagttaaccccatgagtatagtccgatccaattgactgcagatatgggctcaaatatggcaatccaagaccctgagcgagaaaatcaacaatgagccttccatcagaagcacgccccactggttttttgaagtaagtcattccatagggaccaggttgtgctggaaagcttgtatgaaacccacccgtatccgaatttgaatccccgaaattgaagattgcctcaaaatcacacaaggaataacttgaatcaaccaaagaagatatcatcaccatacaaattactaggaacttcgaaaatatgtataaactactgttggacaccttaagggtacccatcattttttttgtttttcactcttgatcaagtgcttccagaggctaatgctgttaaaggtagcaatgagagatccgtattatatgaactgcatgcatattctgaagataaggccaagcactgaatcagttgttctaaagttgactagt

SEQ ID NO: 51032 - protein, 53 aa, Glycine max
  peptide (1)..(53): Ceres Seq. ID no. 12583470
NLNLYMIFVFHQIVMLPTSTMFLFKLLHTSMKVTPQKSKTLFNNMMAEHFKIV

SEQ ID NO: 51033 - protein, 48 aa, Glycine max
  peptide (1)..(48): Ceres Seq. ID no. 12583471
MIFVFHQIVMLPTSTMFLFKLLHTSMKVTPQKSKTLFNNMMAEHFKIV

SEQ ID NO: 51034 - protein, 41 aa, Glycine max
  peptide (1)..(41): Ceres Seq. ID no. 12583472
LELVYDFCFSSNCNATNKYHVFVQTITHKHESDTPKIKNII

SEQ ID NO: 51035 - DNA, 1358 bp, Glycine max
  misc_feature (1)..(1358): Ceres Seq. ID no. 14312136
aacaacgactctctcctcttccgctccttcgtctaccatttcttgtctcgcagagacgcttccaccaatgtctaccatctcaacttcaagtgccaagacaaaaaacttgatcttgccaaaaccatcgattccatcattgactatgttaccctcacaccaccaatctccgccgccattcaggttcttagcatcttggcaccaccaaacaacaccatcgtaggaaatttttctcaactctcccattgtcaatccctcaccaccctcaacctttctgacatatccactgacatcacatcctttcgtttggtttctcttcaaaaattagacctttatgattgtgttttcgagtgtgggctggaggagtttcttaatccttttaggggctgcgttaatttgactactttgtctctgtttggttgtcagtactgcggtggcaaactcaagaggttcacaatttttgcccccagcttacgaacttgaatatttcgctcatggaagttgatgaagtgtattttgactgtgccattgagctttttacgccaaagttccaatcttttacgtacagtgtttgtgacctgtatggttttttcatcaagtctaatcttccctttgtggagacagtgcatattgatgttctgggttgcaccaatgatcctaatttgcaactaaagttgattcaaatgtttgaagtgatggggagtgctgagtttgttgccttgtcaactggtatcgttgaagttctatctatgtttcctgatctactggatagtcggccttcccccttcactaaggtgcagacttttgagttaaacagggaaatacctgcttcctccgttgatatgcctgctaatgtcatggcctacttatttggcaaatctccaggatttgatttctatgaatgtcgatgggaaggtgcaaaatggtcaaaacaatctgattgaagatggtttcttgctaactttcaaggttttacatttttgggggattaaaagttgtttttcttggacctaaacaaaaaagaacccgtgctcttttgcagaggaataggggtcttgctgatacgtttgctaaatatgcaattaagaggtgttgacttattgttcatagtctgcgacatatttgctactaatggttattgactattttgtgatcttttaggctcttctgttgtgaatagcctattaaagggagcttttctgctccctaatattgaaaattgcttgttacataggcaatctcaattagctaaaaattcgcagtgagctacaaatcaatttgttaaaaaaaaaaaaaaaaaaaaaaaaaaaaaaaaaaaaaaaaaaaaaaaaaaaaaaaaaaaaaaaaaaaaaaaaaaaagg

SEQ ID NO: 51036 - protein, 159 aa, Glycine max
  peptide (1)..(159): Ceres Seq. ID no. 14312137
NNDSLLFRSFVYHFLSRRDASTNVYHLNFKCQDKKLDLAKTIDSIIDYVTLTPPISAAIQVLSILAPPNNTIVGNFSQLSHCQSLTTLNLSDISTDITSFRLVSLQKLDLYDCVFECGLEEFLNPFRGCVNLTTLSLFGCQYCGGKLKRFTIFAPSLRT

SEQ ID NO: 51037 - protein, 149 aa, Glycine max
  peptide (1)..(149): Ceres Seq. ID no. 14312138
MEVDEVYFDCAIELFTPKFQSFTYSVCDLYGFFIKSNLPFVETVHIDVLGCTNDPNLQLKLIQMFEVMGSAEFVALSTGIVEVLSMFPDLLDSRPSPFTKVQTFELNREIPASSVDMPANVMAYLFGKSPGFDFYECRWEGAKWSKQSD

SEQ ID NO: 51038 - protein, 86 aa, Glycine max
  peptide (1)..(86): Ceres Seq. ID no. 14312139
MFEVMGSAEFVALSTGIVEVLSMFPDLLDSRPSPFTKVQTFELNREIPASSVDMPANVMAYLFGKSPGFDFYECRWEGAKWSKQSD

SEQ ID NO: 51039 - DNA, 1369 bp, Glycine max
  misc_feature (1)..(1369): Ceres Seq. ID no. 14314359
acactttccatgtacacatcagagaatctgcaccctttctccacttggaagattgaagcctcaggctcataggagaaggccaagcagtgcagaagccacaccctcttcgccatttcggcgaatgaggtgaagaatgcagtgtctggaaaccctccaccagtattcacaaggttcctctgactcaggttaccaaaaaacgatgactccatcttgggatgaacaagtcccaaatacttgacccggcaatacttggcgaacgatgatcgtggcctctcggctaggtagtcctttgccttcattgatttcagctcattgaacttcccaaagaaccactgttgtctcctgtttttttctagaggagactcacttgaaagggagaagttagggatgtggaatgcatcaaacatttccctgcaaacaaaggcctccattgcgaaacacttgtgatcttctgccatataaaccacattctgttcgatggcgtcgactgcagcatcaatgtcccaacctgcagatctcatctcatccacaaccagcctcacaaagttgcgaatggaccggactgcatggcgaaggaccatgatgaaatggctaggacttaatccagttatgtgaagattatcaagcactgatagctggccactttgattcaatctcttctcaattgccttgttgtgcatattagcttcctctaacttctccctaaggaaaataatctcagaatccttgagcctcacctgtgactccaacttcctccccatgatctcataggttttgatcacaccctgcagctccttggattcggctgcaagaatctccttctcgggcaaaggatcaaactgtttcttcaagtaacattgctttagctcagacaagttcttcaactcagacactagcaattgatcagcagcttcaattccatcagggtcaaaaggtgactgagcatgctgcaactcagcatatgcagctttaacagttgaaatgctagcaaaaagctttgccaaaagagcttcattggccactctctcttgaagctcttcatcatcatcttcattaaaagactcggaccaattcagtgtagtcttgctcttagcgatttttccttcgtccttgagatttgcatcagatataacattcttcagaccatcaactgaagcaattccaataagtgctttgacatgaagaaccttcgcaaaactgcgcgccaacttctttcgcggggtcacggccgacggcttcactgattccatctgcacaagcagcagccaccaccaaagtttccaaatacagatcagaattgtgattattgaaatgtatatatgtatatgtatatgtataagtatatgcaagtagcagtatctttaaaaag

SEQ ID NO: 51040 - protein, 62 aa, Glycine max
  peptide (1)..(62): Ceres Seq. ID no. 14314360
MHQTFPCKQRPPLRNTCDLLPYKPHSVRWRRLQHQCPNLQISSHPQPASQSCEWTGLHGEGP

SEQ ID NO: 51041 - protein, 45 aa, Glycine max
  peptide (1)..(45): Ceres Seq. ID no. 14314361
MASTAASMSQPADLISSTTSLTKLRMDRTAWRRTMMKWLGLNPVM

SEQ ID NO: 51042 - protein, 42 aa, Glycine max
  peptide (1)..(42): Ceres Seq. ID no. 14314362
HFPCTHQRICTLSPLGRLKPQAHRRRPSSAEATPSSPFRRMR

SEQ ID NO: 51043 - DNA, 658 bp, Glycine max
  misc_feature (1)..(658): Ceres Seq. ID no. 12583631
atcttctcacttccaaatatatttcatttgagtatatctgttatagtttattactactgaaagatggattcgaagaggaagatagcattacttatcttcggtctgctggccatgctccttttcatctcctcagaggtggcagccagagaactgaaagaggtcactggtgctggcttgtctggtggccgtggcgtaaactttggtggctttggtggcattggtggtggccctggcttccgctttggcttcaataatggcttccccttcttcttccctggattccccagcttccgtggattccccggaagctggggaatccagggaaagaagaagccaaagtagaggaagcaacaacaccagcaactactgaagacaccaacaaggttgttccagaggttaagattaatgaatacttctataacccaccaaggtatggcatggaggtgtatgcatatcctgcacaccctgcgtatttccattcctaccctccccagatgttcagcgatgagaacccaaatgcctgcactgtcatgtagtcaaaattgagggtgtcagggtgatatgggaattggggaaaaattgtgaagtttggtgggtgacatgaaatgatgcccattcctgtgttacctgtactgtgaaagtacaatgtatgcataag

SEQ ID NO: 51044 - protein, 92 aa, Glycine max
  peptide (1)..(92): Ceres Seq. ID no. 12583632
MDSKRKIALLIFGLLAMLLFISSEVAARELKEVTGAGLSGGRGVNFGGFGGIGGGPGFRFGFNNGFPFFFPGFPSFRGFPGSWGIQGKKKPK

SEQ ID NO: 51045 - protein, 83 aa, Glycine max
  peptide (1)..(83): Ceres Seq. ID no. 12583633
LLTSKYISFEYICYSLLLLKDGFEEEDSITYLRSAGHAPFHLLRGGSQRTERGHWCWLVWWPWRKLWWLWWHWWWPWLPLWLQ

SEQ ID NO: 51046 - protein, 76 aa, Glycine max
  peptide (1)..(76): Ceres Seq. ID no. 12583634
MLLFISSEVAARELKEVTGAGLSGGRGVNFGGFGGIGGGPGFRFGFNNGFPFFFPGFPSFRGFPGSWGIQGKKKPK

SEQ ID NO: 51047 - DNA, 936 bp, Glycine max
  misc_feature (1)..(936): Ceres Seq. ID no. 13581663
aaattcgttctaacattaaagaaaatcaattacaaaataatgaatagaattgaacctacctaactaacaaaattgatcaacaacaatcaattattcatcgatcagtgtggcaacaaaaaacaaaaaattactcaaaaaataatcccatgatgctttttccctcagatcatagccaaagccacccaaagtgccacgccacccaacaccatcggagccccgaaattggaacttgaacccgaatcatcaccaaccgaaccctgtgaactttccggcgaagaactcgccggcgcagttcccggcgaggcactggtggatggtagtgtgattggtgaacctgccggcacggccgatgaaggaattccggtagaagattccggcgtaggcgcctctgccactggcggagccccgactggagaactcaccggagccaccgtcggcggaggagtcgctggggacggagccggcggcgaagaaacattgttggatgggctggaagccggaggaaccgacgatgggggctgagtggccggagacttcgccggagggttagtcgccggcggcggggtggaaccagatggagaaaccgccggagattgtgaaggcggtgataaagttggagactttgcaggaggcgccggatgggtcgccggagagggtggtttggcggtcggcggagagggggatgacttgggtgaaggggcaggagcattgtctgcgcgaaccgaacacaaagatgtgaagaacaatgcgaatacaaagagtggaagaaacttattattcatcatcgtcattatgagtttgcggtttttgatgatgattcggagaagtacgaggaagtggtgaagtgaagattaaaccaacaccaaacaaatgttaaaaagtgtttgtgatgtttgaaagtggaaagtgttattcgattaggatgtgtttaaacac

SEQ ID NO: 51048 - protein, 54 aa, Glycine max
  peptide (1)..(54): Ceres Seq. ID no. 13581664
MEKPPEIVKAVIKLETLQEAPDGSPERVVWRSAERGMTWVKGQEHCLREPNTKM

SEQ ID NO: 51049 - DNA, 1063 bp, Glycine max
  misc_feature (1)..(1063): Ceres Seq. ID no. 13494980
attattctgtttgtttttttcaaagcaacgcatagtcacatagtacactctggtctgaactctgaatctttctggtgtcgtgtcccatttgaattgaattgcatcttgaaagatggcggaggaggagaagccaaatggagaagaacaagtgaaggacaacaacaacaacaacttatacgacgccgttcagcgtctgatcttggagccttccaagatcaaggcctctctcatccctctcttccccgaagcttctagaacctactctcgccaactccctccactggtcccgtcaaggttctcccctccgacgcatcctcttcatctccattgggatagnngcacttgttgctctctcaggacttgttgcttttacgctcttttttctggctgctactgtaaatgccattttcgtctcccttctcatttctttggctgtggctggaggcttcttggttctgttctttgcttttgtgacagctatatatattggagcactatcactggccatctttgctatttccaccgtcactttttgggctgttgtggctattatcattactgctggatgggttggattcctttataccgtgtggctggtaactagcaagagccttggattggcaaagcaatctttgagtgtgactggctctgcaattactacttactcagctgcttggggtacccgtaacattgcagacaaaaattcaatttaggtgccggtcacatatagaaggttgtgcacaaatcttacacaaacatgttttttggatggcaaaagcttcttctgttgactggtagagtctcatatccttcatcttgctcatggtttggtttcagtggctttcaatagcatgcttgtattatgttaataaaatgccacagtttggtttcatgtgttttagtcggagtagtgttgataaaattcctggttgtatgtattgtgcttcaaatttcaatttttaagttggaaaaacaagtgcttttactttatttacctatgttgccacctggtattgtacaacttgtagacttgatgaaattggactgctgtgttaaatgatgc

SEQ ID NO: 51050 - protein, 163 aa, Glycine max
  peptide (1)..(163): Ceres Seq. ID no. 13494981
  misc_feature (75)..(75): Xaa is any aa, unknown or other
  misc_feature (76)..(76): Xaa is any aa, unknown or other
MAEEEKPNGEEQVKDNNNNNLYDAVQRLILEPSKIKASLIPLFPEASRTYSRQLPPLVPSRFSPPTHPLHLHWDXXTCCSLRTCCFYALFSGCYCKCHFRLPSHFFGCGWRLLGSVLCFCDSYIYWSTITGHLCYFHRHFLGCCGYYHYCWMGWIPLYRVAGN

SEQ ID NO: 51051 - protein, 84 aa, Glycine max
  peptide (1)..(84): Ceres Seq. ID no. 13494982
IILFVFFKATHSHIVHSGLNSESFWCRVPFELNCILKDGGGGEAKWRRTSEGQQQQQLIRRRSASDLGAFQDQGLSHPSLPRSF

SEQ ID NO: 51052 - DNA, 844 bp, Glycine max
  misc_feature (1)..(844): Ceres Seq. ID no. 13595749
cagattaatcatttgtttcaaattccaattctgcatgtatatttgcattaaatacaagagtttttctgcccttaataatctcaatggactcaaataaatacgatcgtctcttgtaaaaaaaaaaagaagaagaagaagctagaactggaagtcaattctaaggggtggttcctgaatcaaaatcttagggaaggaagattcaaccttgagagaagctctgcagagagggcaactagagtgatgagtgagccacttatcaacacaatcacagtgaaaataatggtcacacgccggcaaaaccttaactttctcaccgtctctgaactcgccgagacagatgcagcactccgtttcgtcccacgcgctttcgtcgcggtctgcaggcgcgtggtggaggattatgggaagtttcttaatggaggcggggtccagtccctgaggcggcgctagcggcggcgcgtggacggctgcggcggagaacgcggtggtggggagtcgtccctggtagcggcaaacccagcgcgtgtagatgaagagaacggtgacaagaagaataatggagaagagtacgatgacgaaaaacagtgtcctacctcggatctctaggtctctgtcatcgagttccgtgtagtgccaattgaatgatcgagtgtctgggttcgacatcgtgatttgattccaaggtatgagaagggagagctaagacggcggcgggtggcggcggaggaaggctgcgacgttggggcatcagaaacaaaaacagtatcatgagacactgtttggttctgttgctattagtaggcactggcaaaatgaggagtgattttcgattaggatgttctag

SEQ ID NO: 51053 - protein, 69 aa, Glycine max
  peptide (1)..(69): Ceres Seq. ID no. 13595750
MSEPLINTITVKIMVTRRQNLNFLTVSELAETDAALRFVPRAFVAVCRRVVEDYGKFLNGGGVQSLRRR

SEQ ID NO: 51054 - protein, 56 aa, Glycine max
  peptide (1)..(56): Ceres Seq. ID no. 13595751
MVTRRQNLNFLTVSELAETDAALRFVPRAFVAVCRRVVEDYGKFLNGGGVQSLRRR

SEQ ID NO: 51055 - DNA, 513 bp, Glycine max
  misc_feature (1)..(513): Ceres Seq. ID no. 13581749
tctgattaattgatttgatattttaattgtttgtgatgggtatttcagggagtttgtgaactgtgtccgctgtattaaaatactttctcctcaagaagtgcagcagatgagcttggacggagattttggcaatggtggccttcaaaatcaagcctgtagcagctctgacggtggcaatacttaaatgaagttcagtaatacgctaactattcttccgtattgttaacttagattatttctgggagatgcattattgtcctaattccgaaaggcaattattatgccactgggaacttctgtgcccaccatcaggacttgaaaggagaagttttgtctatgttccggacatgcaaatttgaagagccaaatgagggcggagaagtgagctgctgctctggtttaacattgagcggtaattttgaatgtataaagtcttaggcagctagattttgcggaagctttcatgatcttccatccttggaggcaccttattattttttagccaatatgact

SEQ ID NO: 51056 - protein, 37 aa, Glycine max
  peptide (1)..(37): Ceres Seq. ID no. 13581750
MHYCPNSERQLLCHWELLCPPSGLERRSFVYVPDMQI

SEQ ID NO: 51057 - protein, 33 aa, Glycine max
  peptide (1)..(33): Ceres Seq. ID no. 13581751
MFRTCKFEEPNEGGEVSCCSGLTLSGNFECIKS

SEQ ID NO: 51058 - DNA, 761 bp, Glycine max
  misc_feature (1)..(761): Ceres Seq. ID no. 13594416
gccaaagatgaaagtacttcaactatttaaccttaacttcaacacattaatcactcgtgttcaattacttgattttcaatcaatttaaataaaagcttgtagatccatcgagtttacatggatatcagctttttaaactgatgagtgatgaggattcggccggacaacatccttttcttttccttctaattcaagaccctagaatatcgctccccgtccccccctgtaagggggagatatgggaattgaagaattgatcagcagtgatgtaatcctgggtgagcttagagcagacatcagaagcagccaaacagggccttatcttctgccaactcccggaaccggtgacgtggttcctcaaccaggaggagaagccgtgaagcctgtactccttgtagcctcttccggggacatcataggctccatcgggtctggtgacgacgaatgcgaagacgagaacgaggaggaggagggcgatgaggagagccatacagaagaggtagagggcgaggagaccctgtttgttccagtaggcaccgacaaaaccggccagggaaacgaggaggatgaggatgccgatgatgacaatgggccaccggaagttggccacgcactcgttgtcgggcttcgatgccagccaaatgccggaggctatgatcgggattgaggccagcgtagctatcaagttcagcactgcggtgatgttgttgcttacccccatccccaaccccaaccccaaccccaatattacttcctagatt

SEQ ID NO: 51059 - protein, 142 aa, Glycine max
  peptide (1)..(142): Ceres Seq. ID no. 13594417
MGIEELISSDVILGELRADIRSSQTGPYLLPTPGTGDVVPQPGGEAVKPVLLVASSGDIIGSIGSGDDECEDENEEEEGDEESHTEEVEGEETLFVPVGTDKTGQGNEEDEDADDDNGPPEVGHALVVGLRCQPNAGGYDRD

SEQ ID NO: 51060 - DNA, 1160 bp, Glycine max
  misc_feature (1)..(1160): Ceres Seq. ID no. 13594390
caagagaaaagtagaaagttaatatcaagtcatcctcaaaatatgtacacatcatcactctaggagtaatgctacatatacaatacatagatttacaattagtcacaacaggtgtctgctaaaaaagagcaactactagttcttactaaatatatattcttctgttctatgaaaactaatatacagacacctataaaattgtaaccagttgaaattctaagcattgttcaaataacataactcttattcaactatgtgtaagcaaagctcctttggtttgtgagatattcatattccccaagctaacagcaacacagtggattcaatattcggcttcatggttaatgtaatgaaagtggttatgaagccacagctacttcaattcctccttcgttgattggcataaaactcaccctttgtactctccttaacactttgttggtccaacaccaccatcttttcaccattttccttagttccaccctcattttctctgcttccattggccttataaaggttcatgatcctctcagcagcctcagcctcatccttgcaaccttgaatcaatttctccacttctgcttttggaagcctcattttcaacctcacaccaccaccattattactattctccttattatcggtgttgctgctttgtttcatgattgaaagatcagaggcagaccttctagtgagcacaaggctctctaggcgatccttggcactcatgttgatgccggaacgaacccttcgcggcgtcgtctccttcggaagctccacaagaaaatacagcctcttaggctgcaaatccttgtgtgcttccaatggctttgctctcacgccatagtgtttaaccgcctcagaatctagcaaaacaagaccagggtgatccttaagcacttccccaactttcactggtgtcttcaatttgaatgtctcaccatcaattttcataacctttgtggttttcttcgcaccaaatgtgttacccattatagctagcaccccaattgaacaaaatttctctttggccttttagttttgtgaggttgaggcactatagggtatagagaatcaatgtcactttgtgataaaatgaaacagattttaattattcctcacaaaaaaccaaaggggtaatgctcacacacttgaaaaat

SEQ ID NO: 51061 - protein, 61 aa, Glycine max
  peptide (1)..(61): Ceres Seq. ID no. 13594391
MIERSEADLLVSTRLSRRSLALMLMPERTLRGVVSFGSSTRKYSLLGCKSLCASNGFALTP

SEQ ID NO: 51062 - protein, 39 aa, Glycine max
  peptide (1)..(39): Ceres Seq. ID no. 13594392
MLMPERTLRGVVSFGSSTRKYSLLGCKSLCASNGFALTP

SEQ ID NO: 51063 - protein, 37 aa, Glycine max
  peptide (1)..(37): Ceres Seq. ID no. 13594393
MPERTLRGVVSFGSSTRKYSLLGCKSLCASNGFALTP

SEQ ID NO: 51064 - DNA, 1027 bp, Glycine max
  misc_feature (1)..(1027): Ceres Seq. ID no. 12582601
ctaataccatattagattcattgataacataaaattgtatccaacaaatatataaattacattgcactccaagaaaaaacaaccaatatagaacttgaatatttccaacatactagtaacatggaaaaaagaatttaagagtgatatgatgacacaataaatgatcaatgaaacaaggagaaactaacgtgatataattatataaaattgtacataggaagtgataatgtgaatgtgacacggtaataaaattaggtggaaaaaataaatgagaagtattgatgtaacaaagggtagcaataataataataataatagcagtaggaaagtgaaagggagaattttaaatgtcacggtctggtttgcactcaggggagagttgagggtagcgttttctgtcagtgcagtagttgtagatggtgtatttctggcgcacccatctgaggctacgccactgggaagcgtcgaggtcacggaattctggttggtcccaccagctcttgccctgcgtgtcgcagaacttggcgttcaccgaggcctcgcacccgtcgatgtggaaccccttgtaggctgctatgaatggggctttggaccaatccgttttctccaaaccaccccttgtggcccagtcatcagcgttccatagactgttgtagatcttcattggctggtcgaaggggaatttcactcccaagtccttgctgttcttgaacaccctgattgccacatcgtccacaaagaacctgtacacccccaacttttcaatctttctcactcaacatgtcaaaagtttttaatgtttttctattttgagacccaaatatttaaacccataatccttttcttttccgttcacccttatggtatattggtttgtaaagaaaaaaacaattaaaatataaaattcatattttatattttactttgaattttaatttattttcttttcattctaccaaaataatccttttaagtccctcggcatgccgactacatatctccaagtttttttttcgattaagatgtt

SEQ ID NO: 51065 - protein, 125 aa, Glycine max
  peptide (1)..(125): Ceres Seq. ID no. 12582602
MRSIDVTKGSNNNNNNSSRKVKGRILNVTVWFALRGELRVAFSVSAVVVDGVFLAHPSEATPLGSVEVTEFWLVPPALALRVAELGVHRGLAPVDVEPLVGCYEWGFGPIRFLQTTPCGPVISVP

SEQ ID NO: 51066 - DNA, 1664 bp, Glycine max
  misc_feature (1)..(1664): Ceres Seq. ID no. 13581775
gaaaatcaccactagaaggatgttatatactcgatgataataaagtcaatatgctataaatctgacaaaaaaatctctccacccaagaaaataaaactcaaaatgcaggcacaaaaagtgaaagcgacccaaatcaaagtccaattttgcattgaaatagacaaattggctgttaggataattgcaagaaaaaaccgtcaaagattacattacatttgaaggcttgacctttccaccatagacatctggtaagagaggcaaatctttctgaaaactgaccacaaaattctctagaaattttttctcagttatgcaaataatggcacttaagtgcaatttgttctcaatcagaccttttgatttcaagattttgattaccgagaatctagggataatcctcttctccaagttgtacgctatcacctgaggatattcagcaatatcttctgataaccaacccatatctttaactaggaaactcatttttttggcaaacgtctcctctgacaacttcataacacagggaaactttcgaaatacttgaagagccatttcgcgattccaaccccacctctcataaacctcaaaccttgattcccatacggctttgctcctaattagaagcatttcaacggccacaataaaatttgttctcaagggattaagcccaatttccttagcagtgttgacagcttccacaaatctggaatgcttccagtaggctacagtcgcagaattgatcatcaggaaagtgatagaagcttgcggcacaccagactgcctcaaaacctcaatgtttggaaccaagttcattgtgtcaccatatgtaaaaccaaatcgggaatttgttatagctctaacaacttcctgatcatcaccaagtacacgtctgaggatctcataacgtgggatgaagaattttttcaagctcctgttcaaggtatggttagcaattaaaatcttacgcatatcagtgttggaaagcccaatagaacggaagaacttgagtttaggcaaaagggtattctctgcatccgcaacaagcaccaaagggtgtttctccacaagttttgcaagatgggttttggtgaagccatagttgttgagaagatcaataacagcatttgggccatctggggttttcaaattgatcctattggagagttccttggcttttcttggggacaccccacatgagttgatgagataagacacagtaaaagtgtcacctttgtggtagtttccatctgattcagaatcagaagaggtgccagaagagaatgaattgaagaaaaaaaggaaagcattgtgtttgtgttgaagcagagaacccaattgggtttgggtactcctgtggtgtgtgaacgatgataatgatgcagttaaccttgcaatgagaaaattaggaaccatttattcactcacagatttcagtgaacgttgtcagatttggcataacaacactgaagttaacctattgccacaaagacaggtaactgggttttggaatatccgtggttgtggagaagaccaaggacaacatctgccgtgtctactgtctaggtttctcagataaacccttttgattttgtagaggaacaagggcatgcgtattccctactactatttacctccactacggatggcaatcgagttggtcaggt

SEQ ID NO: 51067 - protein, 82 aa, Glycine max
  peptide (1)..(82): Ceres Seq. ID no. 13581776
MLPVGYSRRIDHQESDRSLRHTRLPQNLNVWNQVHCVTICKTKSGICYSSNNFLIITKYTSEDLITWDEEFFQAPVQGMVSN

SEQ ID NO: 51068 - protein, 62 aa, Glycine max
  peptide (1)..(62): Ceres Seq. ID no. 13581777
MKNFFKLLFKVWLAIKILRISVLESPIERKNLSLGKRVFSASATSTKGCFSTSFARWVLVKP

SEQ ID NO: 51069 - protein, 61 aa, Glycine max
  peptide (1)..(61): Ceres Seq. ID no. 13581778
MIIKSICYKSDKKISPPKKIKLKMQAQKVKATQIKVQFCIEIDKLAVRIIARKNRQRLHYI

SEQ ID NO: 51070 - DNA, 1126 bp, Glycine max
  misc_feature (1)..(1126): Ceres Seq. ID no. 12582657
acataaacccacattccgaagttcataaaactacaaaatcaagtcgtatacagatataaataaccagcacaaaaataaaacctacaatatccataaagtaaacttaaaggtaaagaaccacaaaatttaaccaaatcatattgagaatgtccctctaatcgaacaagccaaatcccatatcatcatcactctcttcttcaggttcctccttctttttctcctcagcagctggggcggcagcagcaccaccaccaccaccagaggcagcaacaggggcagctgctgcaacagcaactggtgcaccaccgcctgctgcattggctatcaaatcgccaagatttttcttctcagcaagtttagcaaataaggttggccaataagtatctacttgaacctttgcagttttcaacaaggtgctgatcttgtcggcctatttacaatttaaggagcaactcgccatatccaaacaaattcatttattctaaaccttaaaacccactatttctctcccaggaaaaccaaaaaaacccagttaaaaaacacgtattagcttagacccacttttacaaacaaaatgttatcaaaatcatccgacccacttccaccaaatatgcacgtttcatctttttttaaccacaattacccagcactacacttgattcaatatgtaatccatcaatagaaaatataatccgaaagcctgaaacaaataaatgcaaccccacattgctcagtatttaatttgtttacaaatgaatctcaacaagaaaatacaggttaaattggaaccacattttcaataaaaattacttcacagaaacttttttttagttttgatttaataccaattactcggttcttcaattgaattaaatctaaactaacactagaaaacataacccaaaacaaagaaattaaattatttcgaacattcactcacaattcgttaacgcaaaacctaagggcacacaaaaggatacagttacactgattccatcttcatgaaggatgagagctgcgtatgaacaagcagtttctccgagcgacatttttacaattcagagaaggcggatcttagacaaacgaagaatgatgagtgcttctctgctgcagccgcaagtgaatt

SEQ ID NO: 51071 - protein, 39 aa, Glycine max
  peptide (1)..(39): Ceres Seq. ID no. 12582658
MRAAYEQAVSPSDIFTIQRRRILDKRRMMSASLLQPQVN

SEQ ID NO: 51072 - protein, 35 aa, Glycine max
  peptide (1)..(35): Ceres Seq. ID no. 12582659
MLSKSSDPLPPNMHVSSFFNHNYPALHLIQYVIHQ

SEQ ID NO: 51073 - DNA, 1707 bp, Glycine max
  misc_feature (1)..(1707): Ceres Seq. ID no. 12582068
aagaatcacctccattctacacaaatgaataacaatttcagcaaaataagtttgtgcacatagcaatcatctgccccaatcaataacatctctgcacctcgttgtaaacaaatttctatcacagtagaatgtaaaaaccatcagtattgccactccttagagacaacaaaaaaacagtcacggtaatatttactccttcaatgttgtggttggtgaaacacattggaaataacctaattgcattatatcctactaaaattggactgttgacctcacaataacctgctgagggacttgataagtaatttcaaactctttcttgtagcttcatcgccagtgaaacccaaaatatccgagctaacattctcaatgttcttcagggtaaaaataagagtatatatggacttttggagcagttcagtgttctcaggggtcattatggatgagtgtacccttctcaaatcctcagttgcttgtgtaaggcttcgggttaaattctcaacttccttcaacaggccactatcacggacttcagtcaacaaaggttgaacatcttcagccatggctttcatctttataagaagtggtttcgcttctttgataattgaagcagctcgttcagccaacgaatagctattaacaatgccaattttctctacatcttgcccaagacgggtaaatatcccaaccaatttatccaaactcactccttctatacccttaatcttttctctatcacacacaatgagtgcttctttagaacattcttggtcaagaggtccagccgaaggtgttggaataggatcacgaggagtaatgtcgattatagtttccataagaagacctgactggtttacttcaaccaatgaatttcgcggtatgattgttttatcgtcttcaatctcaacaatagcttcaatacttcttaaggaaggattcacacgaatgacatcacctacagtcacccctctgatcctcacaggagttccagtgcaaataccgcaagcctgatcaaactcaaatgttgctgtgtacttcctgaatttggatcgcatttggaaacccttcaaccaggccaaactaagcgcaaatagaaccgcacttgaaactaaaaacaatcctaccccaccttcccatatgctcctaccaccaaacccaaaatcacttaatggacgcattgttttcttccaaatggtacgaggaatgtccaaaacaaccgcaagaggattttttgatcccaaagctggcgatgactcaataggccctccatctgcagcagatgtagctcttatccagttgatttttcttagggctctaaatggaaggcagggcatacactttacagaacttccatgtagagtaatcagagatgaagataaagcacttggcaatgttgaagcatgcaatgaagggttagtaatcatctttgagcaaacaccgtaactcccaaatactaatatctcccaatgatgaactggaaatgaatcaaaacagcaaagactacagcagcaaaaatttcccaataactgaaacgagggaagagaagtgattaatgcttcatacttttcatttccatctagccaaagaagacagagagagaataatatgtgaaagagggtttaggctatagagatccgtgtgcaatagcaggagccattggacggtgagtgagtcagaaatcagaaggggggggggcctacgtagctg

SEQ ID NO: 51074 - protein, 122 aa, Glycine max
  peptide (1)..(122): Ceres Seq. ID no. 12582069
MPIFSTSCPRRVNIPTNLSKLTPSIPLIFSLSHTMSASLEHSWSRGPAEGVGIGSRGVMSIIVSIRRPDWFTSTNEFRGMIVLSSSISTIASILLKEGFTRMTSPTVTPLILTGVPVQIPQA

SEQ ID NO: 51075 - protein, 101 aa, Glycine max
  peptide (1)..(101): Ceres Seq. ID no. 12582070
MLLPPNPKSLNGRIVFFQMVRGMSKTTARGFFDPKAGDDSIGPPSAADVALIQLIFLRALNGRQGIHFTELPCRVIRDEDKALGNVEACNEGLVIIFEQTP

SEQ ID NO: 51076 - protein, 88 aa, Glycine max
  peptide (1)..(88): Ceres Seq. ID no. 12582071
MSASLEHSWSRGPAEGVGIGSRGVMSIIVSIRRPDWFTSTNEFRGMIVLSSSISTIASILLKEGFTRMTSPTVTPLILTGVPVQIPQA

SEQ ID NO: 51077 - DNA, 797 bp, Glycine max
  misc_feature (1)..(797): Ceres Seq. ID no. 12582387
gcaaatatatgatgaatatattttttaattctgctgctacaaagggcaatctcatagaagtattaaatgaagaaaggaaacaaaatgtgtattttcagagcagtatcaatggccttattccaatgattactgcaacaaactcaaaaattctaccaaacatttggttgctgtgtgacacaaaatcccaggtaactagagatattactctgaacggcctgccttgccctcctcatttttattcatggccttctttgccaactcatagcctgcaaagttcatagcacctagaggagcaatccaaaagaacctgggtactgctcctttgaacaagccaaggggtccctcatgttttagtatagagaaggctatcaaagtcatcgacacagatcggccctgtgcagtcatcattctagttttcatgacatcgaacggcgttgtaacaacagccgccaagccaccagataaagctccaacagcaattgtttccaagggaccgagttcccgctctagtagtcgttcggcaacctaaaatcaaatgccatgacaattaaccatttcagtgtggcattaaaggagactcactggtagccaagcaaacatactatgccaaggtgtacatacaatttacgagtgagttattccctgttagttgttgtgtatatcacatacatcagagtatcaattcagatttcagaaagcatttgtcacacaattttaaagagcaatatcccatggcctaaagttagctagatttattacaactcatttcatattgggggggggggcctacgtagctg

SEQ ID NO: 51078 - protein, 92 aa, Glycine max
  peptide (1)..(92): Ceres Seq. ID no. 12582388
KYMMNIFFNSAATKGNLIEVLNEERKQNVYFQSSINGLIPMITATNSKILPNIWLLCDTKSQVTRDITLNGLPCPPHFYSWPSLPTHSLQSS

SEQ ID NO: 51079 - protein, 90 aa, Glycine max
  peptide (1)..(90): Ceres Seq. ID no. 12582389
MMNIFFNSAATKGNLIEVLNEERKQNVYFQSSINGLIPMITATNSKILPNIWLLCDTKSQVTRDITLNGLPCPPHFYSWPSLPTHSLQSS

SEQ ID NO: 51080 - protein, 89 aa, Glycine max
  peptide (1)..(89): Ceres Seq. ID no. 12582390
MNIFFNSAATKGNLIEVLNEERKQNVYFQSSINGLIPMITATNSKILPNIWLLCDTKSQVTRDITLNGLPCPPHFYSWPSLPTHSLQSS

SEQ ID NO: 51081 - DNA, 1352 bp, Glycine max
  misc_feature (1)..(1352): Ceres Seq. ID no. 14308128
ttcaaacgcctctgtactcttcccaccagtccaatgtaataaaattttgtgcatactctaaaatctaaaacaccatgatggggattacagatatttcatgtccacacttcctttctcatggaaggcattactcttctgttttcttctcataaattgcagtgtgcttcaacactctcaaacaaactttttcaatgtaccaaatgtggagtgaaaactgatatcggttgaagcaaatatagctggatgatgaccaagctgggcagtgtcacaacaactcttaattaggaataggatgaggagcctcaatggggaatgcatgctgtatgtgagagaaaagagatggttgaagttacagaaaatttaaatttgaaaaaaaatgaaaaggcagttttatcaattaatcagttatttaactgagtatgacggatttttgtctgaaagaaaaatgaggaggatgctaacccatatgtgtgtgttcagataccgtaattttgcttcataattcattattgattcaagtgttcatgtacaagttgcatgctaattaatctgtatgttacagttttgtatgataataacaattttttacatttagttgctttgatgttggtctctgtttaacatttttttgtatgtttccgtgattagtgctcaaagcacggctaagattgaggaactgcttctagaagatcaaaatgttaagcgcagaagggatcgaatccagaaacaatcatcccttctctcgaaattgacacgccaattgagtattcatgacacccgagcagcagctgcctctggctggtcaaacggtagtgcagagagtagcccaagaagcagcagcggacctggtgatgactggagatctgcctttgatgcagctgccaatggccctgttagtcgaagtggttcatcaagatcgggatccaatggtcacagtcgacattctagtgatgctgcccaaaatggtgatgtgaactctgggtcaaactccagcagccgtcgaacgcctaatcggttgcctcctgctcctccgggttcttcaggttacaaatattaacaggtggctgactagtgattgcttgacagttactgtttgatacatttttggagggtgaggctgctcccaccccatttcatacggtcatccccaattctttgtttctgccggtatatttaggtgaggaaatgtttgtgtaaatagaagacgactatagtttattagtataagttttctgggcattcgtctcattatccggaagtttggtatcgaggtggacttgagtacatttatcatgttttgctttttttgtttacgaagcatttatcatgttttgctaaaaaaaaaaaaaaag

SEQ ID NO: 51082 - protein, 67 aa, Glycine max
  peptide (1)..(67): Ceres Seq. ID no. 14308129
MTPEQQLPLAGQTVVQRVAQEAAADLVMTGDLPLMQLPMALLVEVVHQDRDPMVTVDILVMLPKMVM

SEQ ID NO: 51083 - protein, 41 aa, Glycine max
  peptide (1)..(41): Ceres Seq. ID no. 14308130
MKRQFYQLISYLTEYDGFLSERKMRRMLTHMCVFRYRNFAS

SEQ ID NO: 51084 - protein, 40 aa, Glycine max
  peptide (1)..(40): Ceres Seq. ID no. 14308131
MTGDLPLMQLPMALLVEVVHQDRDPMVTVDILVMLPKMVM

SEQ ID NO: 51085 - DNA, 1462 bp, Glycine max
  misc_feature (1)..(1462): Ceres Seq. ID no. 15177384
gaaaaagcaaaagagaaagaatatatttttcaaactaaacaagcaacaatacataagaaaaaaaaaggatttgtgatcttctgtataatttttctgacacacccagataactcatacacaacactcgttacacaattgacccataaataaacctggttccagacagttctatagttcaatttatgctcaatcacaaagaatctttcaatgaagataaaattggacaaaagatattcactttgcaactgcatatatagattacttgtgtgtaagcttaaatgaattaatagtaaaacaagttcttatttattggtatacaaaaagaagcatttgatgaaggcagggcagggaaaaaaaatcaaaagacagaataagccttgatcagccaacaatacatatgaaaaaagaaagatttgttgtcttgacaaaatatgattactgattagacactgacactgcggagcacaaccgtctcaacagtgagtccagggccaaaaccaaagagcacaccccaatcaaggccttcaccagttgtgccaagtccattttctatagacttcttcctcatctgatccaagatgaataacacacatgcacttgacatattaccatactcgctgagcacatgtctagtagcttccattttttcaggcttcaagcctaacttagcctcgacttggtctaaaattgccggtccaccagggtgtgcaatccagaagatagagttgtaatcagagattcccaagggttggaaggcttcaactaaggccttttcgatattcttagagatgagtccaggaacatccttgaggagatggaagtgagtccaacttctcgaaggtggccatcaatagccccttcactgtctggaaggattgtctgtgcagtccaaacaagctgaaacaaagacttttcaactggtaaggggtctgatccaacaatgacagcagctgcaccatctccaaacaaggcttgacccacaaggctatcaagatgggtgtcagttgggccacggaacgtcactgcagtgatctcagaacaaaccacaagcacgcgagcacccttgttgttttcggcgaggtctttggccagacgaagcaccgtgccaccggcaaagcagccttgttggtacatcatgtaacgcttgacggagggacgaaggcccagtagtttagtgagctggtaatcagcaccaggcatgtcgacaccgctggtggtgcaaaaaatgagatgggtaatcttggacttgggttgaccccattccttgattgccttagttgcagcctcttttcccaactttggtacctccacaaccaccatgtcttgccttgcatccaatgaaggtgccatatatgcacaaacactcggattctccttcaggatctcttcatttaagtacatgtatcgcttcttaatcattgacttatcacctgatccaaacaataaattaaatttcattagt

SEQ ID NO: 51086 - protein, 58 aa, Glycine max
  peptide (1)..(58): Ceres Seq. ID no. 15177385
MGVSWATERHCSDLRTNHKHASTLVVFGEVFGQTKHRATGKAALLVHHVTLDGGTKAQ

SEQ ID NO: 51087 - protein, 50 aa, Glycine max
  peptide (1)..(50): Ceres Seq. ID no. 15177386
MNNTHALDILPYSLSTCLVASIFSGFKPNLASTWSKIAGPPGCAIQKIEL

SEQ ID NO: 51088 - protein, 49 aa, Glycine max
  peptide (1)..(49): Ceres Seq. ID no. 15177387
EKAKEKEYIFQTKQATIHKKKKGFVIFCIIFLTHPDNSYTTLVTQLTHK

SEQ ID NO: 51089 - DNA, 1418 bp, Glycine max
  misc_feature (1)..(1418): Ceres Seq. ID no. 12364737
gagcaaaggaatagagaacattttatttctgatgacagaccaaaattacttccaagagagcaataacaattggagggacaaaccagtacataataattaactttgcagcacaaaccacactagctaaggaattatcatgagaagatgaaataaacttaattagggggcacacacatagatagaatacgaaggaaggttattgtagatgatgcattgatcaagtcttggaatcgatggccatgatagtgctgagattcatggggtgcatgtactcagtggtgcctctgaggatctgttggactatgattcgactagctttctctgatggatggaatggatcccaaaacgcgtaaaggtctctgttcggacacaagtttgaggccggtgtgcagagtccaaccccattgtatggcccttgcccacaacaagctatcttcgatgtaacaaatccataagctcgagggttggaaacgaaatccatgtgcatgcgttgggcattagcagcaatgaaaacgtcagcaccaagttcttgatttaatccgtttaacatttgaacgagttggggattgaataaggatgcagctctctgaagttccacgtcgcaatcaccagttctgcttctcgtcgctaattccgcaggaacacaccccattggtcctgtacccgttacaagaaccctacgtgcacccaaatcataaagcctccttagaactttgcggtactcagatatgagatagcgcacatagtcagggagagaaaattggcgagatcttgccgaatagggcaccaagtagtaattgttgacaaaatcattgcctccaagagtgatgaggacgagtgctctgtttactaggttcctggttccctccgcaccaatgtgtaaacttaacctttcctgatactcgtggaatagcttcagttgcttctgaatgtggataatgttcaaaaattgaattccagtatcattgagaatgccaattccagcggaggcaaaattggcaccaattaagagcttctctccaactagtagcgggctcaaatagggtagtgtaggctctaagccaagctccaaactaattaagtcagggatgtttaggccattagagaagcgtccagtgggtctgtgtgttgggtagtcaatgccatagggtggagcgtctgctctggctgtggttaccaagaaatcattgttaccactgtccacgagtgaatcaccaaatacgaagaaagcccttgttggttgagcagaaacagaacctagtgctacaaccaagcttattactaaacaatagccaaacaccaaaacactagtcatggctgcaaaacaggagtgaccactactgttgattgtgtatgaatatgattctcttaggtttgataactcgtggcttcggggggggggggggcctacgtagctg

SEQ ID NO: 51090 - protein, 51 aa, Glycine max
  peptide (1)..(51): Ceres Seq. ID no. 12364738
MQLSEVPRRNHQFCFSSLIPQEHTPLVLYPLQEPYVHPNHKASLELCGTQI

SEQ ID NO: 51091 - protein, 39 aa, Glycine max
  peptide (1)..(39): Ceres Seq. ID no. 12364739
MAMIVLRFMGCMYSVVPLRICWTMIRLAFSDGWNGSQNA

SEQ ID NO: 51092 - protein, 39 aa, Glycine max
  peptide (1)..(39): Ceres Seq. ID no. 12364740
MDGMDPKTRKGLCSDTSLRPVCRVQPHCMALAHNKLSSM

SEQ ID NO: 51093 - DNA, 931 bp, Glycine max
  misc_feature (1)..(931): Ceres Seq. ID no. 13594090
gtcgacggtatcgataagcttttttttttttttttttcgaataaaatacttatttctattagagaaaatataaatataaatacaacacattcctctaaacaaactaataatgttttttgtttggtgcgttgaaaaaaaaacgatacatctttacaatatttttcctaaagaatgtgacttccaccttttaaacttaaacaatgtcataacatggtaacatgcactcacatgtcagttgctttaatggacaccttaaactcatctttgaagaaatattttgaaagaaaaaagttaaacaaattgtctgtaactaagtctgcggtatcgtgttttgttgtttagccctttcagcctcaatcttccgtagcattgatgaactcagcttaatttcacctgattctccagagaccaaatctacaacttcaatcttcaactgtgaaagatctctttcagctcttcttctgtttatagccaatcctcccggtaatgtctctttgcttacaatcacagcctccaagttctcatctgtaatggaagggccaaatggatctgtgattggcacagcttgcacttccaactccggcttgatagactttatgaaagttttgacattatttatcctttcctcaatgggctgtatcagttcagcaaactgtttttttgccagcataggtccatcgcaaactccaattacaatccggcgccttgccaactccgctgaagcggtgaggaagaggcggtggccgtcgtgcaatcggtcgaaggtgccaccattgacgacggcttcgtaggtgttgggcggagagagtttgggaaccaccatcaccatggtgtcatcgtcaccgtgaaccgccattcgatgtgcaggaatgactttcactggtggcagtaggtgtgagatgaaaagaggatcggattcgttgttatatat

SEQ ID NO: 51094 - protein, 86 aa, Glycine max
  peptide (1)..(86): Ceres Seq. ID no. 13594091
MEGPNGSVIGTACTSNSGLIDFMKVLTLFILSSMGCISSANCFFASIGPSQTPITIRRLANSAEAVRKRRWPSCNRSKVPPLTTAS

SEQ ID NO: 51095 - protein, 64 aa, Glycine max
  peptide (1)..(64): Ceres Seq. ID no. 13594092
MKVLTLFILSSMGCISSANCFFASIGPSQTPITIRRLANSAEAVRKRRWPSCNRSKVPPLTTAS

SEQ ID NO: 51096 - protein, 53 aa, Glycine max
  peptide (1)..(53): Ceres Seq. ID no. 13594093
MGCISSANCFFASIGPSQTPITIRRLANSAEAVRKRRWPSCNRSKVPPLTTAS

SEQ ID NO: 51097 - DNA, 1024 bp, Glycine max
  misc_feature (1)..(1024): Ceres Seq. ID no. 13594734
cctagaacatcctaatcgaaaagcgtttcccttcaacaacttgagatccaatccagcgagagagagaaatccccaatccaattcaccgaaccctaaccctaaccaagcaggcggcaagagagatgttggtccagaagatgccgatggccgccggctacgagggctttcccctcatcccatcgttccaggcggacaaggagcaggcggaggcggtgttggccgtcagggccatcaaggccaaggcggaggaggcgtcgttgatcctcaaggcggggtgcggctccaagaggaaggcggaggaggacggcggcgaggtcaccgtcaaggccaaggccaaggccgcggaggaggaggcggcagctttcaccaccgtcaaggccaaggcagaggaggactcggacgaagacgctgaatgggacgatgatgagttcatggccagaatcacggcagaccacgccgcccatgtcgagaagatgaaggctctgtatcccaccatcaagtacggggactacgaccctaaggtctactgccacagccccgacccggagtcggatgcttggaatctccaaaagaaatgccttggtcttgctgagattgctgccggattactgtaatttgacgactgggatgggaatatgggatggaggagggttaccaatgctatctatctatctatatgctagtagtcgatcaatcgatccggaggacatctaaattaatgttagccaagcaccacctatatgtgatgtgcgtgcgtgtgtgatatcagtgggcagtgtcaatgccaatgtatctactaatattatctagtgctattatattaaaaaaaaaaaaaaaaaagcttatcgataccgtcgacctcgagggggggccgagttcccagttggcagtatcattaatgtgaagctctccatcgccggccctgtngccgccgtcggattcttcttcttctctctctaagttgataaacaacttatttgtttcatatgactttatgtaacgtntgagatgagaccacatcttt

SEQ ID NO: 51098 - protein, 163 aa, Glycine max
  peptide (1)..(163): Ceres Seq. ID no. 13594735
MLVQKMPMAAGYEGFPLIPSFQADKEQAEAVLAVRAIKAKAEEASLILKAGCGSKRKAEEDGGEVTVKAKAKAAEEEAAAFTTVKAKAEEDSDEDAEWDDDEFMARITADHAAHVEKMKALYPTIKYGDYDPKVYCHSPDPESDAWNLQKKCLGLAEIAAGLL

SEQ ID NO: 51099 - protein, 158 aa, Glycine max
  peptide (1)..(158): Ceres Seq. ID no. 13594736
MPMAAGYEGFPLIPSFQADKEQAEAVLAVRAIKAKAEEASLILKAGCGSKRKAEEDGGEVTVKAKAKAAEEEAAAFTTVKAKAEEDSDEDAEWDDDEFMARITADHAAHVEKMKALYPTIKYGDYDPKVYCHSPDPESDAWNLQKKCLGLAEIAAGLL

SEQ ID NO: 51100 - protein, 156 aa, Glycine max
  peptide (1)..(156): Ceres Seq. ID no. 13594737
MAAGYEGFPLIPSFQADKEQAEAVLAVRAIKAKAEEASLILKAGCGSKRKAEEDGGEVTVKAKAKAAEEEAAAFTTVKAKAEEDSDEDAEWDDDEFMARITADHAAHVEKMKALYPTIKYGDYDPKVYCHSPDPESDAWNLQKKCLGLAEIAAGLL

SEQ ID NO: 51101 - DNA, 916 bp, Glycine max
  misc_feature (1)..(916): Ceres Seq. ID no. 13638716
gaagggaactgtagccagggccaggatattattattgtgtaacaacgcaagttgagcatgaccaggctatcgggatccaatgctgggataatagtcggtgttggcgacacgccagacgttctagaaatactcacgcggccccagtacattttcgacatattattgatggcacagctatagatatggatcttgtgggaggctgcgcaaatctacgacgaagctgttggatctgactgtagatatggggcgaagtgcttcagtgtctcctcgtagacaggtttcttgaaatcaacagccttctcaatcacttgctgaggggtcatccatgcccattcggagaactccggcttctcggatccatcgcccatcaggttgatctcctcgtcacccccggtaagcctaaatagaaaccacttctgagcctggcccttccagtttgttccccacctagcattcagcttgtctttgacatccgcggggaaatcatatgtcaaccaattgggggcctcggcgacgatctcggcggatctaacaccagtttcttccctcaattccctaacggcagctgctcgcggctcttcccctgggtctattccaccctgaggcatctgccacgcggtggggatgtcgatcctggacgcggagaaaatcttggtgagggaggggtcggcgaggcagatgccgacgttggtgcggtagccctcgggcggcgagtccatggtggcgaacacggcgagcggcgaggccgagcaggagagcgggcggcggcgggcgatccgggggagccggagcgcggcggaggaggaggagatggtgggggtgagaatgaggcagcgtgcggcggccaccgtcatcggtcttttcgattaggattttctaggtaatggtctcgtgcgaattcctgcagcccggggga

SEQ ID NO: 51102 - protein, 50 aa, Glycine max
  peptide (1)..(50): Ceres Seq. ID no. 13638717
MVANTASGEAEQESGRRRAIRGSRSAAEEEEMVGVRMRQRAAATVIGLFD

SEQ ID NO: 51103 - protein, 40 aa, Glycine max
  peptide (1)..(40): Ceres Seq. ID no. 13638718
MTRLSGSNAGIIVGVGDTPDVLEILTRPQYIFDILLMAQL

SEQ ID NO: 51104 - DNA, 636 bp, Glycine max
  misc_feature (1)..(636): Ceres Seq. ID no. 14305990
tgtccgaggtttcctccaacaagcgcgcatctcttgcttccaccaccgtctataactaagacttgaccttctcctttggtctctagttggtttctgacaaggacattgtcttcaaataccttgagtgtcacgattggtcctgagaagcatcttctttggccgtagatgttgaagattgggtggagagcgcgtaggtctccgtttgctattagctcagaacaacgggtgggcagggattgtggtgaatggatgcgttagagatgtggatgagatcaatgactgtgatgtcggggttagggcattgggttctaacccactgaagtctagtaagaaaggtcatggtgagaagaatgtgccggtttatattggaggaactttgattagagatggagagtggctttatgctgatagtgatggtatcttgatctccaagaccgaactctccgtttgattcagaatgttttcatgatagtgctaagagaaagagagtactactacagcggtttcttgggacatgctggtttatttcaaatttttaataatcggtttcatattcttaaaattaaatcgtgtaacgcgctttgtgaactttgtaatactgaagatttttttttttaaaataatttcttatattcg

SEQ ID NO: 51105 - protein, 50 aa, Glycine max
  peptide (1)..(50): Ceres Seq. ID no. 14305991
MIVLREREYYYSGFLGHAGLFQIFNNRFHILKIKSCNALCELCNTEDFFF

SEQ ID NO: 51106 - protein, 40 aa, Glycine max
  peptide (1)..(40): Ceres Seq. ID no. 14305992
MLVYFKFLIIGFIFLKLNRVTRFVNFVILKIFFFKIISYI

SEQ ID NO: 51107 - protein, 30 aa, Glycine max
  peptide (1)..(30): Ceres Seq. ID no. 14305993
MLKIGWRARRSPFAISSEQRVGRDCGEWMR

SEQ ID NO: 51108 - DNA, 599 bp, Glycine max
  misc_feature (1)..(599): Ceres Seq. ID no. 15170815
atcctctagctagtcgattgattgatccagaaatcaaggccggtccatggggaactttttgcccggacgtgcgtccatgaaggacgccctggacgaaaccatgcacctcgtcgacaccaagatggtctggcatcacgtcgccaacggcgggtgcctccaagagttcgtgatcgccatggacgtgtgcaaccccgattacatgaagcagcggcacccccagttttacaagaagcagcaacgcaaggccacccccgtcgacaaggacgcgtgcgtcaaggccacggcggcactgcgcgagtgcttcgccggcaaccccgtcatgttcaagcacgagtatctccaccgcatggacgagggcctcgaccaggaccgcaacccctccccggcccagatcaagaaggagtgggccagcgaatataggtggtggaccggcatgaggagaagctagtaaattttgtgcagatgcagtacgtgatgatcaatggcgctagatagatatatagatagatcggttcatcttatgatgcgatgtgtttgtttggtaagttagttttttcattaccatgcattattcgcaacgaagtgtaacaagtgatgtt

SEQ ID NO: 51109 - protein, 133 aa, Glycine max
  peptide (1)..(133): Ceres Seq. ID no. 15170816
MGNFLPGRASMKDALDETMHLVDTKMVWHHVANGGCLQEFVIAMDVCNPDYMKQRHPQFYKKQQRKATPVDKDACVKATAALRECFAGNPVMFKHEYLHRMDEGLDQDRNPSPAQIKKEWASEYRWWTGMRRS

SEQ ID NO: 51110 - protein, 123 aa, Glycine max
  peptide (1)..(123): Ceres Seq. ID no. 15170817
MKDALDETMHLVDTKMVWHHVANGGCLQEFVIAMDVCNPDYMKQRHPQFYKKQQRKATPVDKDACVKATAALRECFAGNPVMFKHEYLHRMDEGLDQDRNPSPAQIKKEWASEYRWWTGMRRS

SEQ ID NO: 51111 - protein, 115 aa, Glycine max
  peptide (1)..(115): Ceres Seq. ID no. 15170818
MHLVDTKMVWHHVANGGCLQEFVIAMDVCNPDYMKQRHPQFYKKQQRKATPVDKDACVKATAALRECFAGNPVMFKHEYLHRMDEGLDQDRNPSPAQIKKEWASEYRWWTGMRRS

SEQ ID NO: 51112 - DNA, 925 bp, Glycine max
  misc_feature (1)..(925): Ceres Seq. ID no. 14307229
gatcgcgtcttttagttgtctatatatgtatctgagttatgctatattatcatcaagtgtcctaaaatgaagacatacagacgcagaacaaaaaagacagtgcatctatcacaggaactgatcaatgaaatcttgttgaggttgccggtgaaatctcttgtccgcttcaaatgtgtgtgtaagtggctttcccttatctctgattagcacttttcactatcacattttgaacgtgcagccgaaggcacagagagacttgtgttctttgagccttcagctcctgaaatccgatccatagacttcaatgcatctctttacgatgattctgcttctgttgcattaaagctcaactttttgccacccaaaccttatgatgttcgaatccgaggttcctgtcggggccttgtgctcttggagtgctgtcaaagtctctgggtgtgaaatccatccacaggtttccacggacaactagcttacccacctataattgctcccagtaagaatgtcatgtttttgacatttctctatggtttttggtatgacccatcaacagatgactacttggtggttaaagtgttctgccacgcttgctcagctgttagtgctaactgatacggaagcagaggcagcaaacacaacaacaggaacagcagtcacaaagccaaaaacgaaggtgcaagtagaagaaaagcccaagagaaagatcacaaagccatcttacctcaaccactacttttgaggaaatggacaaagctagtagcgtaatctgcttgttggtgcttgtctacccacaggggacaagcctaacaaattctgttagtgtaatattcctaggcacacatcagcacaattttgttactaggaaacactataaatatagctatgtaaataacaagcaagtcaatgaaaattcacaattaccttc

SEQ ID NO: 51113 - protein, 70 aa, Glycine max
  peptide (1)..(70): Ceres Seq. ID no. 14307230
MVFGMTHQQMTTWWLKCSATLAQLLVLTDTEAEAANTTTGTAVTKPKTKVQVEEKPKRKITKPSYLNHYF

SEQ ID NO: 51114 - protein, 66 aa, Glycine max
  peptide (1)..(66): Ceres Seq. ID no. 14307231
MTHQQMTTWWLKCSATLAQLLVLTDTEAEAANTTTGTAVTKPKTKVQVEEKPKRKITKPSYLNHYF

SEQ ID NO: 51115 - protein, 61 aa, Glycine max
  peptide (1)..(61): Ceres Seq. ID no. 14307232
MTTWWLKCSATLAQLLVLTDTEAEAANTTTGTAVTKPKTKVQVEEKPKRKITKPSYLNHYF

SEQ ID NO: 51116 - DNA, 1308 bp, Glycine max
  misc_feature (1)..(1308): Ceres Seq. ID no. 13595626
cagaatatatttgaattaaatccaataayaaattcyrrtaahmwragaaaagaaaaaaggaaaaacagccggcgacaaggcattgggggtctccactctgcagcttccactctctaaagtctaaagtcttccaaatcccaaaaccctagggaagatgatggcgtcttccaattcacgaaaatcagaaacttccccttctcccgccccgcaattcaccaccaccaacttcatccccatccccgccgccgcagcccctaaaaccgtcgatgacgtgtggcaggagatcgtgaccggcgaccgccgcgagtgcaaggaggaggccctcgacgacgacgacgacgacgacaacgagatgatgactctcgaggacttcctcgccaaggccgacgccgtggacgacgctgaccatgaccatgaccatgcccatgaccacgaccccgactaccacaacgacgacgtcaagatgccaatgcccctcaccgagaggctcggcagcggcaccctcttctccttcgaccaccttcccacgacgccgtttcacgacccctccgaaggctccgtcatagggttcggaaacggcgtcgaggtcyahygaatgcggaaggggtaaaagatcgcgtcccgttttggagcagttggataaggccgcgcaacagaggcagaggaggatgatcaaaaacagagaatctgctgctaggtctagggaacgcaaacaggcttaccaagtggaattggagtctttggcggtgaaactagaggaggaaaatgacaagctcttgaaggaaaaggctgagaggaaaaagaagaggtacaagcagctaatggaaaaagtactccctattgcgcagaagcaaaagccaccatgtatactccgtagggctcgctccttgcaatggtagatcaaaattgctaggggtgcaggacaggaattgaatattaaccacatcagtggtgggaaatgagcaaattaatcatcatctcttaaaaatcatagttctcagcctaatgattagtctcgagggcaatcatggttaaaaatgtgaagagattgatggaattggaacctgagtaataaggaaaatttcttattactgaagaaacaacatttgcttattcttaggaggtaaaaagcggaagtatggagttggaccatgtaagtttagatacaaattaaacatcctggtatctcccgtgcgcagaatgtcaatgtgtaatagtagagagcaaagggaatttgtagactagtatataatgtagtcatggcttagacctatatttatttggagataaaagtatatagaaattgct

SEQ ID NO: 51117 - protein, 151 aa, Glycine max
  peptide (1)..(151): Ceres Seq. ID no. 15221624
  misc_feature (146)..(146): Xaa is any aa, unknown or other
  misc_feature (147)..(147): Xaa is any aa, unknown or other
MMASSNSRKSETSPSPAPQFTTTNFIPIPAAAAPKTVDDVWQEIVTGDRRECKEEALDDDDDDDNEMMTLEDFLAKADAVDDADHDHDHAHDHDPDYHNDDVKMPMPLTERLGSGTLFSFDHLPTTPFHDPSEGSVIGFGNGVEVXXMRKG

SEQ ID NO: 51118 - protein, 150 aa, Glycine max
  peptide (1)..(150): Ceres Seq. ID no. 15221625
  misc_feature (145)..(145): Xaa is any aa, unknown or other
  misc_feature (146)..(146): Xaa is any aa, unknown or other
MASSNSRKSETSPSPAPQFTTTNFIPIPAAAAPKTVDDVWQEIVTGDRRECKEEALDDDDDDDNEMMTLEDFLAKADAVDDADHDHDHAHDHDPDYHNDDVKMPMPLTERLGSGTLFSFDHLPTTPFHDPSEGSVIGFGNGVEVXXMRKG

SEQ ID NO: 51119 - protein, 85 aa, Glycine max
  peptide (1)..(85): Ceres Seq. ID no. 15221626
  misc_feature (80)..(80): Xaa is any aa, unknown or other
  misc_feature (81)..(81): Xaa is any aa, unknown or other
MMTLEDFLAKADAVDDADHDHDHAHDHDPDYHNDDVKMPMPLTERLGSGTLFSFDHLPTTPFHDPSEGSVIGFGNGVEVXXMRKG

SEQ ID NO: 51120 - DNA, 970 bp, Glycine max
  misc_feature (1)..(970): Ceres Seq. ID no. 13582109
atcatcagtttctcatttcaagcttctttcctcatcgcctgcgctttagttttcagtgttaatctgaggattgctagcttctaccaccagcattagtaacgcatccttttgttccttcatgacatgtcgctcgatttaagatcctgtttcactgaatttacttggcatgcaagactctcgaaatccacaaacccttctgtgtttcagtgatcttgtctacaattagtaatcataagcatctcatgctaggccaagaataaaacgtaagggtcaagaatcagatcaagtcgaagcatataaagggattgaaggaagtgaaagttattaaccttcttggagcggacacgaccgatgcctttctcaagcctaccttccaggttcttgagctccttgaggttcaaggaaccaagagattcaccaagaatgtgtctgttcagattctgaatgtcccggatctgtctccgtagcttagacgattcttgctgatagtacttcatcaagtgttcgaccccacaagggattcagtaaagtcagaaactgaaacaagaagaaacgtagtggtaaagtaactaactatggaagcttacctgagtattagcttcggtgacggaaggaggattaacagcgtcggagcaagctttcttgtacctttcaatcgttcctcttacacttttcattaattgtacgatttcaccaacatccacaaaaagaaaatacaagagttagtaaattagagagctataagcaaagacataatcattggcggaggcagaaaatatttctgttgggggcaaaaaaaaggtatgagagcaaaaaataattatgagtggggacatcatatagattgaactttaagttacactattttttttaatcttgttgggttcattgcccccatgttgttgcatgtggctcttccactggacataatgtacatatcctataaataacatctttatcgacttctacg

SEQ ID NO: 51121 - protein, 34 aa, Glycine max
  peptide (1)..(34): Ceres Seq. ID no. 13582110
MEAYLSISFGDGRRINSVGASFLVPFNRSSYTFH

SEQ ID NO: 51122 - protein, 31 aa, Glycine max
  peptide (1)..(31): Ceres Seq. ID no. 13582111
IISFSFQASFLIACALVFSVNLRIASFYHQH

SEQ ID NO: 51123 - protein, 30 aa, Glycine max
  peptide (1)..(30): Ceres Seq. ID no. 13582112
MPFSSLPSRFLSSLRFKEPRDSPRMCLFRF

SEQ ID NO: 51124 - DNA, 1682 bp, Glycine max
  misc_feature (1)..(1682): Ceres Seq. ID no. 13595492
tcgaggtcgacggtatcgataagcttttttttttttttttttgagtcattaaatatatgcttctcacaataatacaagaaagcatataccaatttccatatactaacaaatagatgaagcagtgtttttttacatcagtgatggatacataacccgacacaagtaacaacacataactgagcttcatcaaatattaacatctatacaatgcttggcccctcccttctgcatatacatattacacatttaatgccaacatacatgaaccagcgataaaatcacacgacttaaaatattttacacatcttattcttccttacacttgcttcgcgtggcacatcaacattcaacaacctaaatgcttcattggcgaaaccagagtttcaacatagacctctgcatcaaaccagcccttaccactctcaatcttaggatacttaaacgagttatctcttgggttatacagaatcaagtcaaactcaaacatcaacagcacttcaccattctctgaaatgtaataaggccctgagtacgaaaaattttcaggattaggcacataaggaatgctcaccaatttcacccaagactctctcactccataatccttcatcatccacacaacaaaatgagttttcttgtaatcataattcatgcaaagacatccttgtaaaacacccaaaccaggggtggaacagtcttccttttcataatcaggtggcagaacttccctatatgtttccttatgaagatccaaggaaacaataacccacaaggaacttgaaccaatagaatgattagcagcccaattgagagtgccgctcacaaattttcctgaattttgaaagggtgagaaaccatgagggaaatcctgaatcttcctccatgaattggtggccatgctatacaccttcactttacactcaataaaatactcactagggtcacaaaacacagccaccaccttgtaatcctcattaacatgatcatagccaaggccaaaggcagtgaaacaccctggcctccaattattccccaaaggtggtgattttttggagaccttgatggaggggttccaaagaagcacacaatcaccctttatggcaaaacataacaacccattacaagagccaacaatcccatcgtggcgaaacttgttcttcacagggtagttaagttcatcacaaacggttgaaaggttgttgaacaaggaactcagagaacatgatttgaggtgaaactcagcggttgtggcactcaatatgatcctgtggtgggtgaagtgggtgcttcgagatgacaggtgaaggtgctttttcatgaagtaaggatcataaataagggacatccatgacttgcaaacgcacctgaactgcaacagagacttcactgggagcctcgagagaatttcaacaacgagttcatcagggagaaagggtagtggaagtgactctgacatgccttgttgtttctgaaccgaagatggtggcagtggtgaggttcggtccattgggttgatgagcctttctctcttcctggtgaagcctatgcggtggaggtaaccctgcgatgacatgttaggttgaggtggtggaagtgtttgtggtgatcagtgatcagtagtgtttatgttgagttgagtctgagacagtgtgtgtgtgtgagagagagagagagagtttcat

SEQ ID NO: 51125 - protein, 50 aa, Glycine max
  peptide (1)..(50): Ceres Seq. ID no. 13595493
MLHWRNQSFNIDLCIKPALTTLNLRILKRVISWVIQNQVKLKHQQHFTIL

SEQ ID NO: 51126 - protein, 35 aa, Glycine max
  peptide (1)..(35): Ceres Seq. ID no. 13595494
MEGFQRSTQSPFMAKHNNPLQEPTIPSWRNLFFTG

SEQ ID NO: 51127 - DNA, 1559 bp, Glycine max
  misc_feature (1)..(1559): Ceres Seq. ID no. 13595497
ctccttaattctcagtccaaaccacacctttccccacttctattccacattcttctctctctctctctctctctctctctctattttcacttagcctatgcagagaaagagaaggagatcatggagcttggtttgagcttaggagactcttcaaggcctttgcttggtttcatggaaaagcctcgtgaagccacctccaaccaactggggttaggcttcaacacaacgttatcaattggtccaatcatcactagacaaaaagatcatcaacaagatgaagatgaagaataccaagatgaagaaacaaagccaaataacaacaacaacactcacagaacagaagatcctaatgacctttgttccaaacccaacaacaacacagttctgcatcaacttgattttctccctcaacttgctctcccatggcaccctccttctgaaaacgggagtttatcatccgagttgggaggttcttcacgggggctggacgtgaacgtgcaacctccagcggcggaggacgaggcggcgcggtncgtcgtctccgaacagcgccgccccttcgntksnnwtmartgatctctgcatatacaacagcagaggagggagctctaataagagggactttgagggtgaggcctatgatcaaaggacttcttcaagagctagcgatgatgatgacaataatggtagtggtggtaacaccaggaagaaactcagactctcgaaggaacagtctgcgttccttgaagagagtttcaaggagcacaacactcttaatcccaaacaaaagcttgctcttgctaaacaactcaatcttcaacctcgccaagtagaagtttggttccaaaaccgaagagcaaggactaagttgaagcaaacagaagtggattgtgagtacttgaagagatgttgtgagacactaacggaagagaatagaagacttcacaaggagcttcaagaattgagggctttgaagacttcaaacccattctacatgcaattaccagccactactttgaccatgtgcccttcttgtgaacgcgtggccacaaattccacatccacttcctcatcaatgagtgccaccatcaatgctactaattcaggagccacggcctgtgtcaaaacaggtaataacaataacaacaatgactcaccctccaaacccattggattcccctttggcaaacccaggttccacccatttgttcacagtagccaacaacaactccatcagcaccaatcctcagcatcttgaaagatatcaagctcaagactagtgctatatattttgagttgaggcttggaaattgatttgatttttgtatatagggaagttaattaattctgagaggcttatagtttttttttggtgggggtggagacggttatatagaatttggataattggttttttttccttgtttgaatctctctctgtattttccttcttttactggttttatccatggtgaaatcagaaagaaggcagaagaaaattttagacagtgaagatgatagatatcaaagagaaagggaaatgatactgggttttttgt

SEQ ID NO: 51128 - protein, 191 aa, Glycine max
  peptide (1)..(191): Ceres Seq. ID no. 15221597
  misc_feature (178)..(178): Xaa is any aa, unknown or other
  misc_feature (188)..(188): Xaa is any aa, unknown or other
  misc_feature (189)..(189): Xaa is any aa, unknown or other
  misc_feature (190)..(190): Xaa is any aa, unknown or other
  misc_feature (191)..(191): Xaa is any aa, unknown or other
LLNSQSKPHLSPLLFHILLSLSLSLSLYFHLAYAEKEKEIMELGLSLGDSSRPLLGFMEKPREATSNQLGLGFNTTLSIGPIITRQKDHQQDEDEEYQDEETKPNNNNNTHRTEDPNDLCSKPNNNTVLHQLDFLPQLALPWHPPSENGSLSSELGGSSRGLDVNVQPPAAEDEAARXVVSEQRRPFXXXX

SEQ ID NO: 51129 - protein, 151 aa, Glycine max
  peptide (1)..(151): Ceres Seq. ID no. 15221598
  misc_feature (138)..(138): Xaa is any aa, unknown or other
  misc_feature (148)..(148): Xaa is any aa, unknown or other
  misc_feature (149)..(149): Xaa is any aa, unknown or other
  misc_feature (150)..(150): Xaa is any aa, unknown or other
  misc_feature (151)..(151): Xaa is any aa, unknown or other
MELGLSLGDSSRPLLGFMEKPREATSNQLGLGFNTTLSIGPIITRQKDHQQDEDEEYQDEETKPNNNNNTHRTEDPNDLCSKPNNNTVLHQLDFLPQLALPWHPPSENGSLSSELGGSSRGLDVNVQPPAAEDEAARXVVSEQRRPFXXXX

SEQ ID NO: 51130 - protein, 134 aa, Glycine max
  peptide (1)..(134): Ceres Seq. ID no. 15221599
  misc_feature (121)..(121): Xaa is any aa, unknown or other
  misc_feature (131)..(131): Xaa is any aa, unknown or other
  misc_feature (132)..(132): Xaa is any aa, unknown or other
  misc_feature (133)..(133): Xaa is any aa, unknown or other
  misc_feature (134)..(134): Xaa is any aa, unknown or other
MEKPREATSNQLGLGFNTTLSIGPIITRQKDHQQDEDEEYQDEETKPNNNNNTHRTEDPNDLCSKPNNNTVLHQLDFLPQLALPWHPPSENGSLSSELGGSSRGLDVNVQPPAAEDEAARXVVSEQRRPFXXXX

SEQ ID NO: 51131 - DNA, 1090 bp, Glycine max
  misc_feature (1)..(1090): Ceres Seq. ID no. 13639109
gaaacttcatggaaacatctataacattcatcagtctacaaccacattgccataacagatgcgtaaggtgaacatcagcaggtctcggaggagaacactctaatgtcgaggaggagacaaacaagcccccagtccataaaacaaggtgcttcaacacagttcacggaatttcatatgacatcaatcaggttgacgcagaaggggcctcggccatctcttgctcgacaggagccgcctggactgggtagtagtggtagtgcagctctccaacatcatctccagacaacttcttccagccgtcagggccaacatagtagacactaacacagccaccactagctccgtcacggaatgttgcgtggtaaatagcccgccgagctaactcagcagcttcctcaactgacatgttgaatttgtaaccctcgtccaagataccataagcatatagagagccagaaccaacagagaatcggcttcccttgagccttgcaccctcgctatcaacatagtacaagcccggaccagtttcatcaaatccagcaatcatggtaccgattgaaagtcccatcccgcggtatgaataaaggatattagccaacgtctttgaagaaccagcaatggagatcctccgcttgttcgcgagctcatggagccggcacttgacccccaagtttctatgccaaaattggcaatcagcagcacctccagccatggttcccagcatgtagggattaatctcgatgattttcctcacagtttgcgaagatatgtagccgcccatgctggcccgggagtcggcggcgacgatgacgcccttgtcgaagatgaaggagagcgtggtggtccccttcttgttgttcaccatctccttggtcgccttctggaacccatcgaagtcgttgcaggtggggaactcgagggcgagctggtcggcggcgtcggcggagaagaggccggcgaagtcgtcgctgccggcggcggcggcgccgaagtggttctcgagggcggagaggttgggaatcatggcgtcgtcggcgggtgtgggggtgcggcgaggcggaggcggaggcgatgaagtgagctttttttc

SEQ ID NO: 51132 - protein, 142 aa, Glycine max
  peptide (1)..(142): Ceres Seq. ID no. 13639110
MEPALDPQVSMPKLAISSTSSHGSQHVGINLDDFPHSLRRYVAAHAGPGVGGDDDALVEDEGERGGPLLVVHHLLGRLLEPIEVVAGGELEGELVGGVGGEEAGEVVAAGGGGAEVVLEGGEVGNHGVVGGCGGAARRRRRR

SEQ ID NO: 51133 - protein, 132 aa, Glycine max
  peptide (1)..(132): Ceres Seq. ID no. 13639111
MPKLAISSTSSHGSQHVGINLDDFPHSLRRYVAAHAGPGVGGDDDALVEDEGERGGPLLVVHHLLGRLLEPIEVVAGGELEGELVGGVGGEEAGEVVAAGGGGAEVVLEGGEVGNHGVVGGCGGAARRRRRR

SEQ ID NO: 51134 - protein, 103 aa, Glycine max
  peptide (1)..(103): Ceres Seq. ID no. 13639112
MLARESAATMTPLSKMKESVVVPFLLFTISLVAFWNPSKSLQVGNSRASWSAASAEKRPAKSSLPAAAAPKWFSRAERLGIMASSAGVGVRRGGGGGDEVSFF

SEQ ID NO: 51135 - DNA, 1187 bp, Glycine max
  misc_feature (1)..(1187): Ceres Seq. ID no. 14306268
accgcattagaatcaggtgatggtggaggagggtcatccttgagcaacacaacatcatcagctgtgcttgtgatgtccattacctcaggctggcttttatgtttgccatcactctgtatatccttgagagtctccaccacttcttccatagaaggtctcatctctttagaactctgcaagcactgaaatgctaactcagccacagcatttatcattttcctgactttgaaatcggattcaaacccgagggtagggtcgacaagctcatgcagtgcctgattatgaatcttgttgatggccatgttggacaaattgatttcatgtctatgccttgtgatatctacagcaggcaaggatgatatcagctcaaccagaaccactccaaagctatatacgtcgctttgtttagtaagctggtagcactggtggtactcgggatccacataacctggagtcccttgtggagctgttgaaacatgggtgacatggtctgggaaaagacgcgagagtccaaaatctgccactttgacacaaaagtcactgtcaagaagaatattgttggttttcacatctcggtggatgacgtctttgtgatgaagaaaattcaatgcacttgcagtctccacagcaattttcattctaatatgccaagggagttttccaggtttggatcgttgaccatgaagatgatcagcaacggttccattaggaatgtactcgtatacaagcagaagttcgcggctgtggcgagaggtgcatccatataacttcacaagatttggatgaactaactttgctaggattttaatttcattcatgaactgtgcaactctcttgaagttgttctcatacaacctcttcactgcaacagaacgcccgtcccgcagtttgcctagacaagaaacatcagaagacaggaacctttgttaatggtcattgaaagcataaaaacgacagagataattacaaagggtgtgtttgcttttaccaaaatacacagttccaaatcccccttctcctagttctttagatgagtcaaagtaatttgtggcctcttcaagttcatcatacaagaagaggggcactcctggtacaaagctttgagtaaagctttgaactcccttctcagtgtcttttgaagatggatcagaagagaggctacgaggattgtatatatgagattgcat

SEQ ID NO: 51136 - protein, 96 aa, Glycine max
  peptide (1)..(96): Ceres Seq. ID no. 14306269
MGDMVWEKTRESKICHFDTKVTVKKNIVGFHISVDDVFVMKKIQCTCSLHSNFHSNMPREFSRFGSLTMKMISNGSIRNVLVYKQKFAAVARGASI

SEQ ID NO: 51137 - protein, 93 aa, Glycine max
  peptide (1)..(93): Ceres Seq. ID no. 14306270
MVWEKTRESKICHFDTKVTVKKNIVGFHISVDDVFVMKKIQCTCSLHSNFHSNMPREFSRFGSLTMKMISNGSIRNVLVYKQKFAAVARGASI

SEQ ID NO: 51138 - protein, 61 aa, Glycine max
  peptide (1)..(61): Ceres Seq. ID no. 14306271
TALESGDGGGGSSLSNTTSSAVLVMSITSGWLLCLPSLCISLRVSTTSSIEGLISLELCKH

SEQ ID NO: 51139 - DNA, 1117 bp, Glycine max
  misc_feature (1)..(1117): Ceres Seq. ID no. 14316432
tttttaatagctgtcatcctattgtctactccatggcatagcatactgggcctactgcatcatgctctgctatcatgaatttcaaactctggaattggttgtcgtaagatattattaggggtaccagaattgtgcattgggtgtagttaaaatgcaactgaaacattttttagaagaaattaataattggagtgtaaatttgtagattcacaaagatattccatattatagtctagttttattagattttggtcatttcaatttgttgttcataggatgatgtagtttgttgtgaatgactgcacgtgtattcaactatctcttttttgtcgtcaatggcctgaggtctcttgctactaggtttcctcattttccatgtttgtattgtttgtgcattgcaatgccacataaactctgtttatttagtaggttaagtctgtactaatacatattaatgtgacaattttctttttaggctgctaactacttgaacatcaagagcctgctggaccttacatgtcaaactgtagccgacatgatcaaggggaagactccagaggaaattcgcaagacctttaacattaagaatgacttcacccctgaggaggaagaggaagttcgtcgggaaaaccaatgggcatttgaatgattttgttaatctcaaaaaatctgaatcaaagatctgccatgtggatttatgctatgcttgtttgtttatcaaagatctctcttgtagatttgcctatgctatatacttgtttgttttatattcaagactatttccgttgactgtgttcactacaactagtcataagaattatcttccttcatgaacttaagagcactttgaattgtaagtaatagttatgatgagggatgcgttgattctgacacgagggttattgagttcaataacagccaacccttggctccatatttttcatcccgtgaactacgtgataatgtgtatatgcacctttgtaaaggggaggtgcagaaacaagattcggagaccatttgatcatgtttgccaaggtggtaggtagctccatgtttcatggtcgattcatattacttttcatcacgtctcactaatctacattaatgtgttactttc

SEQ ID NO: 51140 - protein, 81 aa, Glycine max
  peptide (1)..(81): Ceres Seq. ID no. 14316433
MTSPLRRKRKFVGKTNGHLNDFVNLKKSESKICHVDLCYACLFIKDLSCRFAYAIYLFVLYSRLFPLTVFTTTSHKNYLPS

SEQ ID NO: 51141 - protein, 59 aa, Glycine max
  peptide (1)..(59): Ceres Seq. ID no. 14316434
MMRDALILTRGLLSSITANPWLHIFHPVNYVIMCICTFVKGRCRNKIRRPFDHVCQGGR

SEQ ID NO: 51142 - protein, 58 aa, Glycine max
  peptide (1)..(58): Ceres Seq. ID no. 14316435
MRDALILTRGLLSSITANPWLHIFHPVNYVIMCICTFVKGRCRNKIRRPFDHVCQGGR

SEQ ID NO: 51143 - DNA, 1289 bp, Glycine max
  misc_feature (1)..(1289): Ceres Seq. ID no. 15177266
attcaaaatttcggatttattagtctttccgagcaaagatcacaacaacaaaaatggaaagaatcataggtatagattctcatcattcagatctatacatctgaaaagagtttatattttgcaaaccaaataacttattaaagtgtatccatggtcacccatgacactgctagcagctatagccagtgacagctaccaaaacagttatagcaagtccggctgttgcccatatatttctcctttgctggtgctttgatggtgcagcattctgtgaggagaaaaaagatgtgattaaaacaacgtaatattgattggcatacttgtatataattgtaatttgatatttcactaaacaaagatattaccagattcagacttggtgatggtgccggtgttgtatctgattctgctgtggaatcaggtggtgctgtggacttttgcgaataattgttggagctgaagctggtgcttgatgccttctgtgtctgtgccttctatgcctatggtgtgcaggcgctggagccggtacctctatcactggtgctggtgccggtgccggtacctctattacaggtgctggtgctggtgttggggttggcggtggaggaacaggtgatggtgttggtgctggctttgtgggtgcaggtgctggtgttgcctttgctggtgcaggtgctggtggtgttttggctggtgttggggctatctttggtggtggtaatggtggtggggaagcaacaggtggtgggggtggtgatgtgggaggtgagactggtgaaggttttggttgttgtggtggtggggcttttggacttgaaacaggtgcaaccttgggagctggtggcgtcacgagagcagatttgggagctacatttcaggtggctgcgatgtaattggtgtactggtggcaggaggagattccgccactgtgggtggctgtgttaccgccggtggtgtgccagaagacaatggagatgttgcagttggtgttgttggtggcaaagttgtaggtggcaactttactggcatggttgctggggcttgagcattggtagctaactggcagcaaaggcttactgtagccaaagcccagaaaattgcagccattgtatgatgaatgttttgatatggttgagaatggagagagtctccttcttatatatgggctatggtgaggctcaaggttcaatcgtgtggtgtggactatgtggggaacgaatgatgtagccttcatgtgattgtgacataatttaaatactaataatctaacaaggaacgttaacaatggg

SEQ ID NO: 51144 - protein, 147 aa, Glycine max
  peptide (1)..(147): Ceres Seq. ID no. 15177267
MVLVLALWVQVLVLPLLVQVLVVFWLVLGLSLVVVMVVGKQQVVGVVMWEVRLVKVLVVVVVGLLDLKQVQPWELVASREQIWELHFRWLRCNWCTGGRRRFRHCGWLCYRRWCARRQWRCCSWCCWWQSCRWQLYWHGCWGLSIGS

SEQ ID NO: 51145 - protein, 112 aa, Glycine max
  peptide (1)..(112): Ceres Seq. ID no. 15177268
MVVGKQQVVGVVMWEVRLVKVLVVVVVGLLDLKQVQPWELVASREQIWELHFRWLRCNWCTGGRRRFRHCGWLCYRRWCARRQWRCCSWCCWWQSCRWQLYWHGCWGLSIGS

SEQ ID NO: 51146 - protein, 100 aa, Glycine max
  peptide (1)..(100): Ceres Seq. ID no. 15177269
MWEVRLVKVLVVVVVGLLDLKQVQPWELVASREQIWELHFRWLRCNWCTGGRRRFRHCGWLCYRRWCARRQWRCCSWCCWWQSCRWQLYWHGCWGLSIGS

SEQ ID NO: 51147 - DNA, 1556 bp, Glycine max
  misc_feature (1)..(1556): Ceres Seq. ID no. 12582623
cgaggaaaaaatcaataaatcatgcataagcatggccaaataatggggacttccagaaattctagttcgacggggtaaaaacacaacaactctctcttacagtgaaagaatataagatgaatgctagatgataatctaaagatacagaacctaagtacaagcaacctatttcttttgtggggcattttacaaactaatgtagtatattttgtagttacaaaagccatgactctctaatcttatcgattctgactgtttctgaaaaacttgaaatcccaacgtcgcagtaagccgttcaagacatgaatgttggattcttaataacagttaatgtggcttttgtattgtgtgaaatgtcagtgtctgatgaactttgtaagctagcagaactatcattaccagtagaagcactttctgtatcgccagactcggtgaccgatgaagtgtccaatggtggtagtggtgatgatggtattttgcttgatgaaagacttgttacaggacttggaatcactgaaatggaatttgactcagttttcaagggctccaatgcatcagatgaagtggaaattgttttatcactgtggttgagtaaagaagattctgtctccacaggtttggaaatctcatgtgaattagaagcatgtgagtcattcttatccgatggctctatagacatggtactactagcactcctaacaggtggttgttctacctctggaattcgtatttcccggtctttcaatgaatctatcactgcttccgtgaacattttttgttctttctttgcactagatggacagcctgtaaagtcatcaagttgaaattccacaaagtggtcatcatctagatcggttggaacgaggggactatagagacgaccatttgataattcaaaactaatcattgtagaagatgatgaggaaagatcatcacatttctgtgcctcacagtcgagatgtgcatcttttgaagaaatatgtgatggaacctccatcctactcattggtttttttgaacggacgtgcttaatgtcttccacagtactgcttgttgatgtttctttgttttggaatgatggttcattgccaaagtcaaattcatgcacagatctccaaacatccttaccaaagtaatcattcataatgtcaaaaaatgattccccaagctcatcttcaggaggttgtaaaacattgtgaaaaaatatgtttacggaatcaaaataatactgaggacgcgaagagttgtgatctccctcaaatttaattatatttttgtcccccatgtaagcctcaagtatacgatctgagtgatgaggacgaataaaatcatcatcaatggcatgccctactagagcaggaacaaaacaagattttgctacataagcaggggaaaatacaggagagaaaatttctacacttttgaatgctcataaagtcgttattttatatgtttaggaggacaaaaaattgttcactattttggttgttttgtctctgtcctcctatacttcatgaatgatcacaagcacgcaatctaaaaagaagattctaaac

SEQ ID NO: 51148 - protein, 173 aa, Glycine max
  peptide (1)..(173): Ceres Seq. ID no. 12582624
MNVGFLITVNVAFVLCEMSVSDELCKLAELSLPVEALSVSPDSVTDEVSNGGSGDDGILLDERLVTGLGITEMEFDSVFKGSNASDEVEIVLSLWLSKEDSVSTGLEISCELEACESFLSDGSIDMVLLALLTGGCSTSGIRISRSFNESITASVNIFCSFFALDGQPVKSSS

SEQ ID NO: 51149 - protein, 156 aa, Glycine max
  peptide (1)..(156): Ceres Seq. ID no. 12582625
MSVSDELCKLAELSLPVEALSVSPDSVTDEVSNGGSGDDGILLDERLVTGLGITEMEFDSVFKGSNASDEVEIVLSLWLSKEDSVSTGLEISCELEACESFLSDGSIDMVLLALLTGGCSTSGIRISRSFNESITASVNIFCSFFALDGQPVKSSS

SEQ ID NO: 51150 - protein, 101 aa, Glycine max
  peptide (1)..(101): Ceres Seq. ID no. 12582626
MEFDSVFKGSNASDEVEIVLSLWLSKEDSVSTGLEISCELEACESFLSDGSIDMVLLALLTGGCSTSGIRISRSFNESITASVNIFCSFFALDGQPVKSSS

SEQ ID NO: 51151 - DNA, 1280 bp, Glycine max
  misc_feature (1)..(1280): Ceres Seq. ID no. 13581701
gaaagaaaaaaaatccagttcacacaaattcaattaagtacaaactctatcacaatggatagaacacactaagtataaaactctattactttaactgatattcttcttcataagctaacagcaatatgggcacaaaatcaatccattctcattacactgaaggcactgattgctctctccattttccgccataaccttgtggcttccattacacttgaagcacagcacaaaccttatccctccacatgcatcacaaggaccattagaataatccattggaaccccttcaaagattttcctcagctttccctgctcatgcaaactcagaacttcttctgctccaccaatgtacctgcccttcacaaaaagccttggaggcactaatttcccctccaaactgctccacaactcatccctgaactccttgtgcattgaaatgtccctctcaaaatacaaaaccttgaaactctggaggaggaagcggattttgttgcaatcctcgaatgtcttcaggattcccctaagtgtcgtggtgtagaaaataaccattccgtcgcccccgggtggacacttctcttcaaagaacatcaaagggtcagggtcatcatcttccactttctgtgaagactcttcttcgactctgcttctcctctgttcttctgttattctagaatgttccttcacggcttgctcgaacgcggccagtagattcggatcgaataggctgccggagttcaagtccggccgccggaacgatggaacatcagtgtctaacaaagggatttttctgttgctgtttctgttgttgttattgtcagcattttctggtgaagactttttttcctccaaaacccctctctgttttgaatctgtttttgctctgttcccgttctgcaaaacacccttgtggtgttgttggggtttctgtgaacatggacctatgttctctttgttgtcattgtaatcatcttcttcctcaaggtctttcatcagctctgcaacgtcgatcacctcgggttcgtcctgcattttctcgcagctctgaacaactttctcgggcttgttttctcgggaaacaaacggggaatgcagattgaaactcggaatctttgggagaaaatggacgtacccatctgaggccttgatctggagaattaaatcttgcttcaggattggtttgatggatttgagcttcttcaggaattttcctttcacccccttcattttttttcctgagattttccaacggaattatctgctaaacagagaagattgaaaat

SEQ ID NO: 51152 - protein, 113 aa, Glycine max
  peptide (1)..(113): Ceres Seq. ID no. 13581702
MEHQCLTKGFFCCCFCCCYCQHFLVKTFFPPKPLSVLNLFLLCSRSAKHPCGVVGVSVNMDLCSLCCHCNHLLPQGLSSALQRRSPRVRPAFSRSSEQLSRACFLGKQTGNAD

SEQ ID NO: 51153 - protein, 63 aa, Glycine max
  peptide (1)..(63): Ceres Seq. ID no. 13581703
MYLPFTKSLGGTNFPSKLLHNSSLNSLCIEMSLSKYKTLKLWRRKRILLQSSNVFRIPLSVVV

SEQ ID NO: 51154 - DNA, 709 bp, Glycine max
  misc_feature (1)..(709): Ceres Seq. ID no. 15226876
agtrccggsccccccctctagtcagctacgtaggccccccccccaaaataagagaaggggtgagggggcggcaccacctttccttccctcccgattgccctaggtaaaaaatgtatatagttcttttcttttgcatcaattcagcggcgacgaaaccgcaatagatctccgtttctcgccaaacaaacacaaaatagctgccttcagcggcgacgaaaccgcacctttctttggcttcctcggagccaccgctaccctcgttttttcctgtaactaactcatcaaggaggatccatctctgaaacatattttggaggagatagagactggtggtcctgctgctatgatgaggtactggaatgatgaggaggttttgcggaagttgggacaaaccatgggagtttccttaataaacgtgtaaagggattaggaacccagaacataaactgttcattgtcaactttgaaggaacccagaacataaactgtcctaaagctacttgagaaagatgcttttctgtaattgtaatgcatgatgccatgctgtcaccaacaatcaaaggggaaactgaggggaagaagagctgatagacaacttgagttcacccaactagacatggaaatgacctttactccttacgaggatatgttaacacttaatgaagaattgattagaaagaagtagtaaagttgcaggaaaaatggtgtgg

SEQ ID NO: 51155 - protein, 50 aa, Glycine max
  peptide (1)..(50): Ceres Seq. ID no. 15226877
MMPCCHQQSKGKLRGRRADRQLEFTQLDMEMTFTPYEDMLTLNEELIRKK

SEQ ID NO: 51156 - protein, 49 aa, Glycine max
  peptide (1)..(49): Ceres Seq. ID no. 15226878
MPCCHQQSKGKLRGRRADRQLEFTQLDMEMTFTPYEDMLTLNEELIRKK

SEQ ID NO: 51157 - protein, 34 aa, Glycine max
  peptide (1)..(34): Ceres Seq. ID no. 15226879
  misc_feature (1)..(1): Xaa is any aa, unknown or other
  misc_feature (3)..(3): Xaa is any aa, unknown or other
XRXPPLVSYVGPPPKIREGVRGRHHLSFPPDCPR

SEQ ID NO: 51158 - DNA, 1467 bp, Glycine max
  misc_feature (1)..(1467): Ceres Seq. ID no. 13645078
aaataactttgaaattcattaaacacggataatatagataaactcataaacaaaatttgaaataaacgatcagtcttccctgaaacaaaagtttggccaacttaaggagaaaaaaaactcactacccgagaatccataatatcaaaacagaaacactacaaagtttataagtgatggcaaccaaatagaattccagcatttccatccaattaacataattatgctttgaggcgtccaaagaacttctgcttctcctgtgtggtctggaagcgaccatgcccaaactttgaagaggtatcgataaacttgagtttgatctcctcaagagcaacacgagaagtctgcttaaggagggattgacgcaatgtaatgaccctcttcttgggaccaacacagcatcccttgaccatgataaaatcatccttaacaacaccatagtgagggaaaccacccattggggtaatgtctttctcggtcctatcaaactcagtaagagcagagtgagattcatctccagctttgccaagcttgtaaaccttcttgttcaactcagttcggtggtggtatccattctgaccagccctggcaacagtgaatgaaactcttgcaggatgccaggcaccaatacaagcaaccttcctcaaacctctgtgagtcttacggggaaggcgggtaacaccccaacgagtgacaacaccctcataacctttacccttggtcacaccaatgatgtcaatcatctcatccttctggaacactgcatcaataggaacctgtttctcaaagaaactgtatgcaaagtccaccttttgtgcaatactaccaccattaacctgaatttccatgatatgggctttcttctgcttcaaccctttcattttcctgatctgagtgtgagccaaaacacgaaccacagtagcatacttcttcagtttctccagctgcgccccaatgtttttctttccctcctcagtttcatactgcttagagtacttggtgaaggccttcttcttggacttgcaccagttcttgtagaacctacgtttcaattcctcactcaaatgctgagcccagacagtgttcaatgttcggagaccacgtggagttttcacataacccacaacaccaacaataaccattggaggggtctcaataattgtaacaggctcacaagtttccttcttgtgaagctttgatcctggcttctcgacctctctaacaatgtgagtcataccggccttgtaacccaagaatgcagtgagcttgggtgccttggatgggtcatccttggggaatgccttcacttttcccctgtgacgagcagcacgcttcctgggaagaaatcccagtgaaccgtgccttgggtgctcgaacttcctgtgagacatccttctcctcctgaggctgctcctcgtgctgcggctagttacagtcccgaatggaggcactgggggggggggggggccc

SEQ ID NO: 51159 - protein, 194 aa, Glycine max
  peptide (1)..(194): Ceres Seq. ID no. 13645079
MPGTNTSNLPQTSVSLTGKAGNTPTSDNTLITFTLGHTNDVNHLILLEHCINRNLFLKETVCKVHLLCNTTTINLNFHDMGFLLLQPFHFPDLSVSQNTNHSSILLQFLQLRPNVFLSLLSFILLRVLGEGLLLGLAPVLVEPTFQFLTQMLSPDSVQCSETTWSFHITHNTNNNHWRGLNNCNRLTSFLLVKL

SEQ ID NO: 51160 - protein, 115 aa, Glycine max
  peptide (1)..(115): Ceres Seq. ID no. 13645080
MGFLLLQPFHFPDLSVSQNTNHSSILLQFLQLRPNVFLSLLSFILLRVLGEGLLLGLAPVLVEPTFQFLTQMLSPDSVQCSETTWSFHITHNTNNNHWRGLNNCNRLTSFLLVKL

SEQ ID NO: 51161 - DNA, 1239 bp, Glycine max
  misc_feature (1)..(1239): Ceres Seq. ID no. 13581600
gtcagctacgtaggcccccccccccaatgcttccagtgcttttgtatgatattcccaatttttgtgtagatttctttggatggtgagaattggtggaggagaatatcgtgtagataaaggagcagctccaaagatgttgaactgtcttatgtctgttggttattgctgctatatccctttgcgtattcatgttgggtaaacttgaggactgccttcaacttttggtagaaagagggttgactttttggcaatcggattccagaggctgctttaatggcttgatcctatctcccaagcaaggtctcagtgacaatttggagaaaagatctcactaaggctacatggtgtttgctatgagaatcccttggcaccgttgatacgtgagttaggacttacactatagcatgccggtggtgataactctgtcatatatgatcatgacttggaaagtctgaagaagcagagaggtattggtttgttgcactgcccacattcaattatgtatgttctaagttctctctaagatctaaatatttacctacaattgaagatgatatctacatattaaagacttttacctacagttaggagatgtaagtagaagttaatgacttttacctacacactatacatagtaggtaaaacttatagtgacagacaattaaccgttattatatgtccctcaaagttgacggaagaaatatccgtaagacaaagtctatcatacatttacctacggattttttatttagagtgacagtttttgtctatagatataggtcatttttcttgtagtgcggttctcttgattcatacaatgaaagcttctggacacaactaaatctggatgacatttcctacaatgtaccatgtgaaattgtttcaaaagatttcaatggctcttttcaaagtacaaatgctacccagatccttgattcttgtgcaatgtctcctacaactagcgaaagtaatattgttctggataatgactttgtcgactttctggatgcatacgaagatgcaatggttgataacctttggacagagtcatatgtagctaacatgttccacattccaagcgaactacttattctcttcgtggcagaatctgaatattttactccaatatataatgatctgtggggttgtcatttgtattagctcattctaatgaacaaaatcactccttgttcatagaacaatagttttgagagcaaaaaaaaaaaaaaaaaagaaatc

SEQ ID NO: 51162 - protein, 71 aa, Glycine max
  peptide (1)..(71): Ceres Seq. ID no. 13581601
MSPTTSESNIVLDNDFVDFLDAYEDAMVDNLWTESYVANMFHIPSELLILFVAESEYFTPIYNDLWGCHLY

SEQ ID NO: 51163 - protein, 69 aa, Glycine max
  peptide (1)..(69): Ceres Seq. ID no. 13581602
MTFPTMYHVKLFQKISMALFKVQMLPRSLILVQCLLQLAKVILFWIMTLSTFWMHTKMQWLITFGQSHM

SEQ ID NO: 51164 - protein, 64 aa, Glycine max
  peptide (1)..(64): Ceres Seq. ID no. 13581603
MYHVKLFQKISMALFKVQMLPRSLILVQCLLQLAKVILFWIMTLSTFWMHTKMQWLITFGQSHM

SEQ ID NO: 51165 - DNA, 1281 bp, Glycine max
  misc_feature (1)..(1281): Ceres Seq. ID no. 13581327
cccccctccagttcccactttcttgagtttaaacatacatgaagcttttgacttcaatttttttcttggttcaacagattcatgttttagcagtacaaacagtagtctctttgattgcataccaagtctgtacttttacttaatcatacaaaggtattaaatgttcatgcaaatgctacaaagcacctttaaggggatagataccacaaccatttttattcaccaacaaagggtctctcactctcaacacgctccctttacttccccaagaagatgatgatccactttccaagcttacgcttcacggaaaatctgccaaaaccacacagctggcacaccaaaacctactacctattttgcacattcattccttgtgcgattcttgcttatgctgctgaaccagcttgttcacataggtccaacagatccagagtctctggaactgacagctcaagacgaaactttggcccatcataatgatgcaatactggcctgaaagaatcttcttccaatgccttgcagagcttcctgacacggattcttacctgagctggaaaccttgattcgcctttgcactttttatcctcccaggcagttggatctatgttagagccaccaaaacttgctgcatcaaaaataccatgcagctgatgagtagtatagttataaagaaataatggtaacccaggtgttatagccctaacagaatctcgataccttggaggcaaaccaaatagctgacgtttcaagtcttcctgcattgtgtcattgttacagacaaagatgtatcctccaagcacctcattgcgcgggagtgtctccgcagcaggcaaggtcttaaaccttttgtcggttgcatttgtgttgttgctttcattgttggtgttgttgttgatctctttgttatgaagaatattaccattgtacttgttactgatcacattactcaccaagtttgcattgtttttctgatacactgcattcataccataaacaccatttcgaagcgagcttttgctcacattctcagtaaatttagagtccaggttcaacatgcttaagttaagagaatcaaatttgttctcttcctggaacccaaatttatcccttgaccttgtttcaatggggccctttgaaagatcaaggttgttcacacgctcccccttcaatcttgtctgttccgccaatttcgaagcaaccattaaccatttgtgatcctccgatgcttttgagtgtccacggagttcatcgcccaattgggggggggggcctacgtagctg

SEQ ID NO: 51166 - protein, 67 aa, Glycine max
  peptide (1)..(67): Ceres Seq. ID no. 13581328
MMIHFPSLRFTENLPKPHSWHTKTYYLFCTFIPCAILAYAAEPACSHRSNRSRVSGTDSSRRNFGPS

SEQ ID NO: 51167 - protein, 66 aa, Glycine max
  peptide (1)..(66): Ceres Seq. ID no. 13581329
MIHFPSLRFTENLPKPHSWHTKTYYLFCTFIPCAILAYAAEPACSHRSNRSRVSGTDSSRRNFGPS

SEQ ID NO: 51168 - protein, 53 aa, Glycine max
  peptide (1)..(53): Ceres Seq. ID no. 13581330
MLKLRESNLFSSWNPNLSLDLVSMGPFERSRLFTRSPFNLVCSANFEATINHL

SEQ ID NO: 51169 - protein, 51 aa, Glycine max
  peptide (1)..(51): Ceres Seq. ID no. 13581331
MKNITIVLVTDHITHQVCIVFLIHCIHTINTISKRAFAHILSKFRVQVQHA

SEQ ID NO: 51170 - DNA, 1812 bp, Glycine max
  misc_feature (1)..(1812): Ceres Seq. ID no. 15225553
gattgtttacgttggtcttgacccctctggctttgtgtgactctgacaggactatgatcctaacttacacaattaggagtgtatattttgattttatgttcaaggagatatatttaaatattccaggttcgtccttgactctacaacattccattttcataggaaaagccaaaactgaagctcgaggaagataactacgatgaaacaagaggaatggatgattacgacagcgttgctatcgttgctgtttgtttcatcttttccgccgttgagttacggagttgttcctcctcgtactctgctcaataagctgtcggagggcaaatatctcaacactcaggagctctggttcgaccaaaccctcgatcacttctctccctatgatcaccgacaattccggcaacgttactatgagtttctagactatttccggattcccgatggaccaatttttttggtaataggtggtgaaggtatattgaatggggtagcaaatgactatcttgctgtactggcaaagaagtttggagcagctatggttactcttgaacatcgctactacggaaagagtactccatttaattctttggagacagaaaatttgaaatatctttcgtccaagcaggcactctctgatttggctgtttttcggcagtattatcaggactccataaatgcaaagcttaatagaacaaaaattgaaaacccctggttcatttttggtggttcatattctggagcactcagtgcatggttccgtcttaagtttccccatttaacatgtggaagtctggctagttctgcagttgttcttgctgtttataactacacagaatttgatcagcagattggtgagtcggcaggtcctgaatgtaaagaagcgctgcaagaaactactcaactcattgaacacaaacttgcaaccagtggaaaggaattgaaggcctcttttgatgctgctgatcttgaaatagatggagactttttttatttcttggctgatgctactgctatagcgtttcaatatggaaatccagataaagtatgcaagcctcttgttgaagcaaagaaggctggagaggacttggtggatgcttatgccaaatatgtcaaagagtactacattggaacttttggtactgatgtgcagacatatgatcagaagtacttgaaaagaactgctatgaacgaggacaattctgctcgattatggtggtttcaagtttgcactgaagttgcatactttcaggtggctccctcaaatgacagtattcgctcctcaaaagtggacataaaataccatttggacctttgcaaaaatgtctttggagagggcatctttcctgatgttgatgcaactaatttatactacggaggcactaaaattgctggttcaaaaataatatttacaaatggctcacaagatccttggcgccatgcatccaagcaaacttcatctcctgatatgccttcctacatcgtcaaatgttacaattgtggccactgttctgattatcgaggatgtcctcaattccctttctccattgaaggtaatgagaaaaactgcacctctcctgatgcagttcacaaagtaaggcaaaagatttcagaacatatggacttgtggttatctgaatgcgtcgacacaggcagaagttttatatgattatttacataagatgtgaatgatgtacttttttttctaagttgttaatgatgtactataactccgcatgacttttggtatttctttccttcataagctaattatgacaccgtgaaatatatttagtgacttcgtataaattgacc

SEQ ID NO: 51171 - protein, 488 aa, Glycine max
  peptide (1)..(488): Ceres Seq. ID no. 15225554
  misc_feature (53)..(469): Pfam Name: Serine carboxypeptidase S28 Pfam Description: Serine carboxypeptidase S28
  misc_feature (62)..(297): Homolog of NCBI NO: 7486037 NR Description: hypothetical protein F23E13.80 - Arabidopsis
  misc_feature (153)..(474): Homolog of NCBI NO: 7486037 NR Description: hypothetical protein F23E13.80 - Arabidopsis
  misc_feature (74)..(102): Homolog of NCBI NO: 15227960 NR Description: hypothetical protein [Arabidopsis thaliana]
  misc_feature (149)..(488): Homolog of NCBI NO: 15227960 NR Description: hypothetical protein [Arabidopsis thaliana]
  misc_feature (41)..(486): Homolog of NCBI NO: 37535980 NR Description: putative serine peptidase
  misc_feature (11)..(157): Homolog of NCBI NO: 18419798 NR Description: expressed protein [Arabidopsis thaliana]
  misc_feature (112)..(480): Homolog of NCBI NO: 18419798 NR Description: expressed protein [Arabidopsis thaliana]
  misc_feature (8)..(60): Homolog of NCBI NO: 37535976 NR Description: putative serine peptidase
  misc_feature (62)..(484): Homolog of NCBI NO: 37535976 NR Description: putative serine peptidase
  misc_feature (11)..(480): Homolog of NCBI NO: 18419800 NR Description: expressed protein [Arabidopsis thaliana]
MKQEEWMITTALLSLLFVSSFPPLSYGVVPPRTLLNKLSEGKYLNTQELWFDQTLDHFSPYDHRQFRQRYYEFLDYFRIPDGPIFLVIGGEGILNGVANDYLAVLAKKFGAAMVTLEHRYYGKSTPFNSLETENLKYLSSKQALSDLAVFRQYYQDSINAKLNRTKIENPWFIFGGSYSGALSAWFRLKFPHLTCGSLASSAVVLAVYNYTEFDQQIGESAGPECKEALQETTQLIEHKLATSGKELKASFDAADLEIDGDFFYFLADATAIAFQYGNPDKVCKPLVEAKKAGEDLVDAYAKYVKEYYIGTFGTDVQTYDQKYLKRTAMNEDNSARLWWFQVCTEVAYFQVAPSNDSIRSSKVDIKYHLDLCKNVFGEGIFPDVDATNLYYGGTKIAGSKIIFTNGSQDPWRHASKQTSSPDMPSYIVKCYNCGHCSDYRGCPQFPFSIEGNEKNCTSPDAVHKVRQKISEHMDLWLSECVDTGRSFI

SEQ ID NO: 51172 - protein, 482 aa, Glycine max
  peptide (1)..(482): Ceres Seq. ID no. 15225555
  misc_feature (47)..(463): Pfam Name: Serine carboxypeptidase S28 Pfam Description: Serine carboxypeptidase S28
  misc_feature (56)..(291): Homolog of NCBI NO: 7486037 NR Description: hypothetical protein F23E13.80 - Arabidopsis
  misc_feature (147)..(468): Homolog of NCBI NO: 7486037 NR Description: hypothetical protein F23E13.80 - Arabidopsis
  misc_feature (68)..(96): Homolog of NCBI NO: 15227960 NR Description: hypothetical protein [Arabidopsis thaliana]
  misc_feature (143)..(482): Homolog of NCBI NO: 15227960 NR Description: hypothetical protein [Arabidopsis thaliana]
  misc_feature (35)..(480): Homolog of NCBI NO: 37535980 NR Description: putative serine peptidase
  misc_feature (5)..(151): Homolog of NCBI NO: 18419798 NR Description: expressed protein [Arabidopsis thaliana]
  misc_feature (106)..(474): Homolog of NCBI NO: 18419798 NR Description: expressed protein [Arabidopsis thaliana]
  misc_feature (2)..(54): Homolog of NCBI NO: 37535976 NR Description: putative serine peptidase
  misc_feature (56)..(478): Homolog of NCBI NO: 37535976 NR Description: putative serine peptidase
  misc_feature (5)..(474): Homolog of NCBI NO: 18419800 NR Description: expressed protein [Arabidopsis thaliana]
MITTALLSLLFVSSFPPLSYGVVPPRTLLNKLSEGKYLNTQELWFDQTLDHFSPYDHRQFRQRYYEFLDYFRIPDGPIFLVIGGEGILNGVANDYLAVLAKKFGAAMVTLEHRYYGKSTPFNSLETENLKYLSSKQALSDLAVFRQYYQDSINAKLNRTKIENPWFIFGGSYSGALSAWFRLKFPHLTCGSLASSAVVLAVYNYTEFDQQIGESAGPECKEALQETTQLIEHKLATSGKELKASFDAADLEIDGDFFYFLADATAIAFQYGNPDKVCKPLVEAKKAGEDLVDAYAKYVKEYYIGTFGTDVQTYDQKYLKRTAMNEDNSARLWWFQVCTEVAYFQVAPSNDSIRSSKVDIKYHLDLCKNVFGEGIFPDVDATNLYYGGTKIAGSKIIFTNGSQDPWRHASKQTSSPDMPSYIVKCYNCGHCSDYRGCPQFPFSIEGNEKNCTSPDAVHKVRQKISEHMDLWLSECVDTGRSFI

SEQ ID NO: 51173 - protein, 376 aa, Glycine max
  peptide (1)..(376): Ceres Seq. ID no. 15225556
  misc_feature (1)..(357): Pfam Name: Serine carboxypeptidase S28 Pfam Description: Serine carboxypeptidase S28
  misc_feature (1)..(161): Homolog of NCBI NO: 7486037 NR Description: hypothetical protein F23E13.80 - Arabidopsis
  misc_feature (311)..(368): Homolog of NCBI NO: 7486037 NR Description: hypothetical protein F23E13.80 - Arabidopsis
  misc_feature (1)..(185): Homolog of NCBI NO: 7486037 NR Description: hypothetical protein F23E13.80 - Arabidopsis
  misc_feature (41)..(362): Homolog of NCBI NO: 7486037 NR Description: hypothetical protein F23E13.80 - Arabidopsis
  misc_feature (37)..(376): Homolog of NCBI NO: 15227960 NR Description: hypothetical protein [Arabidopsis thaliana]
  misc_feature (1)..(374): Homolog of NCBI NO: 37535980 NR Description: putative serine peptidase
  misc_feature (1)..(45): Homolog of NCBI NO: 18419798 NR Description: expressed protein [Arabidopsis thaliana]
  misc_feature (1)..(368): Homolog of NCBI NO: 18419798 NR Description: expressed protein [Arabidopsis thaliana]
  misc_feature (1)..(372): Homolog of NCBI NO: 37535976 NR Description: putative serine peptidase
  misc_feature (1)..(368): Homolog of NCBI NO: 18419800 NR Description: expressed protein [Arabidopsis thaliana]
MVTLEHRYYGKSTPFNSLETENLKYLSSKQALSDLAVFRQYYQDSINAKLNRTKIENPWFIFGGSYSGALSAWFRLKFPHLTCGSLASSAVVLAVYNYTEFDQQIGESAGPECKEALQETTQLIEHKLATSGKELKASFDAADLEIDGDFFYFLADATAIAFQYGNPDKVCKPLVEAKKAGEDLVDAYAKYVKEYYIGTFGTDVQTYDQKYLKRTAMNEDNSARLWWFQVCTEVAYFQVAPSNDSIRSSKVDIKYHLDLCKNVFGEGIFPDVDATNLYYGGTKIAGSKIIFTNGSQDPWRHASKQTSSPDMPSYIVKCYNCGHCSDYRGCPQFPFSIEGNEKNCTSPDAVHKVRQKISEHMDLWLSECVDTGRSFI

SEQ ID NO: 51174 - DNA, 1151 bp, Glycine max
  misc_feature (1)..(1151): Ceres Seq. ID no. 15171402
ataaaaacattagaccgagacaaaaccagctattttttttttagaaatggcgaatagagaagaaaacaacgagggtcacaaattcacagtgaaatatgttggactcaacggaatggaatgcgaaggcaaattgccgaggagggtggtgggagtgagaaatcactgttaccttttgaaatccaaaatcggagagggttcattctccgccgtgtggagagcggagcagagaccaccaaccggcgttgacgtggcggtgaagcaggtcttcctctccaaactcaaccctcgcctcaaggcatgtttggattgcgagatcaatttcttgtcctccgttaaccaccccaatattattcgccttcttcacttcttccaggatgatggatgtgtgtacctggtcctggagttttgtgctggagggaatcttgcttcttatattcagaatcatgggagagttcagcaacaaatagccagaaaattcatgcagcagcttgggtctggtctaaaagtattacactcgcatgacattattcacagagacttgaaaccagagaacattttgctatcaagccacggggttgaagcagtgctaaagatagctgattttggtctctcaaggactgtatgtcctggtgaatatgctgagacagtttgcggttctccattatatatggctccagaagttcttcagttccagagatatgatgacaaggcagacatgtggagtgttggggccattctttttgagcttctaaatggctacccaccttttaatggcagaaataatgttcaggtgttgagaaacatcagatcctgcacctgtcttccattttctcaactgattctttcaggattggatcctgactgtcttgatatttgttcaaggctactacgcttaaatccagtggagcgcctctcctttgatgaattttattggcatagctttctacaaagaaaactgatgggaacatgataactataccaggatttgaagtgttcacgatctttccatggtagttatcttcaaaactatcaaattcatctgtaaaagttaatgccatttccgtttctttcccatctttgatttctctcctttctgaacattggataagtgcgttacttatggggatataatctatgagttctttcttgac

SEQ ID NO: 51175 - protein, 307 aa, Glycine max
  peptide (1)..(307): Ceres Seq. ID no. 15171403
  misc_feature (75)..(303): Homolog of NCBI NO: 26452168 NR Description: unknown protein [Arabidopsis thaliana]
  misc_feature (32)..(285): Homolog of NCBI NO: 25287591 NR Description: probable protein kinase [imported] - Arabidopsis
  misc_feature (41)..(303): Homolog of NCBI NO: 30693945 NR Description: protein kinase family [Arabidopsis thaliana]
  misc_feature (41)..(301): Homolog of NCBI NO: 18412205 NR Description: protein kinase family [Arabidopsis thaliana]
  misc_feature (41)..(301): Homolog of NCBI NO: 11358841 NR Description: serine/threonine-protein kinase-like protein -
  misc_feature (32)..(300): Homolog of NCBI NO: 20268768 NR Description: unknown protein [Arabidopsis thaliana]
  misc_feature (32)..(300): Homolog of NCBI NO: 30687274 NR Description: protein kinase family [Arabidopsis thaliana]
  misc_feature (41)..(301): Homolog of NCBI NO: 38345825 NR Description: OSJNBa0070M12.8 [Oryza sativa (japonica
  misc_feature (41)..(294): Homolog of NCBI NO: 30694500 NR Description: protein kinase family [Arabidopsis thaliana]
  misc_feature (41)..(294): Homolog of NCBI NO: 7770326 NR Description: F27J15.5 [Arabidopsis thaliana]
MANREENNEGHKFTVKYVGLNGMECEGKLPRRVVGVRNHCYLLKSKIGEGSFSAVWRAEQRPPTGVDVAVKQVFLSKLNPRLKACLDCEINFLSSVNHPNIIRLLHFFQDDGCVYLVLEFCAGGNLASYIQNHGRVQQQIARKFMQQLGSGLKVLHSHDIIHRDLKPENILLSSHGVEAVLKIADFGLSRTVCPGEYAETVCGSPLYMAPEVLQFQRYDDKADMWSVGAILFELLNGYPPFNGRNNVQVLRNIRSCTCLPFSQLILSGLDPDCLDICSRLLRLNPVERLSFDEFYWHSFLQRKLMGT

SEQ ID NO: 51176 - protein, 285 aa, Glycine max
  peptide (1)..(285): Ceres Seq. ID no. 15171404
  misc_feature (53)..(281): Homolog of NCBI NO: 26452168 NR Description: unknown protein [Arabidopsis thaliana]
  misc_feature (10)..(263): Homolog of NCBI NO: 25287591 NR Description: probable protein kinase [imported] - Arabidopsis
  misc_feature (19)..(281): Homolog of NCBI NO: 30693945 NR Description: protein kinase family [Arabidopsis thaliana]
  misc_feature (19)..(279): Homolog of NCBI NO: 18412205 NR Description: protein kinase family [Arabidopsis thaliana]
  misc_feature (19)..(279): Homolog of NCBI NO: 11358841 NR Description: serine/threonine-protein kinase-like protein -
  misc_feature (10)..(278): Homolog of NCBI NO: 20268768 NR Description: unknown protein [Arabidopsis thaliana]
  misc_feature (10)..(278): Homolog of NCBI NO: 30687274 NR Description: protein kinase family [Arabidopsis thaliana]
  misc_feature (19)..(279): Homolog of NCBI NO: 38345825 NR Description: OSJNBa0070M12.8 [Oryza sativa (japonica
  misc_feature (19)..(272): Homolog of NCBI NO: 30694500 NR Description: protein kinase family [Arabidopsis thaliana]
  misc_feature (19)..(272): Homolog of NCBI NO: 7770326 NR Description: F27J15.5 [Arabidopsis thaliana]
MECEGKLPRRVVGVRNHCYLLKSKIGEGSFSAVWRAEQRPPTGVDVAVKQVFLSKLNPRLKACLDCEINFLSSVNHPNIIRLLHFFQDDGCVYLVLEFCAGGNLASYIQNHGRVQQQIARKFMQQLGSGLKVLHSHDIIHRDLKPENILLSSHGVEAVLKIADFGLSRTVCPGEYAETVCGSPLYMAPEVLQFQRYDDKADMWSVGAILFELLNGYPPFNGRNNVQVLRNIRSCTCLPFSQLILSGLDPDCLDICSRLLRLNPVERLSFDEFYWHSFLQRKLMGT

SEQ ID NO: 51177 - protein, 163 aa, Glycine max
  peptide (1)..(163): Ceres Seq. ID no. 15171405
  misc_feature (1)..(159): Homolog of NCBI NO: 26452168 NR Description: unknown protein [Arabidopsis thaliana]
  misc_feature (1)..(141): Homolog of NCBI NO: 25287591 NR Description: probable protein kinase [imported] - Arabidopsis
  misc_feature (1)..(159): Homolog of NCBI NO: 30693945 NR Description: protein kinase family [Arabidopsis thaliana]
  misc_feature (1)..(157): Homolog of NCBI NO: 18412205 NR Description: protein kinase family [Arabidopsis thaliana]
  misc_feature (1)..(157): Homolog of NCBI NO: 11358841 NR Description: serine/threonine-protein kinase-like protein -
  misc_feature (1)..(156): Homolog of NCBI NO: 20268768 NR Description: unknown protein [Arabidopsis thaliana]
  misc_feature (1)..(156): Homolog of NCBI NO: 30687274 NR Description: protein kinase family [Arabidopsis thaliana]
  misc_feature (1)..(157): Homolog of NCBI NO: 38345825 NR Description: OSJNBa0070M12.8 [Oryza sativa (japonica
  misc_feature (1)..(150): Homolog of NCBI NO: 30694500 NR Description: protein kinase family [Arabidopsis thaliana]
  misc_feature (1)..(150): Homolog of NCBI NO: 7770326 NR Description: F27J15.5 [Arabidopsis thaliana]
MQQLGSGLKVLHSHDIIHRDLKPENILLSSHGVEAVLKIADFGLSRTVCPGEYAETVCGSPLYMAPEVLQFQRYDDKADMWSVGAILFELLNGYPPFNGRNNVQVLRNIRSCTCLPFSQLILSGLDPDCLDICSRLLRLNPVERLSFDEFYWHSFLQRKLMGT

SEQ ID NO: 51178 - DNA, 1184 bp, Glycine max
  misc_feature (1)..(1184): Ceres Seq. ID no. 14311866
aatttcatcttaataatgaacactctctctgaagcctacaaagcacaccctctccacctcagtcacattattcccttagacttttcttcagcccttagcttacctgattctcacgcatggcctcactgtcaacccaatgatgatgcatcatcatcatcatcatcatcatccatacccatcatagacctcatggatcccaatgctatggacctcataggccatgcatgtgagaagtggggtgctttccaattgaagaaccatggcataccttttggtgtcattgaagatgttgaagaagaggctaaaagactttttgctcttcccactgaacagaagttgaaggctcttcgatctcccggtggtgccactgggtatggcagagcaaggatttcaccgttcttcccaaagtttatgtggcacgaaggattcaccatcattggctctccctctcacgatgccaaaaagatatggcctaatgattatgcacgcttttgtgatttgatggagaattatgagaagcaaatgaaggttctagcggatagactaacagagatgatattcaacttaatggacataagtgaggaaaaaagaaagtgggttggtgcaagcaacataagtgaagctgttcagttaaatttctacccaagttgtcccgagccaaaccgagccatgggcttagcccctcacaccgacacttctctcttcacaattcttcaccaaagtcaaatcactggtcttcaaatcttcaaggaaggaaaagggtgggttcctgtgcaccctcaccctaataccctggtcgtgcacacaggcgatctcttgcacatcatttccaacgcaaggtttcgctgtgcacttcaccgcgtaacggtgaataggacatgggaacgttactctgtggcttatttctattctccaccgatggattatgtagtttctcctttggttcactctgttgctcgttttcgtgatgtgactgtgaaggagtatattgggattaaggctaagaattttggagaagcattgtcctttattagtacttgaaactatgtatgtatcttatgattttgttatatgtattaattccttaaatatttatctagctagatactttattaatttgcttctttgtaaatttcccatttctgttagttgttaggaagtgctagatatatatcagacttaag

SEQ ID NO: 51179 - protein, 346 aa, Glycine max
  peptide (1)..(346): Ceres Seq. ID no. 14311867
  misc_feature (206)..(305): Pfam Name: 2OG-Fe(II) oxygenase superfamily Pfam Description: 2OG-Fe(II) oxygenase superfamily
  misc_feature (16)..(344): Homolog of NCBI NO: 40714037 NR Description: gibberellin 3-oxidase-like protein [Ipomoea nil]
  misc_feature (22)..(342): Homolog of NCBI NO: 20149243 NR Description: gibberellin 3-oxidase 1 [Nicotiana sylvestris]
  misc_feature (9)..(344): Homolog of NCBI NO: 6691485 NR Description: gibberellin 3beta-hydroxylase [Nicotiana tabacum]
  misc_feature (6)..(344): Homolog of NCBI NO: 2291080 NR Description: defective gibberellin 3B-hydroxylase [Pisum
  misc_feature (6)..(344): Homolog of NCBI NO: 7433212 NR Description: gibberellin 3 beta-hydroxylase (EC 1.4.99.-)
  misc_feature (6)..(344): Homolog of NCBI NO: 7433213 NR Description: gibberellin 3 beta-hydroxylase (EC 1.4.99.-)
  misc_feature (6)..(344): Homolog of NCBI NO: 2314805 NR Description: 2-oxoglutarate-dependent dioxygenase [Pisum
  misc_feature (21)..(344): Homolog of NCBI NO: 8894936 NR Description: putative gibberellin 3 beta hydroxylase
  misc_feature (6)..(344): Homolog of NCBI NO: 9971221 NR Description: gibberellin 3b-hydroxylase No3 [Lactuca sativa]
  misc_feature (6)..(344): Homolog of NCBI NO: 4164145 NR Description: gibberelin 3beta-hydroxylase [Lactuca sativa]
NFILIMNTLSEAYKAHPLHLSHIIPLDFSSALSLPDSHAWPHCQPNDDASSSSSSSSIPIIDLMDPNAMDLIGHACEKWGAFQLKNHGIPFGVIEDVEEEAKRLFALPTEQKLKALRSPGGATGYGRARISPFFPKFMWHEGFTIIGSPSHDAKKIWPNDYARFCDLMENYEKQMKVLADRLTEMIFNLMDISEEKRKWVGASNISEAVQLNFYPSCPEPNRAMGLAPHTDTSLFTILHQSQITGLQIFKEGKGWVPVHPHPNTLVVHTGDLLHIISNARFRCALHRVTVNRTWERYSVAYFYSPPMDYVVSPLVHSVARFRDVTVKEYIGIKAKNFGEALSFIST

SEQ ID NO: 51180 - protein, 341 aa, Glycine max
  peptide (1)..(341): Ceres Seq. ID no. 14311868
  misc_feature (201)..(300): Pfam Name: 2OG-Fe(II) oxygenase superfamily Pfam Description: 2OG-Fe(II) oxygenase superfamily
  misc_feature (11)..(339): Homolog of NCBI NO: 40714037 NR Description: gibberellin 3-oxidase-like protein [Ipomoea nil]
  misc_feature (17)..(337): Homolog of NCBI NO: 20149243 NR Description: gibberellin 3-oxidase 1 [Nicotiana sylvestris]
  misc_feature (4)..(339): Homolog of NCBI NO: 6691485 NR Description: gibberellin 3beta-hydroxylase [Nicotiana tabacum]
  misc_feature (1)..(339): Homolog of NCBI NO: 2291080 NR Description: defective gibberellin 3B-hydroxylase [Pisum
  misc_feature (1)..(339): Homolog of NCBI NO: 7433212 NR Description: gibberellin 3 beta-hydroxylase (EC 1.4.99.-)
  misc_feature (1)..(339): Homolog of NCBI NO: 7433213 NR Description: gibberellin 3 beta-hydroxylase (EC 1.4.99.-)
  misc_feature (1)..(339): Homolog of NCBI NO: 2314805 NR Description: 2-oxoglutarate-dependent dioxygenase [Pisum
  misc_feature (16)..(339): Homolog of NCBI NO: 8894936 NR Description: putative gibberellin 3 beta hydroxylase
  misc_feature (1)..(339): Homolog of NCBI NO: 9971221 NR Description: gibberellin 3b-hydroxylase No3 [Lactuca sativa]
  misc_feature (1)..(339): Homolog of NCBI NO: 4164145 NR Description: gibberelin 3beta-hydroxylase [Lactuca sativa]
MNTLSEAYKAHPLHLSHIIPLDFSSALSLPDSHAWPHCQPNDDASSSSSSSSIPIIDLMDPNAMDLIGHACEKWGAFQLKNHGIPFGVIEDVEEEAKRLFALPTEQKLKALRSPGGATGYGRARISPFFPKFMWHEGFTIIGSPSHDAKKIWPNDYARFCDLMENYEKQMKVLADRLTEMIFNLMDISEEKRKWVGASNISEAVQLNFYPSCPEPNRAMGLAPHTDTSLFTILHQSQITGLQIFKEGKGWVPVHPHPNTLVVHTGDLLHIISNARFRCALHRVTVNRTWERYSVAYFYSPPMDYVVSPLVHSVARFRDVTVKEYIGIKAKNFGEALSFIST

SEQ ID NO: 51181 - protein, 283 aa, Glycine max
  peptide (1)..(283): Ceres Seq. ID no. 14311869
  misc_feature (143)..(242): Pfam Name: 2OG-Fe(II) oxygenase superfamily Pfam Description: 2OG-Fe(II) oxygenase superfamily
  misc_feature (1)..(281): Homolog of NCBI NO: 40714037 NR Description: gibberellin 3-oxidase-like protein [Ipomoea nil]
  misc_feature (1)..(279): Homolog of NCBI NO: 20149243 NR Description: gibberellin 3-oxidase 1 [Nicotiana sylvestris]
  misc_feature (1)..(281): Homolog of NCBI NO: 6691485 NR Description: gibberellin 3beta-hydroxylase [Nicotiana tabacum]
  misc_feature (1)..(281): Homolog of NCBI NO: 2291080 NR Description: defective gibberellin 3B-hydroxylase [Pisum
  misc_feature (1)..(281): Homolog of NCBI NO: 7433212 NR Description: gibberellin 3 beta-hydroxylase (EC 1.4.99.-)
  misc_feature (1)..(281): Homolog of NCBI NO: 7433213 NR Description: gibberellin 3 beta-hydroxylase (EC 1.4.99.-)
  misc_feature (1)..(281): Homolog of NCBI NO: 2314805 NR Description: 2-oxoglutarate-dependent dioxygenase [Pisum
  misc_feature (1)..(281): Homolog of NCBI NO: 8894936 NR Description: putative gibberellin 3 beta hydroxylase
  misc_feature (1)..(281): Homolog of NCBI NO: 9971221 NR Description: gibberellin 3b-hydroxylase No3 [Lactuca sativa]
  misc_feature (1)..(281): Homolog of NCBI NO: 4164145 NR Description: gibberelin 3beta-hydroxylase [Lactuca sativa]
MDPNAMDLIGHACEKWGAFQLKNHGIPFGVIEDVEEEAKRLFALPTEQKLKALRSPGGATGYGRARISPFFPKFMWHEGFTIIGSPSHDAKKIWPNDYARFCDLMENYEKQMKVLADRLTEMIFNLMDISEEKRKWVGASNISEAVQLNFYPSCPEPNRAMGLAPHTDTSLFTILHQSQITGLQIFKEGKGWVPVHPHPNTLVVHTGDLLHIISNARFRCALHRVTVNRTWERYSVAYFYSPPMDYVVSPLVHSVARFRDVTVKEYIGIKAKNFGEALSFIST

SEQ ID NO: 51182 - DNA, 1975 bp, Glycine max
  misc_feature (1)..(1975): Ceres Seq. ID no. 15177343
atcattcacacacgttttgcactttttcctctctctctctctctctaaaatacttcttttctttctctcagactctgaaactctttttctctctctgtttctaaggccaaagaagaacaacaccttcaccgccacctaaactaacaacagcagcataagatttgaaggtaataaacaattgatggatgagtattctcgtaaaagaggtgtagatgggatggtattccctagaaaggggatgggccatgtatttagagatactgctaatactagagatcgaaatggtcaaatttgtagtcgattgggttgcagtagcagagccaatcttcccaaagttgctcacgtcagatcttctgaaaaaggtaaatctttgaggccttcatttcagtcctcttcaagtagcaaggatgcaattggaagttcctctagaactactagttacccagcaaaacgacttatagaacctcggaaaacattatcctctcagtttgaggcacattcatctgaaactagtagtgtacaggacggaccagaattttcagtgcccatccctccaacagaagaaattcggagagggcctctagttgaaggagaaagtacagagtctagtaatgcaatattgatggaagtaggaagttccagtgcagtatcaaatactagatctcaaagagctggattgcgtgcgcaagaaattaaaagcactggtgcagtgaggcgggctgtttccagcaggtatgggttgagaaacctcaaatgcaactctatatctgacgtcgtcccagctggttgttcaccgttggattcaagccttaatagaaggaaggatacaataaaaaagggaaactgtgaagggggaaatagttccactgttagggggaaaaatatcactgggtcttcactggaaggacggaattctggctccagaaatggcatatctatatccgattcaagaagatctagaaatgttccttctcaccggagcaccagcgtggcatcagtaagaactcaaagatcaattagtggtcaagccaggggaaggttttgtagccaaggaaacgaaaaccctgtggcaagcagtgattcccctcttaacattcccctttcacctcattctggtgatcttgatgctcctggcttttcatatcatacttctatggagactcctctaagtggctcaagctcttatggtagaccaggcaatagcagtgagcagttaagtggtgttatgcctgcatctcctgcagaagatgacaacactcattctctaataaatagggatagctttcgacattacaacatgggtggtattgcagaggtgttattggcacttgagaggattgaacaagatgcagagctaacccatgagcaaattcttttgttggaggccaacttgttcctcagtggattaaacttttatgatcaccacagagacatgcggttggatattgataacatgtcctatgaggaacttttagctctagaagagagaatgggaactgtgagcaccgctctgccggaggaagcacttgcagaatgtctgaaaagaagtaaatatcagtctgcacctttagatgatgcagatgagagttgtaatgaggataaggatgatatcaaatgctgcatttgccaggaggaatatgttgttggagatgaagttggggatctgcaatgtgaacatagatttcatgtggtttgcatacaggagtggatgcggcttaagaactggtgccctgtttgtaaagtatctgcagcactgtccaattcatttttacctcattgattgcattgttccttttcttttacttttcattttgtacaaaatacagatacagatgctcctcacctcatcttattgatccatatgtacatacatagccaatgtctccatccataaaaactaataacctaagccaccggcttgatggacactggaacttgctatcctgcgcatgaaaatagtcccatctttttgttt

SEQ ID NO: 51183 - protein, 532 aa, Glycine max
  peptide (1)..(532): Ceres Seq. ID no. 15177344
  misc_feature (479)..(519): Pfam Name: Zinc finger, C3HC4 type (RING finger) Pfam Description: Zinc finger, C3HC4 type (RING finger)
  misc_feature (383)..(526): Homolog of NCBI NO: 38345496 NR Description: OSJNBa0010D21.9 [Oryza sativa (japonica
  misc_feature (340)..(528): Homolog of NCBI NO: 38344153 NR Description: OSJNBa0041A02.20 [Oryza sativa (japonica
  misc_feature (379)..(522): Homolog of NCBI NO: 11358785 NR Description: RING-H2 finger protein RHG1a
  misc_feature (413)..(520): Homolog of NCBI NO: 40253261 NR Description: DNA binding zinc finger protein-like
  misc_feature (47)..(527): Homolog of NCBI NO: 18417809 NR Description: expressed protein [Arabidopsis thaliana]
  misc_feature (47)..(527): Homolog of NCBI NO: 7486381 NR Description: hypothetical protein F3L17.20 - Arabidopsis
  misc_feature (30)..(523): Homolog of NCBI NO: 10129643 NR Description: Pspzf zinc finger protein-like [Arabidopsis
  misc_feature (1)..(523): Homolog of NCBI NO: 20466428 NR Description: Pspzf zinc finger protein-like [Arabidopsis
  misc_feature (1)..(523): Homolog of NCBI NO: 22326712 NR Description: Pspzf zinc finger protein - like [Arabidopsis
  misc_feature (1)..(523): Homolog of NCBI NO: 30689641 NR Description: RING finger-related protein [Arabidopsis
MDEYSRKRGVDGMVFPRKGMGHVFRDTANTRDRNGQICSRLGCSSRANLPKVAHVRSSEKGKSLRPSFQSSSSSKDAIGSSSRTTSYPAKRLIEPRKTLSSQFEAHSSETSSVQDGPEFSVPIPPTEEIRRGPLVEGESTESSNAILMEVGSSSAVSNTRSQRAGLRAQEIKSTGAVRRAVSSRYGLRNLKCNSISDVVPAGCSPLDSSLNRRKDTIKKGNCEGGNSSTVRGKNITGSSLEGRNSGSRNGISISDSRRSRNVPSHRSTSVASVRTQRSISGQARGRFCSQGNENPVASSDSPLNIPLSPHSGDLDAPGFSYHTSMETPLSGSSSYGRPGNSSEQLSGVMPASPAEDDNTHSLINRDSFRHYNMGGIAEVLLALERIEQDAELTHEQILLLEANLFLSGLNFYDHHRDMRLDIDNMSYEELLALEERMGTVSTALPEEALAECLKRSKYQSAPLDDADESCNEDKDDIKCCICQEEYVVGDEVGDLQCEHRFHVVCIQEWMRLKNWCPVCKVSAALSNSFLPH

SEQ ID NO: 51184 - protein, 520 aa, Glycine max
  peptide (1)..(520): Ceres Seq. ID no. 15177345
  misc_feature (467)..(507): Pfam Name: Zinc finger, C3HC4 type (RING finger) Pfam Description: Zinc finger, C3HC4 type (RING finger)
  misc_feature (371)..(514): Homolog of NCBI NO: 38345496 NR Description: OSJNBa0010D21.9 [Oryza sativa (japonica
  misc_feature (328)..(516): Homolog of NCBI NO: 38344153 NR Description: OSJNBa0041A02.20 [Oryza sativa (japonica
  misc_feature (367)..(510): Homolog of NCBI NO: 11358785 NR Description: RING-H2 finger protein RHG1a
  misc_feature (401)..(508): Homolog of NCBI NO: 40253261 NR Description: DNA binding zinc finger protein-like
  misc_feature (35)..(515): Homolog of NCBI NO: 18417809 NR Description: expressed protein [Arabidopsis thaliana]
  misc_feature (35)..(515): Homolog of NCBI NO: 7486381 NR Description: hypothetical protein F3L17.20 - Arabidopsis
  misc_feature (18)..(511): Homolog of NCBI NO: 10129643 NR Description: Pspzf zinc finger protein-like [Arabidopsis
  misc_feature (1)..(511): Homolog of NCBI NO: 20466428 NR Description: Pspzf zinc finger protein-like [Arabidopsis
  misc_feature (1)..(511): Homolog of NCBI NO: 22326712 NR Description: Pspzf zinc finger protein - like [Arabidopsis
  misc_feature (1)..(511): Homolog of NCBI NO: 30689641 NR Description: RING finger-related protein [Arabidopsis
MVFPRKGMGHVFRDTANTRDRNGQICSRLGCSSRANLPKVAHVRSSEKGKSLRPSFQSSSSSKDAIGSSSRTTSYPAKRLIEPRKTLSSQFEAHSSETSSVQDGPEFSVPIPPTEEIRRGPLVEGESTESSNAILMEVGSSSAVSNTRSQRAGLRAQEIKSTGAVRRAVSSRYGLRNLKCNSISDVVPAGCSPLDSSLNRRKDTIKKGNCEGGNSSTVRGKNITGSSLEGRNSGSRNGISISDSRRSRNVPSHRSTSVASVRTQRSISGQARGRFCSQGNENPVASSDSPLNIPLSPHSGDLDAPGFSYHTSMETPLSGSSSYGRPGNSSEQLSGVMPASPAEDDNTHSLINRDSFRHYNMGGIAEVLLALERIEQDAELTHEQILLLEANLFLSGLNFYDHHRDMRLDIDNMSYEELLALEERMGTVSTALPEEALAECLKRSKYQSAPLDDADESCNEDKDDIKCCICQEEYVVGDEVGDLQCEHRFHVVCIQEWMRLKNWCPVCKVSAALSNSFLPH

SEQ ID NO: 51185 - protein, 513 aa, Glycine max
  peptide (1)..(513): Ceres Seq. ID no. 15177346
  misc_feature (460)..(500): Pfam Name: Zinc finger, C3HC4 type (RING finger) Pfam Description: Zinc finger, C3HC4 type (RING finger)
  misc_feature (364)..(507): Homolog of NCBI NO: 38345496 NR Description: OSJNBa0010D21.9 [Oryza sativa (japonica
  misc_feature (321)..(509): Homolog of NCBI NO: 38344153 NR Description: OSJNBa0041A02.20 [Oryza sativa (japonica
  misc_feature (360)..(503): Homolog of NCBI NO: 11358785 NR Description: RING-H2 finger protein RHG1a
  misc_feature (394)..(501): Homolog of NCBI NO: 40253261 NR Description: DNA binding zinc finger protein-like
  misc_feature (28)..(508): Homolog of NCBI NO: 18417809 NR Description: expressed protein [Arabidopsis thaliana]
  misc_feature (28)..(508): Homolog of NCBI NO: 7486381 NR Description: hypothetical protein F3L17.20 - Arabidopsis
  misc_feature (11)..(504): Homolog of NCBI NO: 10129643 NR Description: Pspzf zinc finger protein-like [Arabidopsis
  misc_feature (1)..(504): Homolog of NCBI NO: 20466428 NR Description: Pspzf zinc finger protein-like [Arabidopsis
  misc_feature (1)..(504): Homolog of NCBI NO: 22326712 NR Description: Pspzf zinc finger protein - like [Arabidopsis
  misc_feature (1)..(504): Homolog of NCBI NO: 30689641 NR Description: RING finger-related protein [Arabidopsis
MGHVFRDTANTRDRNGQICSRLGCSSRANLPKVAHVRSSEKGKSLRPSFQSSSSSKDAIGSSSRTTSYPAKRLIEPRKTLSSQFEAHSSETSSVQDGPEFSVPIPPTEEIRRGPLVEGESTESSNAILMEVGSSSAVSNTRSQRAGLRAQEIKSTGAVRRAVSSRYGLRNLKCNSISDVVPAGCSPLDSSLNRRKDTIKKGNCEGGNSSTVRGKNITGSSLEGRNSGSRNGISISDSRRSRNVPSHRSTSVASVRTQRSISGQARGRFCSQGNENPVASSDSPLNIPLSPHSGDLDAPGFSYHTSMETPLSGSSSYGRPGNSSEQLSGVMPASPAEDDNTHSLINRDSFRHYNMGGIAEVLLALERIEQDAELTHEQILLLEANLFLSGLNFYDHHRDMRLDIDNMSYEELLALEERMGTVSTALPEEALAECLKRSKYQSAPLDDADESCNEDKDDIKCCICQEEYVVGDEVGDLQCEHRFHVVCIQEWMRLKNWCPVCKVSAALSNSFLPH

SEQ ID NO: 51186 - DNA, 1121 bp, Glycine max
  misc_feature (1)..(1121): Ceres Seq. ID no. 13638532
aagcgaaagcaaaaccgcaggactagcaggagagacagagatcgcccgaaccctaaccctaccagcacctcccgtcgccggctgagatggcgatggacgcggagcggcggcaggcggagctgatcgagcagttttcggcgcaggcggcggcgctctcctcggctcctcagctggcggcgctcgtgctcgaggccacctcccacccggcgctctttgccttctccgagctcctcacccttccagccctctccaagctaacgggcacgcagtacgcctcgtcgctggacctgctccgcctcttcgcctacggcaccctcaaggactacaagagtaattctagcgccctccctgcattgttgcctgatcaagcccggaagctgaagcaactcagtgtgctaactttggctgagtcaaccaaggtacttccatatgatcagctcatgcaagagctagacgtttccaatgtgagagaacttgaagatttcctcatcaatgagtgcatgtactcaggtattgtcagaggcaagttggaccaactgcggcggtgctttgaagtacaatttgcagctggaagggacctcacacatgatcagctaaccaacatgattgagaccttgtctgactggttgggaacatcagataatttattacaccaaattcaggagaaaatcaagtgggcggatacaacaagtgaatcgaacaagaagcaccagaaagaatttgaagacagagtggaagaagccaagaagtcagtcaaggcagacaatgacttacgggggcatgacgactttctctctgaatctggaggaataatggattttgaggaggaccgcatccgaccaaaaaggaggcgacaaccaatgtcatagtttgactgaagtatcacacctatggtccctgctcgcagaagtgacgaatgctgttcttgagacattttgtcaccggagtttaggagcgtcaattagggtgctttccatgaagcgagtctgttgagaaaacgcttgtttttggtatgagatgttacaaggagatgatttactgccgcatttattaagtagcacaaagggcatatgggtgacttagcactgtaaagattatggttctgaaaaggttggtgaccc

SEQ ID NO: 51187 - protein, 260 aa, Glycine max
  peptide (1)..(260): Ceres Seq. ID no. 13638533
  misc_feature (66)..(159): Pfam Name: PCI domain Pfam Description: PCI domain
  misc_feature (1)..(224): Homolog of NCBI NO: 34858454 NR Description: similar to COP9 complex subunit 7a
  misc_feature (13)..(224): Homolog of NCBI NO: 31239493 NR Description: ENSANGP00000011626 [Anopheles gambiae]
  misc_feature (6)..(225): Homolog of NCBI NO: 3309176 NR Description: COP9 complex subunit 7b [Mus musculus]
  misc_feature (6)..(225): Homolog of NCBI NO: 27764886 NR Description: COP9 (constitutive photomorphogenic) homolog,
  misc_feature (6)..(225): Homolog of NCBI NO: 34877558 NR Description: similar to Cops7b protein [Rattus norvegicus]
  misc_feature (6)..(225): Homolog of NCBI NO: 15215085 NR Description: Cops7b protein [Mus musculus]
  misc_feature (6)..(225): Homolog of NCBI NO: 12232385 NR Description: COP9 constitutive photomorphogenic homolog
  misc_feature (1)..(260): Homolog of NCBI NO: 37589772 NR Description: Unknown (protein for IMAGE:4786730) [Danio rerio]
  misc_feature (3)..(223): Homolog of NCBI NO: 30678240 NR Description: COP9 complex subunit, FUS5 [Arabidopsis thaliana]
  misc_feature (3)..(260): Homolog of NCBI NO: 18378920 NR Description: COP9 complex subunit, FUS5 [Arabidopsis thaliana]
MAMDAERRQAELIEQFSAQAAALSSAPQLAALVLEATSHPALFAFSELLTLPALSKLTGTQYASSLDLLRLFAYGTLKDYKSNSSALPALLPDQARKLKQLSVLTLAESTKVLPYDQLMQELDVSNVRELEDFLINECMYSGIVRGKLDQLRRCFEVQFAAGRDLTHDQLTNMIETLSDWLGTSDNLLHQIQEKIKWADTTSESNKKHQKEFEDRVEEAKKSVKADNDLRGHDDFLSESGGIMDFEEDRIRPKRRRQPMS

SEQ ID NO: 51188 - protein, 258 aa, Glycine max
  peptide (1)..(258): Ceres Seq. ID no. 13638534
  misc_feature (64)..(157): Pfam Name: PCI domain Pfam Description: PCI domain
  misc_feature (1)..(222): Homolog of NCBI NO: 34858454 NR Description: similar to COP9 complex subunit 7a
  misc_feature (11)..(222): Homolog of NCBI NO: 31239493 NR Description: ENSANGP00000011626 [Anopheles gambiae]
  misc_feature (4)..(223): Homolog of NCBI NO: 3309176 NR Description: COP9 complex subunit 7b [Mus musculus]
  misc_feature (4)..(223): Homolog of NCBI NO: 27764886 NR Description: COP9 (constitutive photomorphogenic) homolog,
  misc_feature (4)..(223): Homolog of NCBI NO: 34877558 NR Description: similar to Cops7b protein [Rattus norvegicus]
  misc_feature (4)..(223): Homolog of NCBI NO: 15215085 NR Description: Cops7b protein [Mus musculus]
  misc_feature (4)..(223): Homolog of NCBI NO: 12232385 NR Description: COP9 constitutive photomorphogenic homolog
  misc_feature (1)..(258): Homolog of NCBI NO: 37589772 NR Description: Unknown (protein for IMAGE:4786730) [Danio rerio]
  misc_feature (1)..(221): Homolog of NCBI NO: 30678240 NR Description: COP9 complex subunit, FUS5 [Arabidopsis thaliana]
  misc_feature (1)..(258): Homolog of NCBI NO: 18378920 NR Description: COP9 complex subunit, FUS5 [Arabidopsis thaliana]
MDAERRQAELIEQFSAQAAALSSAPQLAALVLEATSHPALFAFSELLTLPALSKLTGTQYASSLDLLRLFAYGTLKDYKSNSSALPALLPDQARKLKQLSVLTLAESTKVLPYDQLMQELDVSNVRELEDFLINECMYSGIVRGKLDQLRRCFEVQFAAGRDLTHDQLTNMIETLSDWLGTSDNLLHQIQEKIKWADTTSESNKKHQKEFEDRVEEAKKSVKADNDLRGHDDFLSESGGIMDFEEDRIRPKRRRQPMS

SEQ ID NO: 51189 - protein, 142 aa, Glycine max
  peptide (1)..(142): Ceres Seq. ID no. 13638535
  misc_feature (1)..(106): Homolog of NCBI NO: 34858454 NR Description: similar to COP9 complex subunit 7a
  misc_feature (1)..(106): Homolog of NCBI NO: 31239493 NR Description: ENSANGP00000011626 [Anopheles gambiae]
  misc_feature (1)..(107): Homolog of NCBI NO: 3309176 NR Description: COP9 complex subunit 7b [Mus musculus]
  misc_feature (1)..(107): Homolog of NCBI NO: 27764886 NR Description: COP9 (constitutive photomorphogenic) homolog,
  misc_feature (1)..(107): Homolog of NCBI NO: 34877558 NR Description: similar to Cops7b protein [Rattus norvegicus]
  misc_feature (1)..(107): Homolog of NCBI NO: 15215085 NR Description: Cops7b protein [Mus musculus]
  misc_feature (1)..(107): Homolog of NCBI NO: 12232385 NR Description: COP9 constitutive photomorphogenic homolog
  misc_feature (1)..(142): Homolog of NCBI NO: 37589772 NR Description: Unknown (protein for IMAGE:4786730) [Danio rerio]
  misc_feature (1)..(105): Homolog of NCBI NO: 30678240 NR Description: COP9 complex subunit, FUS5 [Arabidopsis thaliana]
  misc_feature (1)..(142): Homolog of NCBI NO: 18378920 NR Description: COP9 complex subunit, FUS5 [Arabidopsis thaliana]
MQELDVSNVRELEDFLINECMYSGIVRGKLDQLRRCFEVQFAAGRDLTHDQLTNMIETLSDWLGTSDNLLHQIQEKIKWADTTSESNKKHQKEFEDRVEEAKKSVKADNDLRGHDDFLSESGGIMDFEEDRIRPKRRRQPMS

SEQ ID NO: 51190 - DNA, 686 bp, Glycine max
  misc_feature (1)..(686): Ceres Seq. ID no. 13594525
ttttttttttgttacaaataactgatttcatcattcatgcaagagcaaattggacagtactacgagggaaactgatacaggagcatagggttctagattcagaagcaacatttaactgaaactaagactcgaaccaaactttgaattcccagttaatccagctatagaatgccactttgttatgtttccaacgctttagtgggggcgcagcttctccttgggcctgatgtcattgctgtggccgcacttcttcttgcggcagttggcagccctgaggggcaggcgtgcatagcacttgcggcacacaagcctgtgctgcatgtacttgagcgcaagcacgcgcaggttaggctccatcctgctggggtagaccccgcccttgccaccgccgacgaggcgcagcgcgaggtgaagcgtggactccttgtggatgctgtagtcggccagggtgcggccatcgtcgagctgcttccccgcgaagatgaggcgctgctggtccggctggataccttccttgtcgtggatcttggccttgacgctgtcgacggccgcgcaactctcgacctcgagcgtcatggtctccccggtcggcgtcttcacgaagatctgcatcatctcgccgccggttgctcgctccccctctgctctcctctcgccgggcggtggtggtagtggtggtggaagtg

SEQ ID NO: 51191 - protein, 167 aa, Glycine max
  peptide (1)..(167): Ceres Seq. ID no. 13594526
  misc_feature (58)..(127): Homolog of NCBI NO: 552127 NR Description: polytene protein
  misc_feature (58)..(127): Homolog of NCBI NO: 224201 NR Description: ORF
  misc_feature (71)..(127): Homolog of NCBI NO: 552128 NR Description: polytene protein
  misc_feature (50)..(139): Homolog of NCBI NO: 38087983 NR Description: similar to ORF [Mus musculus]
  misc_feature (71)..(148): Homolog of NCBI NO: 158144 NR Description: polytene protein
  misc_feature (71)..(148): Homolog of NCBI NO: 158146 NR Description: polytene protein
MPLCYVSNALVGAQLLLGPDVIAVAALLLAAVGSPEGQACIALAAHKPVLHVLERKHAQVRLHPAGVDPALATADEAQREVKRGLLVDAVVGQGAAIVELLPREDEALLVRLDTFLVVDLGLDAVDGRATLDLERHGLPGRRLHEDLHHLAAGCSLPLCSPLAGRWW

SEQ ID NO: 51192 - DNA, 643 bp, Glycine max
  misc_feature (1)..(643): Ceres Seq. ID no. 13594460
ctagaacatcctaatcgaaaaatttattataatacaatggatgagattcacatgcctcctcctgtggtaacagttgtcctaaaagttcgaatgcattgtgaagcatgtgctcaagttatacagaagcgaatccgcaagattaaaggagtagaatcagtggaaacagacttggcaaatgatcaagttatagtaaaaggtgtggtcgaccctgccaagcttgttgatcatgtatataagaggaccaaaaagcaagcctctattgtgaaggacggagaaaagaaggaagaagaaaagaaagaagaggagaaaaaggaagagaaagaagaagagaaaagaggtgaagaagaaaacaagggaggagaagataacaaaactgaaatcaaacgaagtgaatactggccatccaaaaactacatcgactatgcttatgaccccgagattttcagcgacgagaacccaaatgcctgctctgttatgtaaaccagcaagtaattccgtatttcagttggaacagtaattagctgaagtagttttcttttcaatgtttttctaagaatatgtaccagtgtgagtatgttaagggtatattggttcctttacatagcgtccctcaaagttagatgtcttatttcttgtgcttttg

SEQ ID NO: 51193 - protein, 159 aa, Glycine max
  peptide (1)..(159): Ceres Seq. ID no. 13594461
  misc_feature (38)..(119): Pfam Name: 60s Acidic ribosomal protein Pfam Description: 60s Acidic ribosomal protein
  misc_feature (91)..(158): Homolog of NCBI NO: 21594005 NR Description: unknown [Arabidopsis thaliana]
  misc_feature (14)..(88): Homolog of NCBI NO: 18420811 NR Description: copper-binding protein family [Arabidopsis
  misc_feature (91)..(158): Homolog of NCBI NO: 18420811 NR Description: copper-binding protein family [Arabidopsis
  misc_feature (138)..(159): Homolog of NCBI NO: 37534752 NR Description: putative metal-binding protein
  misc_feature (25)..(126): Homolog of NCBI NO: 37534752 NR Description: putative metal-binding protein
  misc_feature (19)..(126): Homolog of NCBI NO: 4097547 NR Description: ATFP3 [Arabidopsis thaliana]
  misc_feature (19)..(126): Homolog of NCBI NO: 18424719 NR Description: copper chaperone (CCH)-related [Arabidopsis
  misc_feature (19)..(126): Homolog of NCBI NO: 9758294 NR Description: contains similarity to ATFP3~gene_id:MLE2.16
  misc_feature (20)..(131): Homolog of NCBI NO: 38344582 NR Description: OSJNBa0053B21.14 [Oryza sativa (japonica
  misc_feature (19)..(158): Homolog of NCBI NO: 37532382 NR Description: putative ATFP3 [Oryza sativa (japonica
LEHPNRKIYYNTMDEIHMPPPVVTVVLKVRMHCEACAQVIQKRIRKIKGVESVETDLANDQVIVKGVVDPAKLVDHVYKRTKKQASIVKDGEKKEEEKKEEEKKEEKEEEKRGEEENKGGEDNKTEIKRSEYWPSKNYIDYAYDPEIFSDENPNACSVM

SEQ ID NO: 51194 - protein, 147 aa, Glycine max
  peptide (1)..(147): Ceres Seq. ID no. 13594462
  misc_feature (26)..(107): Pfam Name: 60s Acidic ribosomal protein Pfam Description: 60s Acidic ribosomal protein
  misc_feature (79)..(146): Homolog of NCBI NO: 21594005 NR Description: unknown [Arabidopsis thaliana]
  misc_feature (2)..(76): Homolog of NCBI NO: 18420811 NR Description: copper-binding protein family [Arabidopsis
  misc_feature (79)..(146): Homolog of NCBI NO: 18420811 NR Description: copper-binding protein family [Arabidopsis
  misc_feature (126)..(147): Homolog of NCBI NO: 37534752 NR Description: putative metal-binding protein
  misc_feature (13)..(114): Homolog of NCBI NO: 37534752 NR Description: putative metal-binding protein
  misc_feature (7)..(114): Homolog of NCBI NO: 4097547 NR Description: ATFP3 [Arabidopsis thaliana]
  misc_feature (7)..(114): Homolog of NCBI NO: 18424719 NR Description: copper chaperone (CCH)-related [Arabidopsis
  misc_feature (7)..(114): Homolog of NCBI NO: 9758294 NR Description: contains similarity to ATFP3~gene_id:MLE2.16
  misc_feature (8)..(119): Homolog of NCBI NO: 38344582 NR Description: OSJNBa0053B21.14 [Oryza sativa (japonica
  misc_feature (7)..(146): Homolog of NCBI NO: 37532382 NR Description: putative ATFP3 [Oryza sativa (japonica
MDEIHMPPPVVTVVLKVRMHCEACAQVIQKRIRKIKGVESVETDLANDQVIVKGVVDPAKLVDHVYKRTKKQASIVKDGEKKEEEKKEEEKKEEKEEEKRGEEENKGGEDNKTEIKRSEYWPSKNYIDYAYDPEIFSDENPNACSVM

SEQ ID NO: 51195 - protein, 142 aa, Glycine max
  peptide (1)..(142): Ceres Seq. ID no. 13594463
  misc_feature (21)..(102): Pfam Name: 60s Acidic ribosomal protein Pfam Description: 60s Acidic ribosomal protein
  misc_feature (74)..(141): Homolog of NCBI NO: 21594005 NR Description: unknown [Arabidopsis thaliana]
  misc_feature (1)..(71): Homolog of NCBI NO: 18420811 NR Description: copper-binding protein family [Arabidopsis
  misc_feature (74)..(141): Homolog of NCBI NO: 18420811 NR Description: copper-binding protein family [Arabidopsis
  misc_feature (121)..(142): Homolog of NCBI NO: 37534752 NR Description: putative metal-binding protein
  misc_feature (8)..(109): Homolog of NCBI NO: 37534752 NR Description: putative metal-binding protein
  misc_feature (2)..(109): Homolog of NCBI NO: 4097547 NR Description: ATFP3 [Arabidopsis thaliana]
  misc_feature (2)..(109): Homolog of NCBI NO: 18424719 NR Description: copper chaperone (CCH)-related [Arabidopsis
  misc_feature (2)..(109): Homolog of NCBI NO: 9758294 NR Description: contains similarity to ATFP3~gene_id:MLE2.16
  misc_feature (3)..(114): Homolog of NCBI NO: 38344582 NR Description: OSJNBa0053B21.14 [Oryza sativa (japonica
  misc_feature (2)..(141): Homolog of NCBI NO: 37532382 NR Description: putative ATFP3 [Oryza sativa (japonica
MPPPVVTVVLKVRMHCEACAQVIQKRIRKIKGVESVETDLANDQVIVKGVVDPAKLVDHVYKRTKKQASIVKDGEKKEEEKKEEEKKEEKEEEKRGEEENKGGEDNKTEIKRSEYWPSKNYIDYAYDPEIFSDENPNACSVM

SEQ ID NO: 51196 - DNA, 1230 bp, Glycine max
  misc_feature (1)..(1230): Ceres Seq. ID no. 15177119
accaccacaggagcgcgcgacgcagagatttgattcagggagaagagaatggcggcgccgtcgtccctcgcctcctcccacctctcccgcctcgccgctgccgcaccggccccgcagcaccaccaccagaaccaccagctccgcctcggctgctcccgccgccgcgcgcagcgcctcgtcgccatggccggatccggaaagttcttcgtcggaggcaactggaagtgcaatggaacaaaggaatccattagcaagcttgtctctgatttgaatgctgccacactcgaaagcgatgtagatgttgtggtagcaccgccattcatctatatcgaccaggtcaagagttcactaactggacgtattgaggtgtctgctcaaaacacatggattggaaaaggaggagctttcactggagagatcagtgcggagcagttggtggacattggctgccaatgggttattcttggtcactctgagcgcagacatgttatcggtgaagatgatgagtttattgggaagaaggctgcatatgcattgagtcaaaatcttaaggttatggcatgcataggagaattgttggaagagagggaagctgggaaaactttcgatgtctgttttaagcagatgaaggcttttgcagataatattacggactggacaaacgttgttattgcgtatgagcctgtgtgggctattggaaccggaaaggttgcttctcctgagcaagctcaagaagttcatgccgctgtccgtgattggttaaaaaccaatgtatcagctgatgttgcttctaccgttcgaattatatacggaggttctgtaaacgcagcaaactgtgcagagctagcaaagaaggaagatattgatggcttccttgtcggcggtgcctctttgaagggtccggactttgccaccatctgcaactcagtgacgtcgaagaaagttacagcctgatgtgagaccaccacctatatggtagaaataagtgatgagaaagagaggcagcctggctaccgcgtcgaaaaagcgtgagataggtgctccacgtgaaccgtgaatcgtgtcgagtcgtgatctggttttgctgattcgtagaacgaagaaatacaaataatacgacgtggcgccattttgcttctcatggaatttctgtacgaaacgggagttttcttctttgtacgtgagggagtggtcacactcacacctgaattgaagtgtgctcatgctaat

SEQ ID NO: 51197 - protein, 301 aa, Glycine max
  peptide (1)..(301): Ceres Seq. ID no. 15177120
  misc_feature (50)..(295): Pfam Name: Triosephosphate isomerase Pfam Description: Triosephosphate isomerase
  misc_feature (46)..(293): Homolog of NCBI NO: 38532559 NR Description: triosephosphate isomerase [Rattus norvegicus]
  misc_feature (51)..(297): Homolog of NCBI NO: 34895792 NR Description: putative triose-phosphate isomerase
  misc_feature (51)..(297): Homolog of NCBI NO: 1174749 NR Description: Triosephosphate isomerase, cytosolic (TIM)
  misc_feature (51)..(297): Homolog of NCBI NO: 11124572 NR Description: triosephosphat-isomerase [Triticum aestivum]
  misc_feature (51)..(297): Homolog of NCBI NO: 136063 NR Description: TRIOSEPHOSPHATE ISOMERASE, CYTOSOLIC (TIM)
  misc_feature (51)..(301): Homolog of NCBI NO: 1351282 NR Description: Triosephosphate isomerase, cytosolic (TIM)
  misc_feature (1)..(301): Homolog of NCBI NO: 13431949 NR Description: Triosephosphate isomerase, chloroplast precursor
  misc_feature (2)..(301): Homolog of NCBI NO: 15226479 NR Description: triosephosphate isomerase, chloroplast, putative
  misc_feature (5)..(301): Homolog of NCBI NO: 1351271 NR Description: Triosephosphate isomerase, chloroplast precursor
  misc_feature (40)..(301): Homolog of NCBI NO: 1174745 NR Description: Triosephosphate isomerase, chloroplast precursor
MAAPSSLASSHLSRLAAAAPAPQHHHQNHQLRLGCSRRRAQRLVAMAGSGKFFVGGNWKCNGTKESISKLVSDLNAATLESDVDVVVAPPFIYIDQVKSSLTGRIEVSAQNTWIGKGGAFTGEISAEQLVDIGCQWVILGHSERRHVIGEDDEFIGKKAAYALSQNLKVMACIGELLEEREAGKTFDVCFKQMKAFADNITDWTNVVIAYEPVWAIGTGKVASPEQAQEVHAAVRDWLKTNVSADVASTVRIIYGGSVNAANCAELAKKEDIDGFLVGGASLKGPDFATICNSVTSKKVTA

SEQ ID NO: 51198 - protein, 256 aa, Glycine max
  peptide (1)..(256): Ceres Seq. ID no. 15177121
  misc_feature (5)..(250): Pfam Name: Triosephosphate isomerase Pfam Description: Triosephosphate isomerase
  misc_feature (1)..(248): Homolog of NCBI NO: 38532559 NR Description: triosephosphate isomerase [Rattus norvegicus]
  misc_feature (6)..(252): Homolog of NCBI NO: 34895792 NR Description: putative triose-phosphate isomerase
  misc_feature (6)..(252): Homolog of NCBI NO: 1174749 NR Description: Triosephosphate isomerase, cytosolic (TIM)
  misc_feature (6)..(252): Homolog of NCBI NO: 11124572 NR Description: triosephosphat-isomerase [Triticum aestivum]
  misc_feature (6)..(252): Homolog of NCBI NO: 136063 NR Description: TRIOSEPHOSPHATE ISOMERASE, CYTOSOLIC (TIM)
  misc_feature (6)..(256): Homolog of NCBI NO: 1351282 NR Description: Triosephosphate isomerase, cytosolic (TIM)
  misc_feature (1)..(256): Homolog of NCBI NO: 13431949 NR Description: Triosephosphate isomerase, chloroplast precursor
  misc_feature (1)..(256): Homolog of NCBI NO: 15226479 NR Description: triosephosphate isomerase, chloroplast, putative
  misc_feature (1)..(256): Homolog of NCBI NO: 1351271 NR Description: Triosephosphate isomerase, chloroplast precursor
  misc_feature (1)..(256): Homolog of NCBI NO: 1174745 NR Description: Triosephosphate isomerase, chloroplast precursor
MAGSGKFFVGGNWKCNGTKESISKLVSDLNAATLESDVDVVVAPPFIYIDQVKSSLTGRIEVSAQNTWIGKGGAFTGEISAEQLVDIGCQWVILGHSERRHVIGEDDEFIGKKAAYALSQNLKVMACIGELLEEREAGKTFDVCFKQMKAFADNITDWTNVVIAYEPVWAIGTGKVASPEQAQEVHAAVRDWLKTNVSADVASTVRIIYGGSVNAANCAELAKKEDIDGFLVGGASLKGPDFATICNSVTSKKVTA

SEQ ID NO: 51199 - DNA, 946 bp, Glycine max
  misc_feature (1)..(946): Ceres Seq. ID no. 13594527
aacatcatcagcttgagccaccgatcctcctgatccaccctcgccttacgagactctttcagagcagctcgcgccacctttcgccagctagccatggccgccgcacggacctacgtcgacttcgtgccgtcgcacgacctcgtcgaggacgccgccaagcagaccttcgtcgtcaacctccccgggttcaagaaggagcacctgagggtgcagatcgacaactacggccggctgagggtcagcggcgagcggccgctcgagggcggccagtggagccgcttccgcaaggagttccaggtccccgagggctgcaacgccggcggcatccgcgccaggttcgagaaggacggcgtcctccacgtcatcatgcccaggctcacgcccctcgaggacgcctcaaagtcagcggcagaccacgaggcggaagctgcgcggcacgccgctgccgcagaagagaagaagcgccacgaggagatggaggaggacgctaggaagcgtcgtgcgggtgacgaggacgactacgccagcgacgacggggaaggcgcacgccagccggcgtctgccggccggcaggcgtacggcttcgccagggaccggagcaggagtgggatggtgagggcactgctcctcgccgtggcggtggccttggttggcgttgctggcctgtatgctcggtacaggtggatggacccgtcggctgaggcggcgccggcagatggtgccaccgtcggcctctctgactattgatcaccagcaccaagcattcattcacaccgctgaagataagatcattcggtaaagaaaaacagtggacaagatacgggactgactacacgagctgcctgaaatactacgtgtaaatatgatctcactactgtaacttatacacactaataagcttgcacgtgcaatgcacgtctcatttgacttaaaagtttgaatatgc

SEQ ID NO: 51200 - protein, 217 aa, Glycine max
  peptide (1)..(217): Ceres Seq. ID no. 15221376
  misc_feature (1)..(124): Homolog of NCBI NO: 37534710 NR Description: putative heat shock protein
  misc_feature (7)..(140): Homolog of NCBI NO: 18414724 NR Description: small heat shock-related protein (RTM2)
  misc_feature (5)..(159): Homolog of NCBI NO: 15242107 NR Description: small heat shock protein -related [Arabidopsis
  misc_feature (3)..(98): Homolog of NCBI NO: 18401331 NR Description: expressed protein [Arabidopsis thaliana]
  misc_feature (7)..(132): Homolog of NCBI NO: 24417442 NR Description: unknown [Arabidopsis thaliana]
  misc_feature (5)..(98): Homolog of NCBI NO: 21592618 NR Description: unknown [Arabidopsis thaliana]
  misc_feature (1)..(98): Homolog of NCBI NO: 18483234 NR Description: small heat shock-like protein [Sorghum bicolor]
  misc_feature (2)..(133): Homolog of NCBI NO: 15209175 NR Description: hypothetical protein [Solanum demissum]
  misc_feature (2)..(133): Homolog of NCBI NO: 15209179 NR Description: hypothetical protein [Solanum demissum]
  misc_feature (29)..(217): Homolog of NCBI NO: 21397266 NR Description: Putative small heat shock protein
MAAARTYVDFVPSHDLVEDAAKQTFVVNLPGFKKEHLRVQIDNYGRLRVSGERPLEGGQWSRFRKEFQVPEGCNAGGIRARFEKDGVLHVIMPRLTPLEDASKSAADHEAEAARHAAAAEEKKRHEEMEEDARKRRAGDEDDYASDDGEGARQPASAGRQAYGFARDRSRSGMVRALLLAVAVALVGVAGLYARYRWMDPSAEAAPADGATVGLSDY

SEQ ID NO: 51201 - protein, 162 aa, Glycine max
  peptide (1)..(162): Ceres Seq. ID no. 15221377
  misc_feature (7)..(162): Homolog of NCBI NO: 39592411 NR Description: Hypothetical protein CBG07956 [Caenorhabditis
HHQLEPPILLIHPRLTRLFQSSSRHLSPASHGRRTDLRRLRAVARPRRGRRQADLRRQPPRVQEGAPEGADRQLRPAEGQRRAAARGRPVEPLPQGVPGPRGLQRRRHPRQVREGRRPPRHHAQAHAPRGRLKVSGRPRGGSCAARRCRRREEAPRGDGGGR

SEQ ID NO: 51202 - protein, 126 aa, Glycine max
  peptide (1)..(126): Ceres Seq. ID no. 15221378
  misc_feature (1)..(77): Homolog of NCBI NO: 34912188 NR Description: P0700A11.20 [Oryza sativa (japonica
  misc_feature (1)..(33): Homolog of NCBI NO: 37534710 NR Description: putative heat shock protein
  misc_feature (1)..(49): Homolog of NCBI NO: 18414724 NR Description: small heat shock-related protein (RTM2)
  misc_feature (1)..(68): Homolog of NCBI NO: 15242107 NR Description: small heat shock protein -related [Arabidopsis
  misc_feature (1)..(41): Homolog of NCBI NO: 24417442 NR Description: unknown [Arabidopsis thaliana]
  misc_feature (1)..(42): Homolog of NCBI NO: 15209175 NR Description: hypothetical protein [Solanum demissum]
  misc_feature (1)..(42): Homolog of NCBI NO: 15209179 NR Description: hypothetical protein [Solanum demissum]
  misc_feature (1)..(126): Homolog of NCBI NO: 21397266 NR Description: Putative small heat shock protein
MPRLTPLEDASKSAADHEAEAARHAAAAEEKKRHEEMEEDARKRRAGDEDDYASDDGEGARQPASAGRQAYGFARDRSRSGMVRALLLAVAVALVGVAGLYARYRWMDPSAEAAPADGATVGLSDY

SEQ ID NO: 51203 - DNA, 994 bp, Glycine max
  misc_feature (1)..(994): Ceres Seq. ID no. 13594464
atattgagttcttgaccaactgcgcgcacctcatcgagcctgcctaaccccgcccgcccgctaaaccctaccctactcaccggcggcagaggttttcgtgagctcgtccgacaatggcgtccctttgagaactcgtgcgaggtcggggtgttcgcgaggctcaccaacgcctactgcctcgtcccggccggtggggcggagaatttcaccagtgtgtttgaggccgagctcgccgacaccgtcccggtggtcaaggcatccatcggcggcatgaggatcctcaggacattgtgcgtgggcaacaagaagggccttcttctaccacacaccactaacgaccaagagctccagcacctcaagaatagcctgcctgatgaggtggtcgtccagcgtgtcgacgagcggctctccgccctcggcaactgcattgcctgcaacgaccacgtggctctcacaaaaccagatctcaccaaggaaaccgaggagatcatctcggacgttcttggggtggaggtgttcaggcagaccatcgcagggagcatcctggtcggcagctcctgcgccttctccaacaaagggggacttgttcacccgcagacgtcggtggaggacctggacgagctgtcgacgctgctgcaggtgcccctcgtcgccggcaccgtcaaccgggggagcgatggcatcgcggccggcatggtggtcaacgactgggcggccttctgcggttccgacaccacggccaccgagctctcagtggtggagagcgtcttcaggctgagggacgcccggccgggggcattgggcgccgacgtcaggaaatccttggttgaaagctgctttctttaggggaattttgccttcccttgctgtatctgtgtttgtcatgaaatattctcaactagtactccctccgcaaaaaaaaaaaaaaaaaagcttatcgataccgtcgacctstttaaacacaataaagttggaacgggaggggggaaaggat

SEQ ID NO: 51204 - protein, 191 aa, Glycine max
  peptide (1)..(191): Ceres Seq. ID no. 15221366
  misc_feature (1)..(149): Pfam Name: eIF-6 family Pfam Description: eIF-6 family
  misc_feature (1)..(188): Homolog of NCBI NO: 29436495 NR Description: Similar to integrin beta 4 binding protein [Danio
  misc_feature (1)..(188): Homolog of NCBI NO: 37650717 NR Description: SI:zC239J9.6 (novel protein similar to vertebrate
  misc_feature (1)..(188): Homolog of NCBI NO: 13785574 NR Description: p27BBP protein [Homo sapiens]
  misc_feature (1)..(188): Homolog of NCBI NO: 37181067 NR Description: p27BBP/eIF6 [Xenopus laevis]
  misc_feature (1)..(188): Homolog of NCBI NO: 6381991 NR Description: b4 integrin interactor homolog [Mus musculus]
  misc_feature (1)..(188): Homolog of NCBI NO: 4504771 NR Description: integrin beta 4 binding protein
  misc_feature (1)..(188): Homolog of NCBI NO: 27501448 NR Description: integrin beta 4 binding protein [Mus musculus]
  misc_feature (1)..(191): Homolog of NCBI NO: 34903364 NR Description: unnamed protein product [Oryza sativa (japonica
  misc_feature (1)..(188): Homolog of NCBI NO: 15228161 NR Description: eukaryotic translation initiation factor 6
  misc_feature (1)..(188): Homolog of NCBI NO: 27261099 NR Description: putative eukaryotic translation initiation factor
MRILRTLCVGNKKGLLLPHTTNDQELQHLKNSLPDEVVVQRVDERLSALGNCIACNDHVALTKPDLTKETEEIISDVLGVEVFRQTIAGSILVGSSCAFSNKGGLVHPQTSVEDLDELSTLLQVPLVAGTVNRGSDGIAAGMVVNDWAAFCGSDTTATELSVVESVFRLRDARPGALGADVRKSLVESCFL

SEQ ID NO: 51205 - protein, 134 aa, Glycine max
  peptide (1)..(134): Ceres Seq. ID no. 15221367
MRWSSSVSTSGSPPSATALPATTTWLSQNQISPRKPRRSSRTFLGWRCSGRPSQGASWSAAPAPSPTKGDLFTRRRRWRTWTSCRRCCRCPSSPAPSTGGAMASRPAWWSTTGRPSAVPTPRPPSSQWWRASSG

SEQ ID NO: 51206 - DNA, 1116 bp, Glycine max
  misc_feature (1)..(1116): Ceres Seq. ID no. 15172958
acagggtaaggccggaacattttgttatcatcgccgtcgtcaagatgccgccggccggagaactccaacatcaatccccatcaaaagacaaacaacccaccgatactcaatctgccgaagcagctgcggcagcgattgccgcggctgcggcggatgcggaagctgcgggattatggacacagatcaaggcggaggctcgccgtgacgctgaggcggagccggcgctagctagctacctttactcgacgattctttctcactcgtctctcgagcgatccatctcgtttcatttgggaaacaagctctgctcatcgacgcttctctccacgcttctatacgatctgttcttgaacacgttcacctccgatccttctctccgcaacgccaccgtcgcggatctccgtgctgctcgtgttcgtgatccggcgtgtatctccttctcccattgccttctcaattacaaaggcttcttagcgattcaggcacatcgtatctcgcacaagctatggactcaaacaagaaagccactagccttagctctcaactcgcgtatctccgaagtgttcgccgtcgatatccatccagcagcgaagatcggaaaaggtatacttctcgatcacgcaaccggagttgtcatcggagaaacagctgtgatagggaacaacgtttcgatcctccaccacgtgacgctcggtggaacaggtaaagcttgcggagacaggcatcccaagatcggtgacggttgcttgatcggagctggagcgactattctcgggaatgtcaagatcggttgtggagctaaagtaggtgctggatctgtggttctgatcgacatccctccacgagctacggcggttgggaatccggcgagacttgtcggaggaaaagagaaaccgacgattcatgatgaggagtgtccgggagaatcgatggatcatacttcgtttatctcggaatggtcagactacatcatttgaaattattaccgagttttgttgtgttatcgagctactcgagattataaggtaaacgtgatggactgtctttactgagctctgtcggatttatagactactggcatgttcagtgcaataataatgagtttagtttggtctt

SEQ ID NO: 51207 - protein, 324 aa, Glycine max
  peptide (1)..(324): Ceres Seq. ID no. 15172959
  misc_feature (50)..(324): Homolog of NCBI NO: 6601494 NR Description: serine acetyltransferase [Allium cepa]
  misc_feature (50)..(324): Homolog of NCBI NO: 7384806 NR Description: serine acetyltransferase [Allium tuberosum]
  misc_feature (40)..(324): Homolog of NCBI NO: 7433702 NR Description: serine O-acetyltransferase (EC 2.3.1.30) -
  misc_feature (32)..(324): Homolog of NCBI NO: 28460066 NR Description: serine O-acetyltransferase [Beta vulgaris]
  misc_feature (41)..(324): Homolog of NCBI NO: 1361979 NR Description: serine O-acetyltransferase (EC 2.3.1.30) -
  misc_feature (17)..(324): Homolog of NCBI NO: 23343585 NR Description: serine acetyltransferase 7 [Nicotiana tabacum]
  misc_feature (15)..(324): Homolog of NCBI NO: 21537083 NR Description: serine O-acetyltransferase (EC 2.3.1.30) Sat-52
  misc_feature (15)..(324): Homolog of NCBI NO: 15241928 NR Description: serine acetyltransferase (Sat-52) [Arabidopsis
RVRPEHFVIIAVVKMPPAGELQHQSPSKDKQPTDTQSAEAAAAAIAAAAADAEAAGLWTQIKAEARRDAEAEPALASYLYSTILSHSSLERSISFHLGNKLCSSTLLSTLLYDLFLNTFTSDPSLRNATVADLRAARVRDPACISFSHCLLNYKGFLAIQAHRISHKLWTQTRKPLALALNSRISEVFAVDIHPAAKIGKGILLDHATGVVIGETAVIGNNVSILHHVTLGGTGKACGDRHPKIGDGCLIGAGATILGNVKIGCGAKVGAGSVVLIDIPPRATAVGNPARLVGGKEKPTIHDEECPGESMDHTSFISEWSDYII

SEQ ID NO: 51208 - protein, 310 aa, Glycine max
  peptide (1)..(310): Ceres Seq. ID no. 15172960
  misc_feature (36)..(310): Homolog of NCBI NO: 6601494 NR Description: serine acetyltransferase [Allium cepa]
  misc_feature (36)..(310): Homolog of NCBI NO: 7384806 NR Description: serine acetyltransferase [Allium tuberosum]
  misc_feature (26)..(310): Homolog of NCBI NO: 7433702 NR Description: serine O-acetyltransferase (EC 2.3.1.30) -
  misc_feature (18)..(310): Homolog of NCBI NO: 28460066 NR Description: serine O-acetyltransferase [Beta vulgaris]
  misc_feature (27)..(310): Homolog of NCBI NO: 1361979 NR Description: serine O-acetyltransferase (EC 2.3.1.30) -
  misc_feature (3)..(310): Homolog of NCBI NO: 23343585 NR Description: serine acetyltransferase 7 [Nicotiana tabacum]
  misc_feature (1)..(310): Homolog of NCBI NO: 21537083 NR Description: serine O-acetyltransferase (EC 2.3.1.30) Sat-52
  misc_feature (1)..(310): Homolog of NCBI NO: 15241928 NR Description: serine acetyltransferase (Sat-52) [Arabidopsis
MPPAGELQHQSPSKDKQPTDTQSAEAAAAAIAAAAADAEAAGLWTQIKAEARRDAEAEPALASYLYSTILSHSSLERSISFHLGNKLCSSTLLSTLLYDLFLNTFTSDPSLRNATVADLRAARVRDPACISFSHCLLNYKGFLAIQAHRISHKLWTQTRKPLALALNSRISEVFAVDIHPAAKIGKGILLDHATGVVIGETAVIGNNVSILHHVTLGGTGKACGDRHPKIGDGCLIGAGATILGNVKIGCGAKVGAGSVVLIDIPPRATAVGNPARLVGGKEKPTIHDEECPGESMDHTSFISEWSDYII

SEQ ID NO: 51209 - DNA, 909 bp, Glycine max
  misc_feature (1)..(909): Ceres Seq. ID no. 12608945
acgacgacacacagagccttggaccggaccaacaaacgaactgtacccgcgactgcgagcgagcgagcgagcgaaccgaggaggacagcgcaaccgccggatcgatccgtcccctccccgccgatcgccaccgttacccggagacttcgctcgaacccggccgaaggcgtcggccatgggctgctcctcctccgtgccagctagaagcaccggagggctgaacaatatcaacggtagctcttctgctgctgattcaaatgacttgcgtgccaagttggtattgctcggagattctggtgttggaaaaagctgcatcgttcttcggtttgtccgcggtcagttcgatccaacttccaaggtaactgttggtgcatcatttttatcacaaacattggcgttggaggattcgacaatagtgaagtttgaaatctgggatactgctggacaagagagatatgctgccttggcacctctttactacagaggagctgctgctgcggttgttgtctatgacataactagtccagaatcattcaagaaagcacaatattgggtgaaggaacttcaaaaacatggtagtcctggtattgtcatggtattggttggtaataaagctgatctacatgaaagtcgaagtgtaccttctcaggaggcacaagagtatgcagagaagaacagcatgttattcatggagacgtcagcaaaaacatctgataatataaatcaagtatttgaggaaatcgcgaagaggttgcccaagccaacggcgtcctgataaataaatagctctcgtgtactatattgagatggagtgacacgcttacaagtctgtaccatgtaatgcatgtaaatgcccgaggttaaactgggcatttgattggaaattgaggataatgtaaagctagctta

SEQ ID NO: 51210 - protein, 257 aa, Glycine max
  peptide (1)..(257): Ceres Seq. ID no. 12608946
  misc_feature (91)..(253): Pfam Name: Ras family Pfam Description: Ras family
  misc_feature (86)..(255): Homolog of NCBI NO: 12311680 NR Description: GTP binding protein [Cichorium intybus x
  misc_feature (86)..(255): Homolog of NCBI NO: 12311684 NR Description: GTP binding protein [Cichorium intybus x
  misc_feature (64)..(150): Homolog of NCBI NO: 37534760 NR Description: putative receptor-like protein kinase
  misc_feature (151)..(245): Homolog of NCBI NO: 37534760 NR Description: putative receptor-like protein kinase
  misc_feature (68)..(252): Homolog of NCBI NO: 7438434 NR Description: GTP-binding protein F28P10.180 - Arabidopsis
  misc_feature (59)..(254): Homolog of NCBI NO: 1370180 NR Description: RAB5B [Lotus japonicus]
  misc_feature (59)..(253): Homolog of NCBI NO: 7438400 NR Description: small GTP-binding protein - common ice plant
  misc_feature (59)..(257): Homolog of NCBI NO: 18410144 NR Description: Rab family GTP-binding protein (Ara6)
  misc_feature (59)..(257): Homolog of NCBI NO: 5931625 NR Description: rab5B [Oryza sativa (japonica cultivar-group)]
  misc_feature (59)..(257): Homolog of NCBI NO: 11992279 NR Description: small GTP-binding protein RAB5B [Oryza sativa]
RRHTEPWTGPTNELYPRLRASERANRGGQRNRRIDPSPPRRSPPLPGDFARTRPKASAMGCSSSVPARSTGGLNNINGSSSAADSNDLRAKLVLLGDSGVGKSCIVLRFVRGQFDPTSKVTVGASFLSQTLALEDSTIVKFEIWDTAGQERYAALAPLYYRGAAAAVVVYDITSPESFKKAQYWVKELQKHGSPGIVMVLVGNKADLHESRSVPSQEAQEYAEKNSMLFMETSAKTSDNINQVFEEIAKRLPKPTAS

SEQ ID NO: 51211 - protein, 199 aa, Glycine max
  peptide (1)..(199): Ceres Seq. ID no. 12608947
  misc_feature (33)..(195): Pfam Name: Ras family Pfam Description: Ras family
  misc_feature (28)..(197): Homolog of NCBI NO: 12311680 NR Description: GTP binding protein [Cichorium intybus x
  misc_feature (28)..(197): Homolog of NCBI NO: 12311684 NR Description: GTP binding protein [Cichorium intybus x
  misc_feature (6)..(92): Homolog of NCBI NO: 37534760 NR Description: putative receptor-like protein kinase
  misc_feature (93)..(187): Homolog of NCBI NO: 37534760 NR Description: putative receptor-like protein kinase
  misc_feature (10)..(194): Homolog of NCBI NO: 7438434 NR Description: GTP-binding protein F28P10.180 - Arabidopsis
  misc_feature (1)..(196): Homolog of NCBI NO: 1370180 NR Description: RAB5B [Lotus japonicus]
  misc_feature (1)..(195): Homolog of NCBI NO: 7438400 NR Description: small GTP-binding protein - common ice plant
  misc_feature (1)..(199): Homolog of NCBI NO: 18410144 NR Description: Rab family GTP-binding protein (Ara6)
  misc_feature (1)..(199): Homolog of NCBI NO: 5931625 NR Description: rab5B [Oryza sativa (japonica cultivar-group)]
  misc_feature (1)..(199): Homolog of NCBI NO: 11992279 NR Description: small GTP-binding protein RAB5B [Oryza sativa]
MGCSSSVPARSTGGLNNINGSSSAADSNDLRAKLVLLGDSGVGKSCIVLRFVRGQFDPTSKVTVGASFLSQTLALEDSTIVKFEIWDTAGQERYAALAPLYYRGAAAAVVVYDITSPESFKKAQYWVKELQKHGSPGIVMVLVGNKADLHESRSVPSQEAQEYAEKNSMLFMETSAKTSDNINQVFEEIAKRLPKPTAS

SEQ ID NO: 51212 - DNA, 1175 bp, Glycine max
  misc_feature (1)..(1175): Ceres Seq. ID no. 14311659
ctctcaaccacgagtgggatcgatcctcccgcgtaccaagccaccgactaacatggcagcgtctctccaagccgcggccacgctgatgccggccaagatcggcggccgggcctcctccgcgcggccgtcgtcgcacgtcgcccgggcgttcggcgttgacgctggcgccaggatcacctgctccctgcagtccgacatcagggaggtcgcaagcaagtgcgccgacgccgccaagatggccggcttcgccctcgccacctctgccctcctcgtctccggcgcgagcgcggagggggcgcccaagaggctgaccttcgacgagatccagagcaagacctacatggaggtgaagggtaccggcaccgcgaaccagtgcccgaccatcgacggcggcgtcgactccttccccttcaaggccggcaagtacgagatgaagaagttctgcctggagcccacctccttcaccgtcaaggccgagggcatccagaagaacgagccgccggccttccagaaaaccaagctcatgacccgtctcacctacacccttgacgagatggaaggcccgctcgaggtcggcgccgacggcaccctcaagttcgaggagaaggacggcatcgactacgcggccgtcaccgtgcagctccccggaggcgagcgagtgcccttcctcttcaccgtcaagcagctcgtcgctaccggcaagcccgagagcttcagcgggcccttcctcgtgcccagctacaggggttcgtctttcctcgacccaaagggccgtggtggctctactggctacgacaacgccgtggcgctacccgccggaggcagaggagacgaggaggagttggctaaggagaacgtgaagaacgcgtcctcgtccacgggcaacatcacgctcagcgtgaccaagagcaagccggagaccggcgaggtgatcggtgtcttcgagagcgtgcagccgtcagacaccgacctcggcgccaaggcgcccaaggatgtcaagatccagggtgtgtggtacgcgcagctcgagtctaactagagcagagcagaagtgaagatactcatcttgtgtgcatgcgtacgtgggttgatcggtggagaggaaacaatcgaggcaacaaatgtgtttgtgtgtgtatctagtaatctaaacccagggtgtcggtttatatttt

SEQ ID NO: 51213 - protein, 345 aa, Glycine max
  peptide (1)..(345): Ceres Seq. ID no. 14311660
  misc_feature (107)..(343): Pfam Name: Manganese-stabilising protein / photosystem II Pfam Description: Manganese-stabilising protein / photosystem II
  misc_feature (43)..(342): Homolog of NCBI NO: 7008029 NR Description: oxygen-evolving enhancer protein 1 precursor
  misc_feature (19)..(344): Homolog of NCBI NO: 100454 NR Description: photosystem II oxygen-evolving complex protein 1
  misc_feature (18)..(344): Homolog of NCBI NO: 131384 NR Description: Oxygen-evolving enhancer protein 1, chloroplast (OEE1) (33 kDa subunit of oxygen evolving system of photosystem
  misc_feature (18)..(344): Homolog of NCBI NO: 131385 NR Description: OXYGEN-EVOLVING ENHANCER PROTEIN 1, CHLOROPLAST (OEE1) (33 KDA SUBUNIT OF OXYGEN EVOLVING SYSTEM OF PHOTOSYSTEM
  misc_feature (18)..(344): Homolog of NCBI NO: 9229957 NR Description: oxygen evolving enhancer protein 1 precursor
  misc_feature (18)..(343): Homolog of NCBI NO: 30013657 NR Description: oxygen evolving complex 33 kDa photosystem II
  misc_feature (18)..(343): Homolog of NCBI NO: 11134054 NR Description: Oxygen-evolving enhancer protein 1, chloroplast (OEE1) (33 kDa subunit of oxygen evolving system of photosystem (OEC 33 kDa subunit) (33 kDa thylakoid membrane protein) kDa
  misc_feature (18)..(343): Homolog of NCBI NO: 12644171 NR Description: Oxygen-evolving enhancer protein 1, chloroplast (OEE1) (33 kDa subunit of oxygen evolving system of photosystem (OEC 33 kDa subunit) (33 kDa thylakoid membrane protein) protein
  misc_feature (18)..(343): Homolog of NCBI NO: 11133881 NR Description: Oxygen-evolving enhancer protein 1, chloroplast (OEE1) (33 kDa subunit of oxygen evolving system of photosystem (OEC 33 kDa subunit) (33 kDa thylakoid membrane protein) protein
  misc_feature (18)..(345): Homolog of NCBI NO: 131388 NR Description: Oxygen-evolving enhancer protein 1, chloroplast (OEE1) (33 kDa subunit of oxygen evolving system of photosystem
SQPRVGSILPRTKPPTNMAASLQAAATLMPAKIGGRASSARPSSHVARAFGVDAGARITCSLQSDIREVASKCADAAKMAGFALATSALLVSGASAEGAPKRLTFDEIQSKTYMEVKGTGTANQCPTIDGGVDSFPFKAGKYEMKKFCLEPTSFTVKAEGIQKNEPPAFQKTKLMTRLTYTLDEMEGPLEVGADGTLKFEEKDGIDYAAVTVQLPGGERVPFLFTVKQLVATGKPESFSGPFLVPSYRGSSFLDPKGRGGSTGYDNAVALPAGGRGDEEELAKENVKNASSSTGNITLSVTKSKPETGEVIGVFESVQPSDTDLGAKAPKDVKIQGVWYAQLESN

SEQ ID NO: 51214 - protein, 328 aa, Glycine max
  peptide (1)..(328): Ceres Seq. ID no. 14311661
  misc_feature (90)..(326): Pfam Name: Manganese-stabilising protein / photosystem II Pfam Description: Manganese-stabilising protein / photosystem II
  misc_feature (26)..(325): Homolog of NCBI NO: 7008029 NR Description: oxygen-evolving enhancer protein 1 precursor
  misc_feature (2)..(327): Homolog of NCBI NO: 100454 NR Description: photosystem II oxygen-evolving complex protein 1
  misc_feature (1)..(327): Homolog of NCBI NO: 131384 NR Description: Oxygen-evolving enhancer protein 1, chloroplast (OEE1) (33 kDa subunit of oxygen evolving system of photosystem
  misc_feature (1)..(327): Homolog of NCBI NO: 131385 NR Description: OXYGEN-EVOLVING ENHANCER PROTEIN 1, CHLOROPLAST (OEE1) (33 KDA SUBUNIT OF OXYGEN EVOLVING SYSTEM OF PHOTOSYSTEM
  misc_feature (1)..(327): Homolog of NCBI NO: 9229957 NR Description: oxygen evolving enhancer protein 1 precursor
  misc_feature (1)..(326): Homolog of NCBI NO: 30013657 NR Description: oxygen evolving complex 33 kDa photosystem II
  misc_feature (1)..(326): Homolog of NCBI NO: 11134054 NR Description: Oxygen-evolving enhancer protein 1, chloroplast (OEE1) (33 kDa subunit of oxygen evolving system of photosystem (OEC 33 kDa subunit) (33 kDa thylakoid membrane protein) kDa
  misc_feature (1)..(326): Homolog of NCBI NO: 12644171 NR Description: Oxygen-evolving enhancer protein 1, chloroplast (OEE1) (33 kDa subunit of oxygen evolving system of photosystem (OEC 33 kDa subunit) (33 kDa thylakoid membrane protein) protein
  misc_feature (1)..(326): Homolog of NCBI NO: 11133881 NR Description: Oxygen-evolving enhancer protein 1, chloroplast (OEE1) (33 kDa subunit of oxygen evolving system of photosystem (OEC 33 kDa subunit) (33 kDa thylakoid membrane protein) protein
  misc_feature (1)..(328): Homolog of NCBI NO: 131388 NR Description: Oxygen-evolving enhancer protein 1, chloroplast (OEE1) (33 kDa subunit of oxygen evolving system of photosystem
MAASLQAAATLMPAKIGGRASSARPSSHVARAFGVDAGARITCSLQSDIREVASKCADAAKMAGFALATSALLVSGASAEGAPKRLTFDEIQSKTYMEVKGTGTANQCPTIDGGVDSFPFKAGKYEMKKFCLEPTSFTVKAEGIQKNEPPAFQKTKLMTRLTYTLDEMEGPLEVGADGTLKFEEKDGIDYAAVTVQLPGGERVPFLFTVKQLVATGKPESFSGPFLVPSYRGSSFLDPKGRGGSTGYDNAVALPAGGRGDEEELAKENVKNASSSTGNITLSVTKSKPETGEVIGVFESVQPSDTDLGAKAPKDVKIQGVWYAQLESN

SEQ ID NO: 51215 - protein, 317 aa, Glycine max
  peptide (1)..(317): Ceres Seq. ID no. 14311662
  misc_feature (79)..(315): Pfam Name: Manganese-stabilising protein / photosystem II Pfam Description: Manganese-stabilising protein / photosystem II
  misc_feature (15)..(314): Homolog of NCBI NO: 7008029 NR Description: oxygen-evolving enhancer protein 1 precursor
  misc_feature (1)..(316): Homolog of NCBI NO: 100454 NR Description: photosystem II oxygen-evolving complex protein 1
  misc_feature (1)..(316): Homolog of NCBI NO: 131384 NR Description: Oxygen-evolving enhancer protein 1, chloroplast (OEE1) (33 kDa subunit of oxygen evolving system of photosystem
  misc_feature (1)..(316): Homolog of NCBI NO: 131385 NR Description: OXYGEN-EVOLVING ENHANCER PROTEIN 1, CHLOROPLAST (OEE1) (33 KDA SUBUNIT OF OXYGEN EVOLVING SYSTEM OF PHOTOSYSTEM
  misc_feature (1)..(316): Homolog of NCBI NO: 9229957 NR Description: oxygen evolving enhancer protein 1 precursor
  misc_feature (1)..(315): Homolog of NCBI NO: 30013657 NR Description: oxygen evolving complex 33 kDa photosystem II
  misc_feature (1)..(315): Homolog of NCBI NO: 11134054 NR Description: Oxygen-evolving enhancer protein 1, chloroplast (OEE1) (33 kDa subunit of oxygen evolving system of photosystem (OEC 33 kDa subunit) (33 kDa thylakoid membrane protein) kDa
  misc_feature (1)..(315): Homolog of NCBI NO: 12644171 NR Description: Oxygen-evolving enhancer protein 1, chloroplast (OEE1) (33 kDa subunit of oxygen evolving system of photosystem (OEC 33 kDa subunit) (33 kDa thylakoid membrane protein) protein
  misc_feature (1)..(315): Homolog of NCBI NO: 11133881 NR Description: Oxygen-evolving enhancer protein 1, chloroplast (OEE1) (33 kDa subunit of oxygen evolving system of photosystem (OEC 33 kDa subunit) (33 kDa thylakoid membrane protein) protein
  misc_feature (1)..(317): Homolog of NCBI NO: 131388 NR Description: Oxygen-evolving enhancer protein 1, chloroplast (OEE1) (33 kDa subunit of oxygen evolving system of photosystem
MPAKIGGRASSARPSSHVARAFGVDAGARITCSLQSDIREVASKCADAAKMAGFALATSALLVSGASAEGAPKRLTFDEIQSKTYMEVKGTGTANQCPTIDGGVDSFPFKAGKYEMKKFCLEPTSFTVKAEGIQKNEPPAFQKTKLMTRLTYTLDEMEGPLEVGADGTLKFEEKDGIDYAAVTVQLPGGERVPFLFTVKQLVATGKPESFSGPFLVPSYRGSSFLDPKGRGGSTGYDNAVALPAGGRGDEEELAKENVKNASSSTGNITLSVTKSKPETGEVIGVFESVQPSDTDLGAKAPKDVKIQGVWYAQLESN

SEQ ID NO: 51216 - DNA, 789 bp, Glycine max
  misc_feature (1)..(789): Ceres Seq. ID no. 15173015
accaaagcattccacaaaattcagcaagcaatccaacgcagtccaacccgaggagatcgaccgagctcgagatcagcgagcgagaatggcgggcatggtgttcggcttggatgccccgatgatggccgccctgcagcacctgctggacatcccggacggcgaggccggagcagccgccggcgagaagcagggcccgacgcgcgcctacgtccgcgacgcgcgcgccatggcggccacccccgccgacgtgaaggagctgccgggcgcgtacgcgttcgtggtggacatgccggggctcgggtccggcgacatcaaggtgcaggtggaggacgagcgggtgctggtgatcagcggcgagcggcggagggaggagaaggaggacgccaagtacctgcggatggagcgccgcatgggcaagctgatgcgcaagttcgtgctgccggagaacgccgacatggagaagatctccgccgcgtgccgcgacggcgtgctcaccgtgaccgtcgacaagctgccgccgcccgagcccaagaagcccaagaccatccaggtccaggtcgcctgagatgcatcgtgtgcgcgtcgaatcgaatcagagtgtgagtgggtagcgagtttcctgtgatgagtgatgggagtgtctgtcctttgatttcatctactagtagtatggttatctgagggagagggtgtgtactgtctgttcgtgcgtactggtggttgtttgatgtttcgttaatggaaatggggatgatctccggcctcgcctgaataaaacatgcgaacctc

SEQ ID NO: 51217 - protein, 200 aa, Glycine max
  peptide (1)..(200): Ceres Seq. ID no. 15173016
  misc_feature (20)..(179): Homolog of NCBI NO: 27804837 NR Description: unknown [Myxococcus xanthus]
TKAFHKIQQAIQRSPTRGDRPSSRSASENGGHGVRLGCPDDGRPAAPAGHPGRRGRSSRRREAGPDARLRPRRARHGGHPRRREGAAGRVRVRGGHAGARVRRHQGAGGGRAGAGDQRRAAEGGEGGRQVPADGAPHGQADAQVRAAGERRHGEDLRRVPRRRAHRDRRQAAAARAQEAQDHPGPGRLRCIVCASNRIRV

SEQ ID NO: 51218 - protein, 187 aa, Glycine max
  peptide (1)..(187): Ceres Seq. ID no. 15173017
  misc_feature (33)..(187): Homolog of NCBI NO: 5257560 NR Description: cytosolic class II low molecular weight heat
  misc_feature (29)..(187): Homolog of NCBI NO: 729762 NR Description: 17.0 KD CLASS II HEAT SHOCK PROTEIN (HSP 18)
  misc_feature (2)..(187): Homolog of NCBI NO: 34906270 NR Description: putative heat shock protein, 18K - maize
  misc_feature (29)..(187): Homolog of NCBI NO: 123553 NR Description: 17.8 KD CLASS II HEAT SHOCK PROTEIN
  misc_feature (29)..(187): Homolog of NCBI NO: 123549 NR Description: 17.5 KD CLASS II HEAT SHOCK PROTEIN
  misc_feature (29)..(187): Homolog of NCBI NO: 14009833 NR Description: small heat shock protein HSP17.8 [Triticum
  misc_feature (29)..(187): Homolog of NCBI NO: 100790 NR Description: heat shock protein 17.3 - wheat
PKHSTKFSKQSNAVQPEEIDRARDQRARMAGMVFGLDAPMMAALQHLLDIPDGEAGAAAGEKQGPTRAYVRDARAMAATPADVKELPGAYAFVVDMPGLGSGDIKVQVEDERVLVISGERRREEKEDAKYLRMERRMGKLMRKFVLPENADMEKISAACRDGVLTVTVDKLPPPEPKKPKTIQVQVA

SEQ ID NO: 51219 - protein, 159 aa, Glycine max
  peptide (1)..(159): Ceres Seq. ID no. 15173018
  misc_feature (5)..(159): Homolog of NCBI NO: 5257560 NR Description: cytosolic class II low molecular weight heat
  misc_feature (1)..(159): Homolog of NCBI NO: 729762 NR Description: 17.0 KD CLASS II HEAT SHOCK PROTEIN (HSP 18)
  misc_feature (1)..(159): Homolog of NCBI NO: 34906270 NR Description: putative heat shock protein, 18K - maize
  misc_feature (1)..(159): Homolog of NCBI NO: 123553 NR Description: 17.8 KD CLASS II HEAT SHOCK PROTEIN
  misc_feature (1)..(159): Homolog of NCBI NO: 123549 NR Description: 17.5 KD CLASS II HEAT SHOCK PROTEIN
  misc_feature (1)..(159): Homolog of NCBI NO: 14009833 NR Description: small heat shock protein HSP17.8 [Triticum
  misc_feature (1)..(159): Homolog of NCBI NO: 100790 NR Description: heat shock protein 17.3 - wheat
MAGMVFGLDAPMMAALQHLLDIPDGEAGAAAGEKQGPTRAYVRDARAMAATPADVKELPGAYAFVVDMPGLGSGDIKVQVEDERVLVISGERRREEKEDAKYLRMERRMGKLMRKFVLPENADMEKISAACRDGVLTVTVDKLPPPEPKKPKTIQVQVA

SEQ ID NO: 51220 - DNA, 734 bp, Glycine max
  misc_feature (1)..(734): Ceres Seq. ID no. 13594573
gtgattagatccaggtagccggctttgccatttccgcctctataaatgccgccctacgctctcgtgcacagcaaaacccaacggaactataactacagtcactctgctccctcactcaacctgtcccccacacaccacacagagagacgcagagaagcagcaggagggtgatggctatggctcagggaagaggcagtgcggcgcagggcttcgccctcggcttgctagtgctgtgcctcctcctcggcgccgacaccgccggcgccgccacctacaacgtcgactggtcgttcgcctccggcagctggcccatcggcaagagcttccgcgcaggggacgtcctcgttttcagctacaacccggccgtgcacaacgtggtggcggtggacgccggcggctacaacagctgccggggctccggcgcgacgcacacctacacctcggggagcgaccacgtcccgctcgtccccgggacgaactacttcatctgcagcctcagcagccactgcgggctcgggatgaagatggccgtcactgcaaactgaagctagctgcagcttctggtttcaagaaaagcgagctgcgactgcgatgccatctgtgcgcatgtgaaaacatcaataaagtgctgtggaactcagtgactcctagtatgcgatagtgtacgccccgtgtgttgtactgtatccctgagttgttaacatgacacagaagccagcagtgtgcaccaattg

SEQ ID NO: 51221 - protein, 124 aa, Glycine max
  peptide (1)..(124): Ceres Seq. ID no. 13594574
  misc_feature (39)..(117): Pfam Name: Plastocyanin-like domain Pfam Description: Plastocyanin-like domain
  misc_feature (39)..(123): Homolog of NCBI NO: 2094888 NR Description: Cucumber Basic Protein, A Blue Copper Protein
  misc_feature (18)..(124): Homolog of NCBI NO: 7670834 NR Description: plantacyanin [Lycopersicon esculentum]
  misc_feature (3)..(123): Homolog of NCBI NO: 3860333 NR Description: basic blue copper protein [Cicer arietinum]
  misc_feature (6)..(123): Homolog of NCBI NO: 27573337 NR Description: putative basic blue copper protein
  misc_feature (3)..(123): Homolog of NCBI NO: 15227048 NR Description: plastocyanin-like domain containing protein
  misc_feature (3)..(123): Homolog of NCBI NO: 21536649 NR Description: putative basic blue protein plantacyanin
  misc_feature (3)..(123): Homolog of NCBI NO: 7430872 NR Description: plantacyanin precursor [validated] - spinach
  misc_feature (3)..(123): Homolog of NCBI NO: 13702832 NR Description: putative disease resistance protein [Oryza sativa]
  misc_feature (3)..(123): Homolog of NCBI NO: 13702826 NR Description: putative basic protein [Oryza sativa]
  misc_feature (3)..(123): Homolog of NCBI NO: 40288370 NR Description: chemocyanin [Lilium longiflorum]
MAMAQGRGSAAQGFALGLLVLCLLLGADTAGAATYNVDWSFASGSWPIGKSFRAGDVLVFSYNPAVHNVVAVDAGGYNSCRGSGATHTYTSGSDHVPLVPGTNYFICSLSSHCGLGMKMAVTAN

SEQ ID NO: 51222 - protein, 122 aa, Glycine max
  peptide (1)..(122): Ceres Seq. ID no. 13594575
  misc_feature (37)..(115): Pfam Name: Plastocyanin-like domain Pfam Description: Plastocyanin-like domain
  misc_feature (37)..(121): Homolog of NCBI NO: 2094888 NR Description: Cucumber Basic Protein, A Blue Copper Protein
  misc_feature (16)..(122): Homolog of NCBI NO: 7670834 NR Description: plantacyanin [Lycopersicon esculentum]
  misc_feature (1)..(121): Homolog of NCBI NO: 3860333 NR Description: basic blue copper protein [Cicer arietinum]
  misc_feature (4)..(121): Homolog of NCBI NO: 27573337 NR Description: putative basic blue copper protein
  misc_feature (1)..(121): Homolog of NCBI NO: 15227048 NR Description: plastocyanin-like domain containing protein
  misc_feature (1)..(121): Homolog of NCBI NO: 21536649 NR Description: putative basic blue protein plantacyanin
  misc_feature (1)..(121): Homolog of NCBI NO: 7430872 NR Description: plantacyanin precursor [validated] - spinach
  misc_feature (1)..(121): Homolog of NCBI NO: 13702832 NR Description: putative disease resistance protein [Oryza sativa]
  misc_feature (1)..(121): Homolog of NCBI NO: 13702826 NR Description: putative basic protein [Oryza sativa]
  misc_feature (1)..(121): Homolog of NCBI NO: 40288370 NR Description: chemocyanin [Lilium longiflorum]
MAQGRGSAAQGFALGLLVLCLLLGADTAGAATYNVDWSFASGSWPIGKSFRAGDVLVFSYNPAVHNVVAVDAGGYNSCRGSGATHTYTSGSDHVPLVPGTNYFICSLSSHCGLGMKMAVTAN

SEQ ID NO: 51223 - DNA, 1345 bp, Glycine max
  misc_feature (1)..(1345): Ceres Seq. ID no. 13638574
gttttttccgtccccttccttcgagcgtcgtctgcgagagactgcaagtgactgcctccgtgtgcgggtggtgtctgggagcggggatggcgacgcacttcgtgctcaacaccggcgccaagatcccctccgtggggctcggcacctggcagtccgaccccggcatcgtcggcgaggccgtctacgccgccgtcaaggcggggtaccggcacatcgactgcgccagggcctacaacaacgagaaggaggtgggtttggctctgaagaagctgtttgaagagagtgtagtcaagcgtgaggatctgtttatcacctctaagctatggtgtggtcatcatgccccagaagatgtgcctgaggcacttggggattctctcgatgacttgcagcttgactacttggatctttaccttatccattggccatttagagtcaggaagggaacaagcattggcaaccctgaaaacttcttaccacctgacatcccagctacatggggagcaatggagaagttacatgatgctggcaaagctcgtgcaattggtgtgagtaacttcgcgtcgaagaaattgggtgacttgcttgctgtagctcgcatacctccggctgttgaccaggtggagtgccatcctggttggcagcaatctaaactccataccttttgtcagtcggccggtgttcacctctctgcgtactcaccactaggttcgcctggttcaacatggatgaatggtaatgtcctcaaagaacccgtcgtcctctcaattgcagagaagcttggcaaaactcctgcacaagtggcgttgcgctggaacattcagatgggtcacagtgtactgccaaagagcgtgagtgaagaacggataaagcagaaccttgctgtttatgactggtctattccagaagacttgcttgcaaagttctctgagattaagcaggccaggcttctcatgggcaacttcatcgtcaacaaagacagcgtttacaagacccacgatgagctctgggacggcgaaatctaggacggctcctgtcgtggctgggagcagggcgccttactagtgtcagtcacttgttatgtatcgtcaaactgtaagcttaagagatgtatggtggtttagccccactgtgggaggaactcttcagtagactgcatggatttgcccctttaggtatggattttctgctaaacccgcgtgttgccaatggaggcatgaacttatcctagcttgttcctgcgactgggatcacctgttctgtaccgattgttggtttgctggtgtaattgtgttcctccaaagaagttgctccacacatgataataaagctggggccgtttgtttgc

SEQ ID NO: 51224 - protein, 339 aa, Glycine max
  peptide (1)..(339): Ceres Seq. ID no. 13638575
  misc_feature (29)..(339): Homolog of NCBI NO: 34908284 NR Description: putative aldose reductase
  misc_feature (33)..(339): Homolog of NCBI NO: 7431112 NR Description: abscisic acid activated protein - alfalfa
  misc_feature (27)..(314): Homolog of NCBI NO: 7431114 NR Description: aldehyde dehydrogenase homolog At2g37770 -
  misc_feature (312)..(339): Homolog of NCBI NO: 25283479 NR Description: probable alcohol dehydrogenase [imported] -
  misc_feature (33)..(313): Homolog of NCBI NO: 25283479 NR Description: probable alcohol dehydrogenase [imported] -
  misc_feature (37)..(339): Homolog of NCBI NO: 28393400 NR Description: putative aldo/keto reductase [Arabidopsis
  misc_feature (33)..(339): Homolog of NCBI NO: 30687261 NR Description: aldo/keto reductase family [Arabidopsis thaliana]
  misc_feature (27)..(339): Homolog of NCBI NO: 30687247 NR Description: aldo/keto reductase family [Arabidopsis thaliana]
  misc_feature (29)..(339): Homolog of NCBI NO: 34908276 NR Description: putative aldose reductase
  misc_feature (29)..(339): Homolog of NCBI NO: 34908280 NR Description: putative aldose reductase
FFRPLPSSVVCERLQVTASVCGWCLGAGMATHFVLNTGAKIPSVGLGTWQSDPGIVGEAVYAAVKAGYRHIDCARAYNNEKEVGLALKKLFEESVVKREDLFITSKLWCGHHAPEDVPEALGDSLDDLQLDYLDLYLIHWPFRVRKGTSIGNPENFLPPDIPATWGAMEKLHDAGKARAIGVSNFASKKLGDLLAVARIPPAVDQVECHPGWQQSKLHTFCQSAGVHLSAYSPLGSPGSTWMNGNVLKEPVVLSIAEKLGKTPAQVALRWNIQMGHSVLPKSVSEERIKQNLAVYDWSIPEDLLAKFSEIKQARLLMGNFIVNKDSVYKTHDELWDGEI

SEQ ID NO: 51225 - protein, 311 aa, Glycine max
  peptide (1)..(311): Ceres Seq. ID no. 13638576
  misc_feature (1)..(311): Homolog of NCBI NO: 34908284 NR Description: putative aldose reductase
  misc_feature (5)..(311): Homolog of NCBI NO: 7431112 NR Description: abscisic acid activated protein - alfalfa
  misc_feature (1)..(286): Homolog of NCBI NO: 7431114 NR Description: aldehyde dehydrogenase homolog At2g37770 -
  misc_feature (284)..(311): Homolog of NCBI NO: 25283479 NR Description: probable alcohol dehydrogenase [imported] -
  misc_feature (5)..(285): Homolog of NCBI NO: 25283479 NR Description: probable alcohol dehydrogenase [imported] -
  misc_feature (9)..(311): Homolog of NCBI NO: 28393400 NR Description: putative aldo/keto reductase [Arabidopsis
  misc_feature (5)..(311): Homolog of NCBI NO: 30687261 NR Description: aldo/keto reductase family [Arabidopsis thaliana]
  misc_feature (1)..(311): Homolog of NCBI NO: 30687247 NR Description: aldo/keto reductase family [Arabidopsis thaliana]
  misc_feature (1)..(311): Homolog of NCBI NO: 34908276 NR Description: putative aldose reductase
  misc_feature (1)..(311): Homolog of NCBI NO: 34908280 NR Description: putative aldose reductase
MATHFVLNTGAKIPSVGLGTWQSDPGIVGEAVYAAVKAGYRHIDCARAYNNEKEVGLALKKLFEESVVKREDLFITSKLWCGHHAPEDVPEALGDSLDDLQLDYLDLYLIHWPFRVRKGTSIGNPENFLPPDIPATWGAMEKLHDAGKARAIGVSNFASKKLGDLLAVARIPPAVDQVECHPGWQQSKLHTFCQSAGVHLSAYSPLGSPGSTWMNGNVLKEPVVLSIAEKLGKTPAQVALRWNIQMGHSVLPKSVSEERIKQNLAVYDWSIPEDLLAKFSEIKQARLLMGNFIVNKDSVYKTHDELWDGEI

SEQ ID NO: 51226 - protein, 172 aa, Glycine max
  peptide (1)..(172): Ceres Seq. ID no. 13638577
  misc_feature (1)..(172): Homolog of NCBI NO: 34908284 NR Description: putative aldose reductase
  misc_feature (1)..(172): Homolog of NCBI NO: 7431112 NR Description: abscisic acid activated protein - alfalfa
  misc_feature (1)..(147): Homolog of NCBI NO: 7431114 NR Description: aldehyde dehydrogenase homolog At2g37770 -
  misc_feature (145)..(172): Homolog of NCBI NO: 25283479 NR Description: probable alcohol dehydrogenase [imported] -
  misc_feature (1)..(146): Homolog of NCBI NO: 25283479 NR Description: probable alcohol dehydrogenase [imported] -
  misc_feature (1)..(172): Homolog of NCBI NO: 28393400 NR Description: putative aldo/keto reductase [Arabidopsis
  misc_feature (1)..(172): Homolog of NCBI NO: 30687261 NR Description: aldo/keto reductase family [Arabidopsis thaliana]
  misc_feature (1)..(172): Homolog of NCBI NO: 30687247 NR Description: aldo/keto reductase family [Arabidopsis thaliana]
  misc_feature (1)..(172): Homolog of NCBI NO: 34908276 NR Description: putative aldose reductase
  misc_feature (1)..(172): Homolog of NCBI NO: 34908280 NR Description: putative aldose reductase
MEKLHDAGKARAIGVSNFASKKLGDLLAVARIPPAVDQVECHPGWQQSKLHTFCQSAGVHLSAYSPLGSPGSTWMNGNVLKEPVVLSIAEKLGKTPAQVALRWNIQMGHSVLPKSVSEERIKQNLAVYDWSIPEDLLAKFSEIKQARLLMGNFIVNKDSVYKTHDELWDGEI

SEQ ID NO: 51227 - DNA, 708 bp, Glycine max
  misc_feature (1)..(708): Ceres Seq. ID no. 12608953
accaatctctcagagcatcctctgccccccacaatctcacctactccggccatctctccggcgaccaccgtagtaccaccctacctccccacccaaccctagcgatggcgacaacggcagccggcggcgggaggggcaagccgaagggcagcaagtcggtgtcgcggtcggtgaaggcgggcctgcagttccccgtcggccgcgtcgcccggcacctcaaggtcggccgctacgcgaagcgcgtgggcgcgggcgcccccgtctacctctgcgccgtcctcgagtacctcgccgccgaggccctggagctggccggcaacgcggcgcgcgacaacaagaagacccggatctcgccgcgccacatccagctcgccgtccgcaacgacgaggagctcagccggctgctcggcggcgtcaccatcgccgccggcggcgtcctgcccaacatccactcggtgctcctccccaagaaggtcggcaagggcgccggcaccggcgggtccgcatcccagtcccaggagttttagagtaccagagatctgagtatggcgtggtggtgtttttaggttggtagattagttcttcttggccaatgttcttgttggttcatgtatcgagggtggatctggttggaatggaatgcatctggttctgctgtctgtgttttgtccatggtaatctgaatgaaacggattttgttttgctctg

SEQ ID NO: 51228 - protein, 174 aa, Glycine max
  peptide (1)..(174): Ceres Seq. ID no. 12608954
  misc_feature (42)..(157): Pfam Name: Core histone H2A/H2B/H3/H4 Pfam Description: Core histone H2A/H2B/H3/H4
  misc_feature (40)..(169): Homolog of NCBI NO: 121985 NR Description: Histone H2A-IV
  misc_feature (40)..(169): Homolog of NCBI NO: 121981 NR Description: Histone H2A-III
  misc_feature (40)..(164): Homolog of NCBI NO: 1708102 NR Description: Histone H2A
  misc_feature (40)..(168): Homolog of NCBI NO: 2118986 NR Description: histone H2A (clone CH-IV) - Chlamydomonas
  misc_feature (42)..(170): Homolog of NCBI NO: 21593507 NR Description: putative histone H2A [Arabidopsis thaliana]
  misc_feature (35)..(170): Homolog of NCBI NO: 21321778 NR Description: unknown protein [Oryza sativa (japonica
  misc_feature (42)..(170): Homolog of NCBI NO: 15223948 NR Description: putative histone H2A
  misc_feature (42)..(170): Homolog of NCBI NO: 15221875 NR Description: histone H2A, putative
  misc_feature (35)..(170): Homolog of NCBI NO: 462234 NR Description: Histone H2A
  misc_feature (35)..(170): Homolog of NCBI NO: 15214035 NR Description: Histone H2A
QSLRASSAPHNLTYSGHLSGDHRSTTLPPHPTLAMATTAAGGGRGKPKGSKSVSRSVKAGLQFPVGRVARHLKVGRYAKRVGAGAPVYLCAVLEYLAAEALELAGNAARDNKKTRISPRHIQLAVRNDEELSRLLGGVTIAAGGVLPNIHSVLLPKKVGKGAGTGGSASQSQEF

SEQ ID NO: 51229 - protein, 140 aa, Glycine max
  peptide (1)..(140): Ceres Seq. ID no. 12608955
  misc_feature (8)..(123): Pfam Name: Core histone H2A/H2B/H3/H4 Pfam Description: Core histone H2A/H2B/H3/H4
  misc_feature (6)..(135): Homolog of NCBI NO: 121985 NR Description: Histone H2A-IV
  misc_feature (6)..(135): Homolog of NCBI NO: 121981 NR Description: Histone H2A-III
  misc_feature (6)..(130): Homolog of NCBI NO: 1708102 NR Description: Histone H2A
  misc_feature (6)..(134): Homolog of NCBI NO: 2118986 NR Description: histone H2A (clone CH-IV) - Chlamydomonas
  misc_feature (8)..(136): Homolog of NCBI NO: 21593507 NR Description: putative histone H2A [Arabidopsis thaliana]
  misc_feature (1)..(136): Homolog of NCBI NO: 21321778 NR Description: unknown protein [Oryza sativa (japonica
  misc_feature (8)..(136): Homolog of NCBI NO: 15223948 NR Description: putative histone H2A
  misc_feature (8)..(136): Homolog of NCBI NO: 15221875 NR Description: histone H2A, putative
  misc_feature (1)..(136): Homolog of NCBI NO: 462234 NR Description: Histone H2A
  misc_feature (1)..(136): Homolog of NCBI NO: 15214035 NR Description: Histone H2A
MATTAAGGGRGKPKGSKSVSRSVKAGLQFPVGRVARHLKVGRYAKRVGAGAPVYLCAVLEYLAAEALELAGNAARDNKKTRISPRHIQLAVRNDEELSRLLGGVTIAAGGVLPNIHSVLLPKKVGKGAGTGGSASQSQEF

SEQ ID NO: 51230 - DNA, 1167 bp, Glycine max
  misc_feature (1)..(1167): Ceres Seq. ID no. 14311467
atttttagtcttttgactcatatgaaccctaattttgggttgaattactctctctctctctctctttccttaaaattagatttcaaagttctcaccttttgtcttcctcgtatctcgcagcctcgagggcttccgacattcccagcgattatgctcgaatccgaagacaaagggacataaaaaaaagcaactctttcaagttgagtgttgtgtggggatggatcaaatagtttcaggagaagaagaagaggagcttggtgttgacattgaggaaggtgttgggttcaatgagacacaagatataacaacaaccaatcaagaagatgttcttgatcaggtttggagtgggcggttgagttatgaccacaggtctgaaaatcttactgatgatgatgctgatgatggtctgataaaccccttgatgggaggagatgggaagcagaggagagaaagaagcagccaaagtctggacctttcggatagaaaattcgatagtgtcaaggttaagaagacgaggaagccttcttccaagcctcctagacctccgaaaggtcctttattgactgcaaacgaccagaagctgatgagggagatcgcggagctcgctatgaggaagcgtgctaggattgagcgtatgagaaggatgaaagcagcaaagtcttcttctccttgcagtagcattttggctatgatagtgactgttatcttcttcgtcttccttatctttcaagggttcttcacaagcaatgcaagtttgagttcaagcaattctccagcaccagacaataaccgtatggtctctgttcagttcttcaatgagtttgctcctcgtgagagaatcgatcccagcccaactacgaggttcaggtataagagagtctcgggtgcagacaatgaagagaacacaagagaagttaccagatgagttagttctcttgggattctttgtaatgtaaaaccaaaaaacagtacttatgttttgttttattcttgacatcattctattgttccttttgctctgttcttgtgctcacatgtgtctctctgcgtgtatatatatgttgttatggatgaatctcgaaaccttctttggggttaggctttgtacagcaactgagtcttatgtcctaaaacaataatgctgatgaagtcatgatgattgatggc

SEQ ID NO: 51231 - protein, 235 aa, Glycine max
  peptide (1)..(235): Ceres Seq. ID no. 14311468
  misc_feature (93)..(232): Homolog of NCBI NO: 15228970 NR Description: expressed protein [Arabidopsis thaliana]
  misc_feature (1)..(207): Homolog of NCBI NO: 30678287 NR Description: expressed protein [Arabidopsis thaliana]
  misc_feature (1)..(235): Homolog of NCBI NO: 25372617 NR Description: T6A9.7 protein - Arabidopsis thaliana
  misc_feature (1)..(235): Homolog of NCBI NO: 15235188 NR Description: PITSLRE protein kinase family [Arabidopsis
MDQIVSGEEEEELGVDIEEGVGFNETQDITTTNQEDVLDQVWSGRLSYDHRSENLTDDDADDGLINPLMGGDGKQRRERSSQSLDLSDRKFDSVKVKKTRKPSSKPPRPPKGPLLTANDQKLMREIAELAMRKRARIERMRRMKAAKSSSPCSSILAMIVTVIFFVFLIFQGFFTSNASLSSSNSPAPDNNRMVSVQFFNEFAPRERIDPSPTTRFRYKRVSGADNEENTREVTR

SEQ ID NO: 51232 - protein, 167 aa, Glycine max
  peptide (1)..(167): Ceres Seq. ID no. 14311469
  misc_feature (25)..(164): Homolog of NCBI NO: 15228970 NR Description: expressed protein [Arabidopsis thaliana]
  misc_feature (1)..(139): Homolog of NCBI NO: 30678287 NR Description: expressed protein [Arabidopsis thaliana]
  misc_feature (1)..(167): Homolog of NCBI NO: 25372617 NR Description: T6A9.7 protein - Arabidopsis thaliana
  misc_feature (1)..(167): Homolog of NCBI NO: 15235188 NR Description: PITSLRE protein kinase family [Arabidopsis
MGGDGKQRRERSSQSLDLSDRKFDSVKVKKTRKPSSKPPRPPKGPLLTANDQKLMREIAELAMRKRARIERMRRMKAAKSSSPCSSILAMIVTVIFFVFLIFQGFFTSNASLSSSNSPAPDNNRMVSVQFFNEFAPRERIDPSPTTRFRYKRVSGADNEENTREVTR

SEQ ID NO: 51233 - DNA, 897 bp, Glycine max
  misc_feature (1)..(897): Ceres Seq. ID no. 13594465
tccgctaaaaccctagcccgacgccacgcagcaaccttctagaaccttctccacgatggcgttcctccgagctctccggcgagccctcccgccgctctactctccggcggcgcctctttcccggcgcgcaccaggtcctcctgcgctccctccccgtcctctccggctcctggatccgatcgggttccggccgttctccgccgcggccgccaccgccaccgccgtcgcgcgggcgccggaaatgggggccagcctcttcagagggctcacggagaccaggttccccaagcggcgcccggggttcgtgtcccggcgcaagagggccagcctgcgacccaaaggtccgcactactgggtgaagtgcacgccgggggagcctatcccttcgagccagccgaacaagggcagcgtgcaggggaggaaggagaagaagcggatcaagcagcgcaaggacttcatcatggctgagaagaggaagcgcaaagcacagtattctgttgctgtgaagaggaaggaggcagaacggacagaaagaaagatggctgcagtggcaagagaccgggcatgggtggaaaggttggcagagctaaagcagatagaggcagaaaagaaagctgcaatggcttgaggagctcctctggaaacggcaaggcgtctaactcgtttctgctgccccgtttcgttcctatttttttccagatagcttgaatatgttctgtgctacagctgtcaacaatgccacaacccttctgggtgaacctttggctgtacccgtcccctcaacagccatcccaaagtggcagatttgttttgatatgatgttctcaaatttgtcttcattgtaatgagatattggttctgtgttgtatttagaataaaccaaatgatcttagttgc

SEQ ID NO: 51234 - protein, 190 aa, Glycine max
  peptide (1)..(190): Ceres Seq. ID no. 15221368
  misc_feature (71)..(190): Homolog of NCBI NO: 21553452 NR Description: unknown [Arabidopsis thaliana]
  misc_feature (71)..(190): Homolog of NCBI NO: 18409234 NR Description: expressed protein [Arabidopsis thaliana]
MAFLRALRRALPPLYSPAAPLSRRAPGPPALPPRPLRLLDPIGFRPFSAAAATATAVARAPEMGASLFRGLTETRFPKRRPGFVSRRKRASLRPKGPHYWVKCTPGEPIPSSQPNKGSVQGRKEKKRIKQRKDFIMAEKRKRKAQYSVAVKRKEAERTERKMAAVARDRAWVERLAELKQIEAEKKAAMA

SEQ ID NO: 51235 - protein, 128 aa, Glycine max
  peptide (1)..(128): Ceres Seq. ID no. 15221369
  misc_feature (9)..(128): Homolog of NCBI NO: 21553452 NR Description: unknown [Arabidopsis thaliana]
  misc_feature (9)..(128): Homolog of NCBI NO: 18409234 NR Description: expressed protein [Arabidopsis thaliana]
MGASLFRGLTETRFPKRRPGFVSRRKRASLRPKGPHYWVKCTPGEPIPSSQPNKGSVQGRKEKKRIKQRKDFIMAEKRKRKAQYSVAVKRKEAERTERKMAAVARDRAWVERLAELKQIEAEKKAAMA

SEQ ID NO: 51236 - DNA, 1111 bp, Glycine max
  misc_feature (1)..(1111): Ceres Seq. ID no. 13594544
acccccccccagctccgcctcccttctgctctacccgcttctaacaaacgcgcgcacactccctctcgctctcgcggcgcaggtcggaggctaaaaccctagacacaggcgactatgacggcgccggcggacaaggggaagaaggccaagaccgacaccgacgtcggcgaggagaacgagcagatcgacggtgccctcgtcctctccatcgagaggctccaggagatccaggacgagctcgagaaggttaatgaagaagcaagtgataaggttttggaggttgagcagaagtacagtgagattcgcagacctgtctatcttcggaggtgtgacatcatcaaaacaattccagacttttggctgacagcgtttctaagtcatcctcttctcagtgagcttttgactgaagaggatcaaaagatgttcaagtacttggaatctgttgatgttgatgattctaaagatgtcaagtcaggctactccatcactcttaacttctctgagaatccgtactttgaagacagaaagcttaccaagtcatatgcctttgctgatgatggaacaaccacaataaatgccacttccattaagtggaaggagggaatggaaattaatgggaatgccattaagaagaaaggaagcaagcgcccattggttgaagaaagtttcttcacctggttcactgatacagagcacaagagccttgctgatggggtgcaagatgaggtggcagagatcatcaaagaagatttgtggccgaacccattgaaatatttcaacaatgaggttgaagagtttgaaggagatgacgaggatgaagagggatctgatggggaggatgctgaggaggacgacgacgaggagaactgaggccttggttggctttggtgggtcctgatgaatcgttgtctgcagatgctatgggtgtctgaagggtgaagtcatgtgaccgtttcgagactgtttcgttttgtgtttgacttagctggaacttagccttaggagctgttgaatgcgttatcgagtacgtactgtcgtattttcgacttaaaggagacctcgatatatcataatctggcgatatctatgacaacaatttaacttgctggcg

SEQ ID NO: 51237 - protein, 251 aa, Glycine max
  peptide (1)..(251): Ceres Seq. ID no. 13594545
  misc_feature (32)..(227): Pfam Name: Nucleosome assembly protein (NAP) Pfam Description: Nucleosome assembly protein (NAP)
  misc_feature (1)..(250): Homolog of NCBI NO: 28279779 NR Description: Similar to SET translocation (myeloid
  misc_feature (1)..(250): Homolog of NCBI NO: 2253411 NR Description: PP2A inhibitor [Tetraodon fluviatilis]
  misc_feature (1)..(250): Homolog of NCBI NO: 6006268 NR Description: TAF-Ibeta1 [Xenopus laevis]
  misc_feature (6)..(229): Homolog of NCBI NO: 26451105 NR Description: unknown protein [Arabidopsis thaliana]
  misc_feature (5)..(250): Homolog of NCBI NO: 15221298 NR Description: SET protein, phospatase 2A inhibitor -related
  misc_feature (6)..(251): Homolog of NCBI NO: 18394656 NR Description: expressed protein [Arabidopsis thaliana]
  misc_feature (6)..(251): Homolog of NCBI NO: 25354177 NR Description: hypothetical protein F6A14.10 [imported] -
  misc_feature (1)..(251): Homolog of NCBI NO: 21739223 NR Description: OSJNBa0072F16.2 [Oryza sativa (japonica
  misc_feature (1)..(251): Homolog of NCBI NO: 14550112 NR Description: nucleosome/chromatin assembly factor A [Zea mays]
  misc_feature (1)..(251): Homolog of NCBI NO: 14550110 NR Description: nucleosome/chromatin assembly factor A [Zea mays]
MTAPADKGKKAKTDTDVGEENEQIDGALVLSIERLQEIQDELEKVNEEASDKVLEVEQKYSEIRRPVYLRRCDIIKTIPDFWLTAFLSHPLLSELLTEEDQKMFKYLESVDVDDSKDVKSGYSITLNFSENPYFEDRKLTKSYAFADDGTTTINATSIKWKEGMEINGNAIKKKGSKRPLVEESFFTWFTDTEHKSLADGVQDEVAEIIKEDLWPNPLKYFNNEVEEFEGDDEDEEGSDGEDAEEDDDEEN

SEQ ID NO: 51238 - protein, 149 aa, Glycine max
  peptide (1)..(149): Ceres Seq. ID no. 13594546
  misc_feature (1)..(125): Pfam Name: Nucleosome assembly protein (NAP) Pfam Description: Nucleosome assembly protein (NAP)
  misc_feature (1)..(148): Homolog of NCBI NO: 28279779 NR Description: Similar to SET translocation (myeloid
  misc_feature (1)..(148): Homolog of NCBI NO: 2253411 NR Description: PP2A inhibitor [Tetraodon fluviatilis]
  misc_feature (1)..(148): Homolog of NCBI NO: 6006268 NR Description: TAF-Ibeta1 [Xenopus laevis]
  misc_feature (1)..(127): Homolog of NCBI NO: 26451105 NR Description: unknown protein [Arabidopsis thaliana]
  misc_feature (1)..(148): Homolog of NCBI NO: 15221298 NR Description: SET protein, phospatase 2A inhibitor -related
  misc_feature (1)..(149): Homolog of NCBI NO: 18394656 NR Description: expressed protein [Arabidopsis thaliana]
  misc_feature (1)..(149): Homolog of NCBI NO: 25354177 NR Description: hypothetical protein F6A14.10 [imported] -
  misc_feature (1)..(149): Homolog of NCBI NO: 21739223 NR Description: OSJNBa0072F16.2 [Oryza sativa (japonica
  misc_feature (1)..(149): Homolog of NCBI NO: 14550112 NR Description: nucleosome/chromatin assembly factor A [Zea mays]
  misc_feature (1)..(149): Homolog of NCBI NO: 14550110 NR Description: nucleosome/chromatin assembly factor A [Zea mays]
MFKYLESVDVDDSKDVKSGYSITLNFSENPYFEDRKLTKSYAFADDGTTTINATSIKWKEGMEINGNAIKKKGSKRPLVEESFFTWFTDTEHKSLADGVQDEVAEIIKEDLWPNPLKYFNNEVEEFEGDDEDEEGSDGEDAEEDDDEEN

SEQ ID NO: 51239 - DNA, 875 bp, Glycine max
  misc_feature (1)..(875): Ceres Seq. ID no. 14311693
acagcgtcaccggcgaactcaaagcaatggacaccgctcccgctccccttaagccgtccttgtccaagaagccctcgccgtcgttccgcctccgcaacggcagcctcaatgccctgcgcctgcgccgcgttttcgacctcttcgaccgcaacggcgacggcgagatcaccctcgacgagatggcggccgcgctcgacaccctcggcctcggcgccgaccgcgccagcctggaggccaccgtcggcgcctacatccctgctggcgccgccgggctcggcttcgaggacttcgagggcctccaccgcgctctcggcgacgcgctctttggccccatcaccgaggaggagcccggcaaggaaggcgagggcgaggacgaggacatgaaggaggcgttccgggtcttcgacgagaacggcgacgggttcatctcggcgtccgagctgcaggccgtgctcaagaagctgggcctggcggaggcgcggaacctggcggcggtgcaggagatgatctgcaacgtcgaccgcgaccgcgacggccaggtcgacttcggcgagttcaagtgcatgatgcaggggatcaccgtgtggggagcttgaaggcggcgcgcccggcctcttcctctcgtccctctcctgtttctcatatgagtatgtatcattcctagacatttttgtttagggtgttttttttttcatgatcgagctttccaccgttgactcgatctggcggtaggtcttcaggattttgcttgacaaccatggtcacatcacagcaagcagtaattagttccttcatttattttacaagttcttgttaattcggaaactgtactatcaaagaccttgaccagcctcccctaaaaatattctctcctc

SEQ ID NO: 51240 - protein, 197 aa, Glycine max
  peptide (1)..(197): Ceres Seq. ID no. 14311694
  misc_feature (39)..(67): Pfam Name: EF hand Pfam Description: EF hand
  misc_feature (12)..(191): Homolog of NCBI NO: 18406202 NR Description: calmodulin-like protein (MSS3) [Arabidopsis
  misc_feature (5)..(191): Homolog of NCBI NO: 21740787 NR Description: OSJNBb0091E11.1 [Oryza sativa (japonica
  misc_feature (12)..(194): Homolog of NCBI NO: 1168696 NR Description: Calcium-binding allergen Bet v 3 (Bet v III)
  misc_feature (17)..(194): Homolog of NCBI NO: 15241500 NR Description: calcium-binding protein, putative [Arabidopsis
  misc_feature (16)..(194): Homolog of NCBI NO: 1168782 NR Description: Calcium-binding protein CAST
  misc_feature (21)..(194): Homolog of NCBI NO: 12003380 NR Description: Avr9/Cf-9 rapidly elicited protein 31 [Nicotiana
  misc_feature (23)..(194): Homolog of NCBI NO: 15233402 NR Description: calcium-binding protein, putative [Arabidopsis
  misc_feature (14)..(196): Homolog of NCBI NO: 29467539 NR Description: P0665F09.7 [Oryza sativa (japonica
  misc_feature (14)..(197): Homolog of NCBI NO: 33146667 NR Description: putative Avr9/Cf-9 rapidly elicited protein 31
  misc_feature (9)..(197): Homolog of NCBI NO: 13194672 NR Description: calmodulin-like protein [Pennisetum ciliare]
SVTGELKAMDTAPAPLKPSLSKKPSPSFRLRNGSLNALRLRRVFDLFDRNGDGEITLDEMAAALDTLGLGADRASLEATVGAYIPAGAAGLGFEDFEGLHRALGDALFGPITEEEPGKEGEGEDEDMKEAFRVFDENGDGFISASELQAVLKKLGLAEARNLAAVQEMICNVDRDRDGQVDFGEFKCMMQGITVWGA

SEQ ID NO: 51241 - protein, 189 aa, Glycine max
  peptide (1)..(189): Ceres Seq. ID no. 14311695
  misc_feature (31)..(59): Pfam Name: EF hand Pfam Description: EF hand
  misc_feature (4)..(183): Homolog of NCBI NO: 18406202 NR Description: calmodulin-like protein (MSS3) [Arabidopsis
  misc_feature (1)..(183): Homolog of NCBI NO: 21740787 NR Description: OSJNBb0091E11.1 [Oryza sativa (japonica
  misc_feature (4)..(186): Homolog of NCBI NO: 1168696 NR Description: Calcium-binding allergen Bet v 3 (Bet v III)
  misc_feature (9)..(186): Homolog of NCBI NO: 15241500 NR Description: calcium-binding protein, putative [Arabidopsis
  misc_feature (8)..(186): Homolog of NCBI NO: 1168782 NR Description: Calcium-binding protein CAST
  misc_feature (13)..(186): Homolog of NCBI NO: 12003380 NR Description: Avr9/Cf-9 rapidly elicited protein 31 [Nicotiana
  misc_feature (15)..(186): Homolog of NCBI NO: 15233402 NR Description: calcium-binding protein, putative [Arabidopsis
  misc_feature (6)..(188): Homolog of NCBI NO: 29467539 NR Description: P0665F09.7 [Oryza sativa (japonica
  misc_feature (6)..(189): Homolog of NCBI NO: 33146667 NR Description: putative Avr9/Cf-9 rapidly elicited protein 31
  misc_feature (1)..(189): Homolog of NCBI NO: 13194672 NR Description: calmodulin-like protein [Pennisetum ciliare]
MDTAPAPLKPSLSKKPSPSFRLRNGSLNALRLRRVFDLFDRNGDGEITLDEMAAALDTLGLGADRASLEATVGAYIPAGAAGLGFEDFEGLHRALGDALFGPITEEEPGKEGEGEDEDMKEAFRVFDENGDGFISASELQAVLKKLGLAEARNLAAVQEMICNVDRDRDGQVDFGEFKCMMQGITVWGA

SEQ ID NO: 51242 - protein, 138 aa, Glycine max
  peptide (1)..(138): Ceres Seq. ID no. 14311696
  misc_feature (1)..(132): Homolog of NCBI NO: 18406202 NR Description: calmodulin-like protein (MSS3) [Arabidopsis
  misc_feature (1)..(132): Homolog of NCBI NO: 21740787 NR Description: OSJNBb0091E11.1 [Oryza sativa (japonica
  misc_feature (1)..(135): Homolog of NCBI NO: 1168696 NR Description: Calcium-binding allergen Bet v 3 (Bet v III)
  misc_feature (1)..(135): Homolog of NCBI NO: 15241500 NR Description: calcium-binding protein, putative [Arabidopsis
  misc_feature (1)..(135): Homolog of NCBI NO: 1168782 NR Description: Calcium-binding protein CAST
  misc_feature (1)..(135): Homolog of NCBI NO: 12003380 NR Description: Avr9/Cf-9 rapidly elicited protein 31 [Nicotiana
  misc_feature (1)..(135): Homolog of NCBI NO: 15233402 NR Description: calcium-binding protein, putative [Arabidopsis
  misc_feature (1)..(137): Homolog of NCBI NO: 29467539 NR Description: P0665F09.7 [Oryza sativa (japonica
  misc_feature (1)..(138): Homolog of NCBI NO: 33146667 NR Description: putative Avr9/Cf-9 rapidly elicited protein 31
  misc_feature (1)..(138): Homolog of NCBI NO: 13194672 NR Description: calmodulin-like protein [Pennisetum ciliare]
MAAALDTLGLGADRASLEATVGAYIPAGAAGLGFEDFEGLHRALGDALFGPITEEEPGKEGEGEDEDMKEAFRVFDENGDGFISASELQAVLKKLGLAEARNLAAVQEMICNVDRDRDGQVDFGEFKCMMQGITVWGA

SEQ ID NO: 51243 - DNA, 931 bp, Glycine max
  misc_feature (1)..(931): Ceres Seq. ID no. 13594547
atcaaactgaaaggcgctctctcattctcataccttcaaacctcaagtactcaacacagaggaaagagtcttagcaacatatatggcttgccatcttagatcagttagtttgccttctaggcctcacaccaaggttgaagaggagctgcacagcctagaggcaagcatctcttcaccctccatgaccatcgagacaatctctgatggtttgaggaggcttggagacatctacagcaccattgaagagatcatgtgccttcctagcaaccaaatttgctcttcccagcaaaggaagatgttggaaggtgaaaccgagtgctcccttgagctgctagatctctgcaatgccatgcatgaggacttcaccgagttgaaggacattatccaagatctgcaagtggcgataagaaaaggagatgacaccgctgttcaagtcaagatccagtcttacacccgcctggtgaagaaggcgaagaaacatttcaagaaggctgcgaagaaggttacatctgacaaggaggactgcaggatggtcaggctgttgagcgaggctagggagatcaccacctctctgctcgagtcaacagtacacctcttgtccaagcaaatcgcagtgccaaaatggtctctcgtctccaaggcattccagaagaagaactcggttatttgcaaggaggagcagttgcaggtcctagagtgcagtgtcggagatcttgaggctggagcaggaattctgttccggagattgctccagagcagagttactctcctaaacattcttagctcatagatactcttcaacatctgctactcttgcaccgtgcgattggcttccaccttttaaaggattgctgatctttctcagtgtgtatatatatatgtagaaatgtacagaatactccatacagaaaggaaacaaaagttttgattg

SEQ ID NO: 51244 - protein, 235 aa, Glycine max
  peptide (1)..(235): Ceres Seq. ID no. 15221384
  misc_feature (43)..(199): Pfam Name: Arabidopsis protein of unknown function Pfam Description: Arabidopsis protein of unknown function
  misc_feature (200)..(235): Homolog of NCBI NO: 15217964 NR Description: hypothetical protein [Arabidopsis thaliana]
  misc_feature (41)..(143): Homolog of NCBI NO: 15217964 NR Description: hypothetical protein [Arabidopsis thaliana]
  misc_feature (4)..(199): Homolog of NCBI NO: 15236290 NR Description: hypothetical protein [Arabidopsis thaliana]
  misc_feature (4)..(200): Homolog of NCBI NO: 15227363 NR Description: hypothetical protein [Arabidopsis thaliana]
  misc_feature (4)..(199): Homolog of NCBI NO: 15236926 NR Description: hypothetical protein [Arabidopsis thaliana]
  misc_feature (4)..(200): Homolog of NCBI NO: 15227365 NR Description: hypothetical protein [Arabidopsis thaliana]
MACHLRSVSLPSRPHTKVEEELHSLEASISSPSMTIETISDGLRRLGDIYSTIEEIMCLPSNQICSSQQRKMLEGETECSLELLDLCNAMHEDFTELKDIIQDLQVAIRKGDDTAVQVKIQSYTRLVKKAKKHFKKAAKKVTSDKEDCRMVRLLSEAREITTSLLESTVHLLSKQIAVPKWSLVSKAFQKKNSVICKEEQLQVLECSVGDLEAGAGILFRRLLQSRVTLLNILSS

SEQ ID NO: 51245 - protein, 202 aa, Glycine max
  peptide (1)..(202): Ceres Seq. ID no. 15221385
  misc_feature (10)..(166): Pfam Name: Arabidopsis protein of unknown function Pfam Description: Arabidopsis protein of unknown function
  misc_feature (167)..(202): Homolog of NCBI NO: 15217964 NR Description: hypothetical protein [Arabidopsis thaliana]
  misc_feature (8)..(110): Homolog of NCBI NO: 15217964 NR Description: hypothetical protein [Arabidopsis thaliana]
  misc_feature (1)..(166): Homolog of NCBI NO: 15236290 NR Description: hypothetical protein [Arabidopsis thaliana]
  misc_feature (1)..(167): Homolog of NCBI NO: 15227363 NR Description: hypothetical protein [Arabidopsis thaliana]
  misc_feature (1)..(166): Homolog of NCBI NO: 15236926 NR Description: hypothetical protein [Arabidopsis thaliana]
  misc_feature (1)..(167): Homolog of NCBI NO: 15227365 NR Description: hypothetical protein [Arabidopsis thaliana]
MTIETISDGLRRLGDIYSTIEEIMCLPSNQICSSQQRKMLEGETECSLELLDLCNAMHEDFTELKDIIQDLQVAIRKGDDTAVQVKIQSYTRLVKKAKKHFKKAAKKVTSDKEDCRMVRLLSEAREITTSLLESTVHLLSKQIAVPKWSLVSKAFQKKNSVICKEEQLQVLECSVGDLEAGAGILFRRLLQSRVTLLNILSS

SEQ ID NO: 51246 - protein, 179 aa, Glycine max
  peptide (1)..(179): Ceres Seq. ID no. 15221386
  misc_feature (1)..(143): Pfam Name: Arabidopsis protein of unknown function Pfam Description: Arabidopsis protein of unknown function
  misc_feature (144)..(179): Homolog of NCBI NO: 15217964 NR Description: hypothetical protein [Arabidopsis thaliana]
  misc_feature (1)..(87): Homolog of NCBI NO: 15217964 NR Description: hypothetical protein [Arabidopsis thaliana]
  misc_feature (1)..(143): Homolog of NCBI NO: 15236290 NR Description: hypothetical protein [Arabidopsis thaliana]
  misc_feature (1)..(144): Homolog of NCBI NO: 15227363 NR Description: hypothetical protein [Arabidopsis thaliana]
  misc_feature (1)..(143): Homolog of NCBI NO: 15236926 NR Description: hypothetical protein [Arabidopsis thaliana]
  misc_feature (1)..(144): Homolog of NCBI NO: 15227365 NR Description: hypothetical protein [Arabidopsis thaliana]
MCLPSNQICSSQQRKMLEGETECSLELLDLCNAMHEDFTELKDIIQDLQVAIRKGDDTAVQVKIQSYTRLVKKAKKHFKKAAKKVTSDKEDCRMVRLLSEAREITTSLLESTVHLLSKQIAVPKWSLVSKAFQKKNSVICKEEQLQVLECSVGDLEAGAGILFRRLLQSRVTLLNILSS

SEQ ID NO: 51247 - DNA, 813 bp, Glycine max
  misc_feature (1)..(813): Ceres Seq. ID no. 13594466
ctctctctcccgaacccaaagacggcgaaaccctagctcctagtctcccccatggcctcgcacctcgactttcgctacctcgacgagggcctcggcggcgagcgcggcaagcgcaagcgccgggaggaggaggcagatgccgccgattccatggacctcgacgccgacgcgccccggccgtcgaagctccgcgcagtggcctcccagtccgacccgtccaagccggcggccttcgggtcgcccacctacgacggcgtcatcgccgggcgcgtctcggggcggacatggaaggagccacgcacgcgccgctcctccgcgctgatggtgtcccggaagcccgtccctctggagcagcgcgcgagggacaagtccctgaagaaggcgtaccaggcgcgcgtggcggagctcaaggacgagatccggcagaacaaggtcgccaagcgcaagcagaaggaggagcgggagaagcgcaagaaggagaacgtgctgcgcacgggctcgaagctgcagaaggtcaccaaccccaagacgatccagaagatcgccaagtccaagaaccgaggtcagctcagggtcgtctccgacgacatcttcggcggcaagaagtccgaggccgcccgccgcatgcaggtgcccggcctggagaactgagtcgcagcttatctttgcaatatgtaacgccaattttgtagtaatgcttttcaattgctgtgagctctgtcatggccgatcaaaaatcaaacgcatactgttactttggtatggtgtatgaaactatgtgctactgtttggttactctgtcagcggattttt

SEQ ID NO: 51248 - protein, 229 aa, Glycine max
  peptide (1)..(229): Ceres Seq. ID no. 13594467
  misc_feature (107)..(190): Pfam Name: High molecular weight glutenin subunit Pfam Description: High molecular weight glutenin subunit
LSPEPKDGETLAPSLPHGLAPRLSLPRRGPRRRARQAQAPGGGGRCRRFHGPRRRRAPAVEAPRSGLPVRPVQAGGLRVAHLRRRHRRARLGADMEGATHAPLLRADGVPEARPSGAAREGQVPEEGVPGARGGAQGRDPAEQGRQAQAEGGAGEAQEGERAAHGLEAAEGHQPQDDPEDRQVQEPRSAQGRLRRHLRRQEVRGRPPHAGARPGELSRSLSLQYVTPIL

SEQ ID NO: 51249 - protein, 199 aa, Glycine max
  peptide (1)..(199): Ceres Seq. ID no. 13594468
  misc_feature (1)..(186): Homolog of NCBI NO: 18402657 NR Description: expressed protein [Arabidopsis thaliana]
MASHLDFRYLDEGLGGERGKRKRREEEADAADSMDLDADAPRPSKLRAVASQSDPSKPAAFGSPTYDGVIAGRVSGRTWKEPRTRRSSALMVSRKPVPLEQRARDKSLKKAYQARVAELKDEIRQNKVAKRKQKEEREKRKKENVLRTGSKLQKVTNPKTIQKIAKSKNRGQLRVVSDDIFGGKKSEAARRMQVPGLEN

SEQ ID NO: 51250 - protein, 166 aa, Glycine max
  peptide (1)..(166): Ceres Seq. ID no. 13594469
  misc_feature (1)..(153): Homolog of NCBI NO: 18402657 NR Description: expressed protein [Arabidopsis thaliana]
MDLDADAPRPSKLRAVASQSDPSKPAAFGSPTYDGVIAGRVSGRTWKEPRTRRSSALMVSRKPVPLEQRARDKSLKKAYQARVAELKDEIRQNKVAKRKQKEEREKRKKENVLRTGSKLQKVTNPKTIQKIAKSKNRGQLRVVSDDIFGGKKSEAARRMQVPGLEN

SEQ ID NO: 51251 - DNA, 1207 bp, Glycine max
  misc_feature (1)..(1207): Ceres Seq. ID no. 14311671
acacaaacacaagcttccatcgggctttctcctcctcatcaaccttcttctactactagttgttcctagctagctggttgagtgagcttgctttcgggagcaagaaacgcatggcggtgtcctcggtgctggcgatcctgctcgacgcctcgtgtgcccttgcgtcggcgaccttcgacaaggagttcgacatcacctggggtgacggccgagggaagatcatgaacaatggccagctcctcacgctggggctggacaaggtctccggctccggattccagtccaagcacgagtacctctacggcaagatcgacatgcagctcaagctcgtccccggcaactccgccggcaccgtcaccgcatactacctgtcgtcgcaggggccgacgcacgacgagatcgactttgagttcctgggcaatgtcaccggcgagccgtacactctgcacaccaacgtgttcacgcaggggcaggggcagcgggagcagcagttccgcctctggttcgatcccaccaacgacttccacacctactccatcctctggaacccaaagcacatcatcttcatggtggacgacatgccgatcagggacttcaggaacctggagggaaaggggatcgccttccccaagaaccagccgatgcgcctctactccagcctctggaacgccgacgactgggccacgcaaggaggccgcgtcaagacggactggtcccacgcgccgttctctgcctcctaccgcggcttcaaggccgacgcgtgcgtggtgaccgcggccggccggccgcgctgcggcgccagcgtgggcacggaggtcgcccccggcacgggcgcggcgggcgagtggtacaaccaggagctcgacctgacgcggcagcagcggatgcggtgggtgcagagcaactacatgatctacaactactgcaccgaccccaagcgcttcgcccagggcgttcccgccgagtgctccatgtagtccatgcctgtcgatcgccggagaaagacggccggagatagggaagatggggtgtctgtataatccgatatcaataaggattggtgactgggagatgtgtaaagtagccggtggtagattcttctttggcatttacgcccagttcttctaatcgtgatcacgatcatttcgtgtgtaatctattgcctcgtcgtacatacgttcatcacctgtatgctgctctcggctct

SEQ ID NO: 51252 - protein, 288 aa, Glycine max
  peptide (1)..(288): Ceres Seq. ID no. 14311672
  misc_feature (22)..(203): Pfam Name: Glycosyl hydrolases family 16 Pfam Description: Glycosyl hydrolases family 16
  misc_feature (19)..(286): Homolog of NCBI NO: 22327914 NR Description: xyloglucan endotransglycosylase (XTR3)
  misc_feature (19)..(286): Homolog of NCBI NO: 2129773 NR Description: xyloglucan endo-1,4-beta-D-glucanase (EC 3.2.1.-)
  misc_feature (16)..(288): Homolog of NCBI NO: 7447413 NR Description: xyloglucan endo-1,4-beta-D-glucanase (EC 3.2.1.-)
  misc_feature (6)..(286): Homolog of NCBI NO: 17064792 NR Description: xyloglucan endo-1, 4-beta-D-glucanase (XTR-6)
  misc_feature (1)..(288): Homolog of NCBI NO: 29500891 NR Description: putative xyloglucan endotransglycosylase [Cucumis
  misc_feature (6)..(286): Homolog of NCBI NO: 15235997 NR Description: xyloglucan endotransglycosylase (XTR-6)
  misc_feature (7)..(286): Homolog of NCBI NO: 8886865 NR Description: xyloglucan endotransglycosylase XET1 [Asparagus
  misc_feature (1)..(288): Homolog of NCBI NO: 14330332 NR Description: Xet1 protein [Schedonorus pratensis]
  misc_feature (4)..(288): Homolog of NCBI NO: 8886867 NR Description: xyloglucan endotransglycosylase XET2 [Asparagus
  misc_feature (1)..(288): Homolog of NCBI NO: 7447412 NR Description: xyloglucan endo-1,4-beta-D-glucanase (EC 3.2.1.-)
MAVSSVLAILLDASCALASATFDKEFDITWGDGRGKIMNNGQLLTLGLDKVSGSGFQSKHEYLYGKIDMQLKLVPGNSAGTVTAYYLSSQGPTHDEIDFEFLGNVTGEPYTLHTNVFTQGQGQREQQFRLWFDPTNDFHTYSILWNPKHIIFMVDDMPIRDFRNLEGKGIAFPKNQPMRLYSSLWNADDWATQGGRVKTDWSHAPFSASYRGFKADACVVTAAGRPRCGASVGTEVAPGTGAAGEWYNQELDLTRQQRMRWVQSNYMIYNYCTDPKRFAQGVPAECSM

SEQ ID NO: 51253 - protein, 251 aa, Glycine max
  peptide (1)..(251): Ceres Seq. ID no. 14311673
  misc_feature (1)..(166): Pfam Name: Glycosyl hydrolases family 16 Pfam Description: Glycosyl hydrolases family 16
  misc_feature (1)..(249): Homolog of NCBI NO: 22327914 NR Description: xyloglucan endotransglycosylase (XTR3)
  misc_feature (1)..(249): Homolog of NCBI NO: 2129773 NR Description: xyloglucan endo-1,4-beta-D-glucanase (EC 3.2.1.-)
  misc_feature (1)..(251): Homolog of NCBI NO: 7447413 NR Description: xyloglucan endo-1,4-beta-D-glucanase (EC 3.2.1.-)
  misc_feature (1)..(249): Homolog of NCBI NO: 17064792 NR Description: xyloglucan endo-1, 4-beta-D-glucanase (XTR-6)
  misc_feature (1)..(251): Homolog of NCBI NO: 29500891 NR Description: putative xyloglucan endotransglycosylase [Cucumis
  misc_feature (1)..(249): Homolog of NCBI NO: 15235997 NR Description: xyloglucan endotransglycosylase (XTR-6)
  misc_feature (1)..(249): Homolog of NCBI NO: 8886865 NR Description: xyloglucan endotransglycosylase XET1 [Asparagus
  misc_feature (1)..(251): Homolog of NCBI NO: 14330332 NR Description: Xet1 protein [Schedonorus pratensis]
  misc_feature (1)..(251): Homolog of NCBI NO: 8886867 NR Description: xyloglucan endotransglycosylase XET2 [Asparagus
  misc_feature (1)..(251): Homolog of NCBI NO: 7447412 NR Description: xyloglucan endo-1,4-beta-D-glucanase (EC 3.2.1.-)
MNNGQLLTLGLDKVSGSGFQSKHEYLYGKIDMQLKLVPGNSAGTVTAYYLSSQGPTHDEIDFEFLGNVTGEPYTLHTNVFTQGQGQREQQFRLWFDPTNDFHTYSILWNPKHIIFMVDDMPIRDFRNLEGKGIAFPKNQPMRLYSSLWNADDWATQGGRVKTDWSHAPFSASYRGFKADACVVTAAGRPRCGASVGTEVAPGTGAAGEWYNQELDLTRQQRMRWVQSNYMIYNYCTDPKRFAQGVPAECSM

SEQ ID NO: 51254 - protein, 220 aa, Glycine max
  peptide (1)..(220): Ceres Seq. ID no. 14311674
  misc_feature (1)..(135): Pfam Name: Glycosyl hydrolases family 16 Pfam Description: Glycosyl hydrolases family 16
  misc_feature (1)..(218): Homolog of NCBI NO: 22327914 NR Description: xyloglucan endotransglycosylase (XTR3)
  misc_feature (1)..(218): Homolog of NCBI NO: 2129773 NR Description: xyloglucan endo-1,4-beta-D-glucanase (EC 3.2.1.-)
  misc_feature (1)..(220): Homolog of NCBI NO: 7447413 NR Description: xyloglucan endo-1,4-beta-D-glucanase (EC 3.2.1.-)
  misc_feature (1)..(218): Homolog of NCBI NO: 17064792 NR Description: xyloglucan endo-1, 4-beta-D-glucanase (XTR-6)
  misc_feature (1)..(220): Homolog of NCBI NO: 29500891 NR Description: putative xyloglucan endotransglycosylase [Cucumis
  misc_feature (1)..(218): Homolog of NCBI NO: 15235997 NR Description: xyloglucan endotransglycosylase (XTR-6)
  misc_feature (1)..(218): Homolog of NCBI NO: 8886865 NR Description: xyloglucan endotransglycosylase XET1 [Asparagus
  misc_feature (1)..(220): Homolog of NCBI NO: 14330332 NR Description: Xet1 protein [Schedonorus pratensis]
  misc_feature (1)..(220): Homolog of NCBI NO: 8886867 NR Description: xyloglucan endotransglycosylase XET2 [Asparagus
  misc_feature (1)..(220): Homolog of NCBI NO: 7447412 NR Description: xyloglucan endo-1,4-beta-D-glucanase (EC 3.2.1.-)
MQLKLVPGNSAGTVTAYYLSSQGPTHDEIDFEFLGNVTGEPYTLHTNVFTQGQGQREQQFRLWFDPTNDFHTYSILWNPKHIIFMVDDMPIRDFRNLEGKGIAFPKNQPMRLYSSLWNADDWATQGGRVKTDWSHAPFSASYRGFKADACVVTAAGRPRCGASVGTEVAPGTGAAGEWYNQELDLTRQQRMRWVQSNYMIYNYCTDPKRFAQGVPAECSM

SEQ ID NO: 51255 - DNA, 1361 bp, Glycine max
  misc_feature (1)..(1361): Ceres Seq. ID no. 14311717
gaggaaatccctaataacccccggtcgcctttccacggcgaaaggtatcccggcggcgatggcggcggctgcggcaaggtccggatcccggcgcttgttctccatatccgccctggtgccaccgaagccaccgagccctcccccgaaggcagatcccttcgccagcctctttgttcccgggttaagcaagcgaacagtagctgatggacttaggggagcttttgcaaagtctggtgaagtcgtgcatggttctcttttgacaaaccttccagcatcatctgtaaaaaaatcaaggtggtatatgatcaatgcaaaccgttcaggtcctttgacagtgcgtaaagaataccgcaaagtacttccttctttcataaggccatctgcatcttactccacacaagcttcagaaaaaagaccaaaacaggagagaacagacttgacgactgttgaagatccctttaatgcgcctacctacaatatacctgagaagccagtgacatttgtcgagggcgcctcttacagtgttgtaatacttgctgggcttggagttgctgcattggctggatacgctgttttcaaagagcttatatttgaaccaaaagagtacaagatttttgggaaagctctagcaagagttcagagtgatagccaggttacagccaaaattggttaccctataactggttatggtacggaatccagaaaccgtgcagctcggcagcgcatccaaaacagggtttggacagatgaggatggtgttgaacatgtggaggtaggctttcatatccgagggccgcatggagctggaaaggtgtttgcggagatgttcaaagacagctccgacaggacatggaagttcacgtttcttctcgtcgagattacgtcaccgcgacccgcacaaatcatgttagaatcttacctaccagcatagggatgcaagagacaacatcagccagcagcggcacatctatgcgacacttcattttacatcctatctccaatggcctgcatctgatgttaaatacccgtcctcggattaaagaagttgtgaattttgaactttcccgaaagcataagtaggaggaagatgaaccatcagagctgctgaccatctctagtatcttagacatggtgtaccgtgcaaggaccttgatgttgttgctttgtttagctgaaaggcgcgcaggcacatgtatacaagccatctttcctgatgctcctcaaacaacatggaacggagcgagtgatccttcatctatcgagttgtggtctcgtttcaggcagttttaatgatgcctatggatttcatgcaaacctccaatgatgtccaaatagcaataatatctggttacattacggcc

SEQ ID NO: 51256 - protein, 309 aa, Glycine max
  peptide (1)..(309): Ceres Seq. ID no. 14311718
  misc_feature (107)..(305): Homolog of NCBI NO: 17540726 NR Description: putative membrane protein of fungal and metazoan
  misc_feature (172)..(304): Homolog of NCBI NO: 12654149 NR Description: HSPC154 protein [Homo sapiens]
  misc_feature (172)..(304): Homolog of NCBI NO: 7661810 NR Description: HSPC154 protein [Homo sapiens]
  misc_feature (124)..(304): Homolog of NCBI NO: 19920754 NR Description: CG7382-PA [Drosophila melanogaster]
  misc_feature (163)..(297): Homolog of NCBI NO: 12839773 NR Description: unnamed protein product [Mus musculus]
  misc_feature (79)..(297): Homolog of NCBI NO: 12850553 NR Description: unnamed protein product [Mus musculus]
  misc_feature (79)..(297): Homolog of NCBI NO: 21313128 NR Description: RIKEN cDNA 2700002I20 [Mus musculus]
  misc_feature (20)..(88): Homolog of NCBI NO: 34898598 NR Description: P0534A03.25 [Oryza sativa (japonica
  misc_feature (116)..(304): Homolog of NCBI NO: 31211417 NR Description: ENSANGP00000013283 [Anopheles gambiae]
  misc_feature (21)..(88): Homolog of NCBI NO: 38636774 NR Description: putative RNA recognition motif (RRM)-containing
RKSLITPGRLSTAKGIPAAMAAAAARSGSRRLFSISALVPPKPPSPPPKADPFASLFVPGLSKRTVADGLRGAFAKSGEVVHGSLLTNLPASSVKKSRWYMINANRSGPLTVRKEYRKVLPSFIRPSASYSTQASEKRPKQERTDLTTVEDPFNAPTYNIPEKPVTFVEGASYSVVILAGLGVAALAGYAVFKELIFEPKEYKIFGKALARVQSDSQVTAKIGYPITGYGTESRNRAARQRIQNRVWTDEDGVEHVEVGFHIRGPHGAGKVFAEMFKDSSDRTWKFTFLLVEITSPRPAQIMLESYLPA

SEQ ID NO: 51257 - protein, 290 aa, Glycine max
  peptide (1)..(290): Ceres Seq. ID no. 14311719
  misc_feature (88)..(286): Homolog of NCBI NO: 17540726 NR Description: putative membrane protein of fungal and metazoan
  misc_feature (153)..(285): Homolog of NCBI NO: 12654149 NR Description: HSPC154 protein [Homo sapiens]
  misc_feature (153)..(285): Homolog of NCBI NO: 7661810 NR Description: HSPC154 protein [Homo sapiens]
  misc_feature (105)..(285): Homolog of NCBI NO: 19920754 NR Description: CG7382-PA [Drosophila melanogaster]
  misc_feature (144)..(278): Homolog of NCBI NO: 12839773 NR Description: unnamed protein product [Mus musculus]
  misc_feature (60)..(278): Homolog of NCBI NO: 12850553 NR Description: unnamed protein product [Mus musculus]
  misc_feature (60)..(278): Homolog of NCBI NO: 21313128 NR Description: RIKEN cDNA 2700002I20 [Mus musculus]
  misc_feature (1)..(69): Homolog of NCBI NO: 34898598 NR Description: P0534A03.25 [Oryza sativa (japonica
  misc_feature (97)..(285): Homolog of NCBI NO: 31211417 NR Description: ENSANGP00000013283 [Anopheles gambiae]
  misc_feature (2)..(69): Homolog of NCBI NO: 38636774 NR Description: putative RNA recognition motif (RRM)-containing
MAAAAARSGSRRLFSISALVPPKPPSPPPKADPFASLFVPGLSKRTVADGLRGAFAKSGEVVHGSLLTNLPASSVKKSRWYMINANRSGPLTVRKEYRKVLPSFIRPSASYSTQASEKRPKQERTDLTTVEDPFNAPTYNIPEKPVTFVEGASYSVVILAGLGVAALAGYAVFKELIFEPKEYKIFGKALARVQSDSQVTAKIGYPITGYGTESRNRAARQRIQNRVWTDEDGVEHVEVGFHIRGPHGAGKVFAEMFKDSSDRTWKFTFLLVEITSPRPAQIMLESYLPA

SEQ ID NO: 51258 - protein, 209 aa, Glycine max
  peptide (1)..(209): Ceres Seq. ID no. 14311720
  misc_feature (72)..(197): Homolog of NCBI NO: 34932590 NR Description: similar to RIKEN cDNA 2700002I20 [Rattus
  misc_feature (22)..(205): Homolog of NCBI NO: 39580147 NR Description: Hypothetical protein CBG23912 [Caenorhabditis
  misc_feature (7)..(205): Homolog of NCBI NO: 17540726 NR Description: putative membrane protein of fungal and metazoan
  misc_feature (72)..(204): Homolog of NCBI NO: 12654149 NR Description: HSPC154 protein [Homo sapiens]
  misc_feature (72)..(204): Homolog of NCBI NO: 7661810 NR Description: HSPC154 protein [Homo sapiens]
  misc_feature (24)..(204): Homolog of NCBI NO: 19920754 NR Description: CG7382-PA [Drosophila melanogaster]
  misc_feature (63)..(197): Homolog of NCBI NO: 12839773 NR Description: unnamed protein product [Mus musculus]
  misc_feature (1)..(197): Homolog of NCBI NO: 12850553 NR Description: unnamed protein product [Mus musculus]
  misc_feature (1)..(197): Homolog of NCBI NO: 21313128 NR Description: RIKEN cDNA 2700002I20 [Mus musculus]
  misc_feature (16)..(204): Homolog of NCBI NO: 31211417 NR Description: ENSANGP00000013283 [Anopheles gambiae]
MINANRSGPLTVRKEYRKVLPSFIRPSASYSTQASEKRPKQERTDLTTVEDPFNAPTYNIPEKPVTFVEGASYSVVILAGLGVAALAGYAVFKELIFEPKEYKIFGKALARVQSDSQVTAKIGYPITGYGTESRNRAARQRIQNRVWTDEDGVEHVEVGFHIRGPHGAGKVFAEMFKDSSDRTWKFTFLLVEITSPRPAQIMLESYLPA

SEQ ID NO: 51259 - DNA, 1197 bp, Glycine max
  misc_feature (1)..(1197): Ceres Seq. ID no. 14311727
gttatttagagagattcagagagaaatggcttcatattcttcgtcctctctttctagaatctcaactctccagaatcatatctcccctcttgaagccaacaacaagctacggagtctggtcaagatatctccacaagtgtctgaagccatagccagtggacgtgctgtggtcgctcttgagtcaaccattatctcacatgggatgccttaccctcaaaacctgcaaacagcaaaagaggtggagtcaattgtgagagagaatggagcagtccctgcaacaatagctatattaaacggagtaccttgcataggtctgaacgaagaagaactagaacgtcttgcatctctgggcaaaagtgtccaaaagactgcaggcagggacataccacatgttgtggcgacaagaggagatggtgcaactacagtctctgcaacgttgttttttgcttcaatggttggcatccaagtctttgtaaccggcgggataggaggtgtgcatagacatgccaaccatactatggacatatcatctgatcttactgcactaggaaggactcctatagctgtgatatcagcaggcgttaaatcaatacttgatatcccaaagactcttgaatatttggaaactcaagaagtgtatgttgctgcatacaagagcgatgagtttccagcatttttcacagagaaaagcggctgtaaggcaccttcccgagttgatagccctgaagactgtgctcgagtaatagatgcaaacatgaagttaaaccgtaaggcggggattctattcgctgttccaatcccaaaacagcattcagctgccggaaatcttatcgaatcagcaacacagcgtgctcttacagaagcaagggaacaaaacgttactggaaatgccgaaactccattcttactctcacgtgtaaatgagttaactgaaggcacctcacttgcagcaaatattgcgcttgtgaaaaacaatgcccttatcggttctcaaattgcagtagcgctttctcagctggtatgagcttccttatcaacctcagactcaggctcaggttcatgattcaggactggtcaaagatcttttagattggtagtaatctagtgttttaatgttgcttatgaaatattgtttcttgcccaaaaaaaaactcttttttaacaaactttcacatattatatgaatatttttatatc

SEQ ID NO: 51260 - protein, 340 aa, Glycine max
  peptide (1)..(340): Ceres Seq. ID no. 14311728
  misc_feature (44)..(336): Pfam Name: Indigoidine synthase A like protein Pfam Description: Indigoidine synthase A like protein
  misc_feature (36)..(339): Homolog of NCBI NO: 16804378 NR Description: similar to Erwinia chrysanthemi IndA protein
  misc_feature (36)..(339): Homolog of NCBI NO: 16801496 NR Description: similar to Erwinia chrysanthemi IndA protein
  misc_feature (32)..(339): Homolog of NCBI NO: 15807302 NR Description: conserved hypothetical protein [Deinococcus
  misc_feature (36)..(340): Homolog of NCBI NO: 15923302 NR Description: conserved hypothetical protein
  misc_feature (36)..(340): Homolog of NCBI NO: 21282018 NR Description: conserved hypothetical protein
  misc_feature (36)..(339): Homolog of NCBI NO: 20806844 NR Description: uncharacterized enzyme involved in pigment
  misc_feature (35)..(340): Homolog of NCBI NO: 9454556 NR Description: Unknown protein [Arabidopsis thaliana]
  misc_feature (249)..(340): Homolog of NCBI NO: 25351902 NR Description: unknown protein [imported] - Arabidopsis thaliana
  misc_feature (13)..(248): Homolog of NCBI NO: 25351902 NR Description: unknown protein [imported] - Arabidopsis thaliana
  misc_feature (13)..(340): Homolog of NCBI NO: 30694792 NR Description: expressed protein [Arabidopsis thaliana]
LFREIQREMASYSSSSLSRISTLQNHISPLEANNKLRSLVKISPQVSEAIASGRAVVALESTIISHGMPYPQNLQTAKEVESIVRENGAVPATIAILNGVPCIGLNEEELERLASLGKSVQKTAGRDIPHVVATRGDGATTVSATLFFASMVGIQVFVTGGIGGVHRHANHTMDISSDLTALGRTPIAVISAGVKSILDIPKTLEYLETQEVYVAAYKSDEFPAFFTEKSGCKAPSRVDSPEDCARVIDANMKLNRKAGILFAVPIPKQHSAAGNLIESATQRALTEAREQNVTGNAETPFLLSRVNELTEGTSLAANIALVKNNALIGSQIAVALSQLV

SEQ ID NO: 51261 - protein, 332 aa, Glycine max
  peptide (1)..(332): Ceres Seq. ID no. 14311729
  misc_feature (36)..(328): Pfam Name: Indigoidine synthase A like protein Pfam Description: Indigoidine synthase A like protein
  misc_feature (28)..(331): Homolog of NCBI NO: 16804378 NR Description: similar to Erwinia chrysanthemi IndA protein
  misc_feature (28)..(331): Homolog of NCBI NO: 16801496 NR Description: similar to Erwinia chrysanthemi IndA protein
  misc_feature (24)..(331): Homolog of NCBI NO: 15807302 NR Description: conserved hypothetical protein [Deinococcus
  misc_feature (28)..(332): Homolog of NCBI NO: 15923302 NR Description: conserved hypothetical protein
  misc_feature (28)..(332): Homolog of NCBI NO: 21282018 NR Description: conserved hypothetical protein
  misc_feature (28)..(331): Homolog of NCBI NO: 20806844 NR Description: uncharacterized enzyme involved in pigment
  misc_feature (27)..(332): Homolog of NCBI NO: 9454556 NR Description: Unknown protein [Arabidopsis thaliana]
  misc_feature (241)..(332): Homolog of NCBI NO: 25351902 NR Description: unknown protein [imported] - Arabidopsis thaliana
  misc_feature (5)..(240): Homolog of NCBI NO: 25351902 NR Description: unknown protein [imported] - Arabidopsis thaliana
  misc_feature (5)..(332): Homolog of NCBI NO: 30694792 NR Description: expressed protein [Arabidopsis thaliana]
MASYSSSSLSRISTLQNHISPLEANNKLRSLVKISPQVSEAIASGRAVVALESTIISHGMPYPQNLQTAKEVESIVRENGAVPATIAILNGVPCIGLNEEELERLASLGKSVQKTAGRDIPHVVATRGDGATTVSATLFFASMVGIQVFVTGGIGGVHRHANHTMDISSDLTALGRTPIAVISAGVKSILDIPKTLEYLETQEVYVAAYKSDEFPAFFTEKSGCKAPSRVDSPEDCARVIDANMKLNRKAGILFAVPIPKQHSAAGNLIESATQRALTEAREQNVTGNAETPFLLSRVNELTEGTSLAANIALVKNNALIGSQIAVALSQLV

SEQ ID NO: 51262 - protein, 273 aa, Glycine max
  peptide (1)..(273): Ceres Seq. ID no. 14311730
  misc_feature (1)..(269): Pfam Name: Indigoidine synthase A like protein Pfam Description: Indigoidine synthase A like protein
  misc_feature (1)..(272): Homolog of NCBI NO: 16804378 NR Description: similar to Erwinia chrysanthemi IndA protein
  misc_feature (1)..(272): Homolog of NCBI NO: 16801496 NR Description: similar to Erwinia chrysanthemi IndA protein
  misc_feature (1)..(272): Homolog of NCBI NO: 15807302 NR Description: conserved hypothetical protein [Deinococcus
  misc_feature (1)..(273): Homolog of NCBI NO: 15923302 NR Description: conserved hypothetical protein
  misc_feature (1)..(273): Homolog of NCBI NO: 21282018 NR Description: conserved hypothetical protein
  misc_feature (1)..(272): Homolog of NCBI NO: 20806844 NR Description: uncharacterized enzyme involved in pigment
  misc_feature (1)..(273): Homolog of NCBI NO: 9454556 NR Description: Unknown protein [Arabidopsis thaliana]
  misc_feature (182)..(273): Homolog of NCBI NO: 25351902 NR Description: unknown protein [imported] - Arabidopsis thaliana
  misc_feature (1)..(181): Homolog of NCBI NO: 25351902 NR Description: unknown protein [imported] - Arabidopsis thaliana
  misc_feature (1)..(273): Homolog of NCBI NO: 30694792 NR Description: expressed protein [Arabidopsis thaliana]
MPYPQNLQTAKEVESIVRENGAVPATIAILNGVPCIGLNEEELERLASLGKSVQKTAGRDIPHVVATRGDGATTVSATLFFASMVGIQVFVTGGIGGVHRHANHTMDISSDLTALGRTPIAVISAGVKSILDIPKTLEYLETQEVYVAAYKSDEFPAFFTEKSGCKAPSRVDSPEDCARVIDANMKLNRKAGILFAVPIPKQHSAAGNLIESATQRALTEAREQNVTGNAETPFLLSRVNELTEGTSLAANIALVKNNALIGSQIAVALSQLV

SEQ ID NO: 51263 - DNA, 1178 bp, Glycine max
  misc_feature (1)..(1178): Ceres Seq. ID no. 14311683
ctcaagctcaaatcccttcccctcctcgcgtgcccccccttatccccttcaccatggccacctccgccatgacactcgccatggtcgcggccacggacgcctccctcttccaccccacgttccccgcccaacacaagctcgccccggcatccgcctccctcccactcattttctctcgcgcgccgctcctccgctccacccgcccccgcgtcccccttacgcccctcgtcgcctcctccgacgccgccgaggcgggcctcgactgggccgacgcggaggaagccgaagagacggtgacggaggaggagcccgcggtggcggcctccggtggggacgcggggtacgcagccgagccgcccgaggaggccaaggtgtacgtcgggaacctgccgtatgatgtcgacagcgagcggctcgctcagctcttcgaccaggccggcgtcgtcgaggtcgccgaggtcatttacaacagagagtcaggccagagccgtggatttggatttgttaccatgagtactattgaggaagctgacaaagccatcgagacgttcaatcgctacgacatcagtggaaggcttctgaacgtaaacagggcagctcaaaggggctcccgtgttgagagacctcctcgacagtttgcatcttctttcagggcttatgttggtaacctgccatggcaagcggaagactctaggttggtgcaattgttcagcgagcatggggaagtagttaacgctacagttgtgtacgacagagaaactggtcgttcacgaggatttggttttgtaactatggcttcaaaggaggatcttgacagtgctatttcagcgcttgatggacaggagatggatggccgcccactccgagtgaacgttgccgcggagcgaccacagcgagggttctgatgcagaggagagcgggtgcttcttttggacacacgagagcaacactgctgaaatgttactgcagaagactgaagcatgtcaccacttaaaaatcctgcactagcctcctgatgctgggctatctcctcccatcccatgttcttttttcatgcttccgtttgctgctgatgtcatcatgttaatttcttgtcaacaccatgagttcaacttttcaagtaggctactgtaatgatgtcttagtgttctcatgataatcgaagaaggttttgttgg

SEQ ID NO: 51264 - protein, 300 aa, Glycine max
  peptide (1)..(300): Ceres Seq. ID no. 14311684
  misc_feature (218)..(289): Pfam Name: RNA recognition motif. (a.k.a. RRM, RBD, or RNP domain) Pfam Description: RNA recognition motif. (a.k.a. RRM, RBD, or RNP
  misc_feature (18)..(298): Homolog of NCBI NO: 133246 NR Description: 28 kDa ribonucleoprotein, chloroplast precursor
  misc_feature (34)..(300): Homolog of NCBI NO: 1076251 NR Description: RNA-binding protein - common ice plant
  misc_feature (75)..(298): Homolog of NCBI NO: 133248 NR Description: 31 kDa ribonucleoprotein, chloroplast precursor
  misc_feature (52)..(300): Homolog of NCBI NO: 681908 NR Description: cp31 [Arabidopsis thaliana]
  misc_feature (13)..(300): Homolog of NCBI NO: 1076305 NR Description: RNA-binding protein cp31 precursor - Arabidopsis
  misc_feature (79)..(298): Homolog of NCBI NO: 19032260 NR Description: RNA-binding protein precursor [Persea americana]
  misc_feature (90)..(300): Homolog of NCBI NO: 100903 NR Description: nucleic acid-binding protein - maize
  misc_feature (18)..(300): Homolog of NCBI NO: 7446356 NR Description: Ps16 protein - wheat
  misc_feature (18)..(300): Homolog of NCBI NO: 7446358 NR Description: cp31AHv protein - barley
  misc_feature (18)..(300): Homolog of NCBI NO: 7446359 NR Description: nucleic acid-binding protein - barley
QAQIPSPPRVPPLIPFTMATSAMTLAMVAATDASLFHPTFPAQHKLAPASASLPLIFSRAPLLRSTRPRVPLTPLVASSDAAEAGLDWADAEEAEETVTEEEPAVAASGGDAGYAAEPPEEAKVYVGNLPYDVDSERLAQLFDQAGVVEVAEVIYNRESGQSRGFGFVTMSTIEEADKAIETFNRYDISGRLLNVNRAAQRGSRVERPPRQFASSFRAYVGNLPWQAEDSRLVQLFSEHGEVVNATVVYDRETGRSRGFGFVTMASKEDLDSAISALDGQEMDGRPLRVNVAAERPQRGF

SEQ ID NO: 51265 - protein, 283 aa, Glycine max
  peptide (1)..(283): Ceres Seq. ID no. 14311685
  misc_feature (201)..(272): Pfam Name: RNA recognition motif. (a.k.a. RRM, RBD, or RNP domain) Pfam Description: RNA recognition motif. (a.k.a. RRM, RBD, or RNP
  misc_feature (1)..(281): Homolog of NCBI NO: 133246 NR Description: 28 kDa ribonucleoprotein, chloroplast precursor
  misc_feature (17)..(283): Homolog of NCBI NO: 1076251 NR Description: RNA-binding protein - common ice plant
  misc_feature (58)..(281): Homolog of NCBI NO: 133248 NR Description: 31 kDa ribonucleoprotein, chloroplast precursor
  misc_feature (35)..(283): Homolog of NCBI NO: 681908 NR Description: cp31 [Arabidopsis thaliana]
  misc_feature (1)..(283): Homolog of NCBI NO: 1076305 NR Description: RNA-binding protein cp31 precursor - Arabidopsis
  misc_feature (62)..(281): Homolog of NCBI NO: 19032260 NR Description: RNA-binding protein precursor [Persea americana]
  misc_feature (73)..(283): Homolog of NCBI NO: 100903 NR Description: nucleic acid-binding protein - maize
  misc_feature (1)..(283): Homolog of NCBI NO: 7446356 NR Description: Ps16 protein - wheat
  misc_feature (1)..(283): Homolog of NCBI NO: 7446358 NR Description: cp31AHv protein - barley
  misc_feature (1)..(283): Homolog of NCBI NO: 7446359 NR Description: nucleic acid-binding protein - barley
MATSAMTLAMVAATDASLFHPTFPAQHKLAPASASLPLIFSRAPLLRSTRPRVPLTPLVASSDAAEAGLDWADAEEAEETVTEEEPAVAASGGDAGYAAEPPEEAKVYVGNLPYDVDSERLAQLFDQAGVVEVAEVIYNRESGQSRGFGFVTMSTIEEADKAIETFNRYDISGRLLNVNRAAQRGSRVERPPRQFASSFRAYVGNLPWQAEDSRLVQLFSEHGEVVNATVVYDRETGRSRGFGFVTMASKEDLDSAISALDGQEMDGRPLRVNVAAERPQRGF

SEQ ID NO: 51266 - protein, 278 aa, Glycine max
  peptide (1)..(278): Ceres Seq. ID no. 14311686
  misc_feature (196)..(267): Pfam Name: RNA recognition motif. (a.k.a. RRM, RBD, or RNP domain) Pfam Description: RNA recognition motif. (a.k.a. RRM, RBD, or RNP
  misc_feature (1)..(276): Homolog of NCBI NO: 133246 NR Description: 28 kDa ribonucleoprotein, chloroplast precursor
  misc_feature (12)..(278): Homolog of NCBI NO: 1076251 NR Description: RNA-binding protein - common ice plant
  misc_feature (53)..(276): Homolog of NCBI NO: 133248 NR Description: 31 kDa ribonucleoprotein, chloroplast precursor
  misc_feature (30)..(278): Homolog of NCBI NO: 681908 NR Description: cp31 [Arabidopsis thaliana]
  misc_feature (1)..(278): Homolog of NCBI NO: 1076305 NR Description: RNA-binding protein cp31 precursor - Arabidopsis
  misc_feature (57)..(276): Homolog of NCBI NO: 19032260 NR Description: RNA-binding protein precursor [Persea americana]
  misc_feature (68)..(278): Homolog of NCBI NO: 100903 NR Description: nucleic acid-binding protein - maize
  misc_feature (1)..(278): Homolog of NCBI NO: 7446356 NR Description: Ps16 protein - wheat
  misc_feature (1)..(278): Homolog of NCBI NO: 7446358 NR Description: cp31AHv protein - barley
  misc_feature (1)..(278): Homolog of NCBI NO: 7446359 NR Description: nucleic acid-binding protein - barley
MTLAMVAATDASLFHPTFPAQHKLAPASASLPLIFSRAPLLRSTRPRVPLTPLVASSDAAEAGLDWADAEEAEETVTEEEPAVAASGGDAGYAAEPPEEAKVYVGNLPYDVDSERLAQLFDQAGVVEVAEVIYNRESGQSRGFGFVTMSTIEEADKAIETFNRYDISGRLLNVNRAAQRGSRVERPPRQFASSFRAYVGNLPWQAEDSRLVQLFSEHGEVVNATVVYDRETGRSRGFGFVTMASKEDLDSAISALDGQEMDGRPLRVNVAAERPQRGF

SEQ ID NO: 51267 - DNA, 1109 bp, Glycine max
  misc_feature (1)..(1109): Ceres Seq. ID no. 13594548
ctggtgaagtaaatctctcttttttcggtataaccatgagcagcttcttgttaacattcccttacttccctaacgacgcttcgtggcaggtaaaactttgtccttctccacaaattcgccttgtctgcgtcaaaaccaatctcaaaacactcaccaaggcttcttctcagaattgcgtcgaaagcatgagttctctcaccagtcttgctccactcgaagcagtgctctttgatgttgatggaactctctgtgattctgatccactccactattatgctttgcgtgaaatgctccaagagcttggttttaatggaggtgctcctataacagaggaattctttgtcgagacattttctggcaagcacagtgatgatactgccttggttgtctttcctggtgatctggaacgaggtttaaagtttgtagaagataaggaagccatgttccggagattggcttcagagcaactgaatcccttgaaaggccttgataaagtgaggaaatgggttgaaaaccatggtctgaagagagctgcagtcaccaatgctccaaggaaaaatgcagaactcattatctcaaaacttggtctaacagatttctttgatgctgttattattggtgatgaatgtgaacatgccaaacctcatccagaaccctacttgaaagcacttgaagttctgaaggcatcaaaggatcatgcatttgtatttgaggattctgcttcagggataaaagctggagtggcagctgggatgcctgttataggtttagctacaagaaacccggagaatttactgatggaagcaaagcctgcctttctgattaaggattatgaggattcaaaattgtgggcagctttggaagaacttgacaaggctggtgcacgttaagtttgaattaatgatgtgactgacggaatttcttgatataaacatgtaacaaggagttccatattaaatcccctacttccctaaataattttgttcaaagtgggcaatattattacactagtccacaatcaatctcgctttggaacagaaggcaaacggttctattctatttgtatttagtaataatgtaacgttggccatgawaaacmaaammaaamr

SEQ ID NO: 51268 - protein, 295 aa, Glycine max
  peptide (1)..(295): Ceres Seq. ID no. 15221387
  misc_feature (71)..(258): Pfam Name: haloacid dehalogenase-like hydrolase Pfam Description: haloacid dehalogenase-like hydrolase
  misc_feature (74)..(287): Homolog of NCBI NO: 34496849 NR Description: probable beta-phosphoglucomutase
  misc_feature (71)..(282): Homolog of NCBI NO: 23042473 NR Description: hypothetical protein [Trichodesmium erythraeum
  misc_feature (71)..(286): Homolog of NCBI NO: 37521914 NR Description: hypothetical protein glr2345 [Gloeobacter
  misc_feature (71)..(289): Homolog of NCBI NO: 17228223 NR Description: hypothetical protein [Nostoc sp. PCC 7120]
  misc_feature (71)..(289): Homolog of NCBI NO: 23127812 NR Description: hypothetical protein [Nostoc punctiforme]
  misc_feature (134)..(290): Homolog of NCBI NO: 37700485 NR Description: putative beta-phosphoglucomutase [Oryza sativa]
  misc_feature (64)..(294): Homolog of NCBI NO: 34897820 NR Description: P0514G12.30 [Oryza sativa (japonica
  misc_feature (99)..(290): Homolog of NCBI NO: 25408616 NR Description: hypothetical protein At2g38740 [imported] -
  misc_feature (61)..(290): Homolog of NCBI NO: 37536998 NR Description: putative beta-phosphoglucomutase
  misc_feature (54)..(290): Homolog of NCBI NO: 18404847 NR Description: haloacid dehalogenase-like hydrolase family
GEVNLSFFGITMSSFLLTFPYFPNDASWQVKLCPSPQIRLVCVKTNLKTLTKASSQNCVESMSSLTSLAPLEAVLFDVDGTLCDSDPLHYYALREMLQELGFNGGAPITEEFFVETFSGKHSDDTALVVFPGDLERGLKFVEDKEAMFRRLASEQLNPLKGLDKVRKWVENHGLKRAAVTNAPRKNAELIISKLGLTDFFDAVIIGDECEHAKPHPEPYLKALEVLKASKDHAFVFEDSASGIKAGVAAGMPVIGLATRNPENLLMEAKPAFLIKDYEDSKLWAALEELDKAGAR

SEQ ID NO: 51269 - protein, 284 aa, Glycine max
  peptide (1)..(284): Ceres Seq. ID no. 15221388
  misc_feature (60)..(247): Pfam Name: haloacid dehalogenase-like hydrolase Pfam Description: haloacid dehalogenase-like hydrolase
  misc_feature (63)..(276): Homolog of NCBI NO: 34496849 NR Description: probable beta-phosphoglucomutase
  misc_feature (60)..(271): Homolog of NCBI NO: 23042473 NR Description: hypothetical protein [Trichodesmium erythraeum
  misc_feature (60)..(275): Homolog of NCBI NO: 37521914 NR Description: hypothetical protein glr2345 [Gloeobacter
  misc_feature (60)..(278): Homolog of NCBI NO: 17228223 NR Description: hypothetical protein [Nostoc sp. PCC 7120]
  misc_feature (60)..(278): Homolog of NCBI NO: 23127812 NR Description: hypothetical protein [Nostoc punctiforme]
  misc_feature (123)..(279): Homolog of NCBI NO: 37700485 NR Description: putative beta-phosphoglucomutase [Oryza sativa]
  misc_feature (53)..(283): Homolog of NCBI NO: 34897820 NR Description: P0514G12.30 [Oryza sativa (japonica
  misc_feature (88)..(279): Homolog of NCBI NO: 25408616 NR Description: hypothetical protein At2g38740 [imported] -
  misc_feature (50)..(279): Homolog of NCBI NO: 37536998 NR Description: putative beta-phosphoglucomutase
  misc_feature (43)..(279): Homolog of NCBI NO: 18404847 NR Description: haloacid dehalogenase-like hydrolase family
MSSFLLTFPYFPNDASWQVKLCPSPQIRLVCVKTNLKTLTKASSQNCVESMSSLTSLAPLEAVLFDVDGTLCDSDPLHYYALREMLQELGFNGGAPITEEFFVETFSGKHSDDTALVVFPGDLERGLKFVEDKEAMFRRLASEQLNPLKGLDKVRKWVENHGLKRAAVTNAPRKNAELIISKLGLTDFFDAVIIGDECEHAKPHPEPYLKALEVLKASKDHAFVFEDSASGIKAGVAAGMPVIGLATRNPENLLMEAKPAFLIKDYEDSKLWAALEELDKAGAR

SEQ ID NO: 51270 - protein, 234 aa, Glycine max
  peptide (1)..(234): Ceres Seq. ID no. 15221389
  misc_feature (10)..(197): Pfam Name: haloacid dehalogenase-like hydrolase Pfam Description: haloacid dehalogenase-like hydrolase
  misc_feature (13)..(226): Homolog of NCBI NO: 34496849 NR Description: probable beta-phosphoglucomutase
  misc_feature (10)..(221): Homolog of NCBI NO: 23042473 NR Description: hypothetical protein [Trichodesmium erythraeum
  misc_feature (10)..(225): Homolog of NCBI NO: 37521914 NR Description: hypothetical protein glr2345 [Gloeobacter
  misc_feature (10)..(228): Homolog of NCBI NO: 17228223 NR Description: hypothetical protein [Nostoc sp. PCC 7120]
  misc_feature (10)..(228): Homolog of NCBI NO: 23127812 NR Description: hypothetical protein [Nostoc punctiforme]
  misc_feature (73)..(229): Homolog of NCBI NO: 37700485 NR Description: putative beta-phosphoglucomutase [Oryza sativa]
  misc_feature (3)..(233): Homolog of NCBI NO: 34897820 NR Description: P0514G12.30 [Oryza sativa (japonica
  misc_feature (38)..(229): Homolog of NCBI NO: 25408616 NR Description: hypothetical protein At2g38740 [imported] -
  misc_feature (1)..(229): Homolog of NCBI NO: 37536998 NR Description: putative beta-phosphoglucomutase
  misc_feature (1)..(229): Homolog of NCBI NO: 18404847 NR Description: haloacid dehalogenase-like hydrolase family
MSSLTSLAPLEAVLFDVDGTLCDSDPLHYYALREMLQELGFNGGAPITEEFFVETFSGKHSDDTALVVFPGDLERGLKFVEDKEAMFRRLASEQLNPLKGLDKVRKWVENHGLKRAAVTNAPRKNAELIISKLGLTDFFDAVIIGDECEHAKPHPEPYLKALEVLKASKDHAFVFEDSASGIKAGVAAGMPVIGLATRNPENLLMEAKPAFLIKDYEDSKLWAALEELDKAGAR

SEQ ID NO: 51271 - DNA, 879 bp, Glycine max
  misc_feature (1)..(879): Ceres Seq. ID no. 13595797
atgcctcagaaaatagagattccaattcgagctccatagacaccattagcattagagggagggtgcaacagcaggattggagggttctcttctccaaaggcgccgaagttcttcagcttggcaagtaagtgataatcaatggcttacaggcttccactggcaggagttagggcttccaattatgaggctagagagcttccatcaaacagctacctggatctgggtgggccttatggaaaatttgtgcctttcataatcgcgggagaagggggctttggggagcataagcagctcaactggacaaacttgtttttactgaacaagcttggcagtgacatagacagggatcatcaagaggtgatcgatcagataaaggcagagaaagatgttgaaaagataaaagagttgatagagcgactgcctcgtgaaattgctgagcatttggaaggccatgagacccatgaacaggtcgaaatcctggcagatctgagcaggaacatggatcagaggatgtcttatctcagcagagagatccggcatctaaggagtgacctgggacaggtgatgcaaggtatcggagagatacgcgaagcattggctaggatggagcgccagaatccttgcttccgtccatgaacaaatgcaaccagccctggagcaagtgcacctggcagtttcgtatttgcatttcgtacttttctatattgtgttgtaatgaataaaattatgcgctccttgcagcgtataatgttgtacgagtctgagtcgatcgagttttattagctacatgtgcatgtctgtactgtctgcagttggttgttcttgtcaagggtttgtaatgaataaaattatgtgcagcttgctgcacataatgttgtc

SEQ ID NO: 51272 - protein, 165 aa, Glycine max
  peptide (1)..(165): Ceres Seq. ID no. 15221664
  misc_feature (19)..(139): Homolog of NCBI NO: 9627995 NR Description: coat protein/movement protein [Cassava vein
  misc_feature (18)..(139): Homolog of NCBI NO: 665932 NR Description: ORF I
  misc_feature (1)..(164): Homolog of NCBI NO: 7460221 NR Description: abscisic acid-induced protein ABA7 - barley
MAYRLPLAGVRASNYEARELPSNSYLDLGGPYGKFVPFIIAGEGGFGEHKQLNWTNLFLLNKLGSDIDRDHQEVIDQIKAEKDVEKIKELIERLPREIAEHLEGHETHEQVEILADLSRNMDQRMSYLSREIRHLRSDLGQVMQGIGEIREALARMERQNPCFRP

SEQ ID NO: 51273 - DNA, 957 bp, Glycine max
  misc_feature (1)..(957): Ceres Seq. ID no. 14311709
ctgcttctcattcgtcccttcctctccgctccgtccctttctctccgctgcgtcccttttcgccagatccgacgcccttccggcttgtcgttgcctcgccgccgtgacaaagttgggagaagggggttggccgtcgtcttgcggttgggccggagcagcggtgggctggacgccgcttcctgctgtcttcgagcgatgggagagggttagggtctgtcgtttgccgttcgattggtgactgttgcgggttggcagcgcgccgtgtagctgcgagacaacttccttgttgatctgccgtcctgctgcagtgttatatactgtcgaattccaaaaacgaggtctgccacacgcgcatatcctcatctggcgtaaaggagacaaagatggtgatcactgccctagctgctcttgtcccaggaaacaagaagttgactattcgtgtgtatgtctcaaggctgtggcagcatcgtggaactactgataatggtcctatcattcatactgacatggtgcttgtggatgctgagggttctcatatctatgctgagatctctaaagactgggtaagcaagtttatggagaagctcagggaaggctgtgcttatgagatttgtcagtttctggtgttcccaaataagcgttactttaaggccgtcgatgcagcaaacatgatctgtttcaatagattcactacggtcaatcctaataccgacctggaggtcgcgttcccgttttgcactatgcacctgtccaaccttagtgtagattatttgtaatcagtactatgccccagtatacctgcataagactactaccctttgctattgtaattgtaatcagtactatctagatggatgatagcaggcaatgtatacctgcataagactactaccccttagctctctgatttatgaacctgtccggtgtttagtttggtattacgtatgtacctcttcc

SEQ ID NO: 51274 - protein, 130 aa, Glycine max
  peptide (1)..(130): Ceres Seq. ID no. 14311710
  misc_feature (1)..(97): Homolog of NCBI NO: 38346906 NR Description: OSJNBb0015N08.3 [Oryza sativa (japonica
  misc_feature (1)..(130): Homolog of NCBI NO: 24960752 NR Description: Putative helicase [Oryza sativa (japonica
  misc_feature (1)..(125): Homolog of NCBI NO: 38346787 NR Description: OSJNBa0095H06.12 [Oryza sativa (japonica
MVITALAALVPGNKKLTIRVYVSRLWQHRGTTDNGPIIHTDMVLVDAEGSHIYAEISKDWVSKFMEKLREGCAYEICQFLVFPNKRYFKAVDAANMICFNRFTTVNPNTDLEVAFPFCTMHLSNLSVDYL

SEQ ID NO: 51275 - protein, 89 aa, Glycine max
  peptide (1)..(89): Ceres Seq. ID no. 14311711
  misc_feature (1)..(56): Homolog of NCBI NO: 38346906 NR Description: OSJNBb0015N08.3 [Oryza sativa (japonica
  misc_feature (1)..(89): Homolog of NCBI NO: 24960752 NR Description: Putative helicase [Oryza sativa (japonica
  misc_feature (1)..(84): Homolog of NCBI NO: 38346787 NR Description: OSJNBa0095H06.12 [Oryza sativa (japonica
MVLVDAEGSHIYAEISKDWVSKFMEKLREGCAYEICQFLVFPNKRYFKAVDAANMICFNRFTTVNPNTDLEVAFPFCTMHLSNLSVDYL

SEQ ID NO: 51276 - protein, 78 aa, Glycine max
  peptide (1)..(78): Ceres Seq. ID no. 14311712
CFSFVPSSPLRPFLSAASLFARSDALPACRCLAAVTKLGEGGWPSSCGWAGAAVGWTPLPAVFERWERVRVCRLPFDW

SEQ ID NO: 51277 - DNA, 926 bp, Glycine max
  misc_feature (1)..(926): Ceres Seq. ID no. 13594474
aacatcctaatcgaaaacttttctttcttgaggccaaagccgcagacagcacgcacgcacagcccaccgtcgccgctccaaatctcgcccgctcgcccgccgctctccgccgccatggacgccgcctcctcgctcatgggcgggccctcctccgccgacgcccccaccgacggcgagcaccggatgggcaccaccatcgtcggggtatgctacgccggcggggtcgtcctcgccgccgactccaggaccagcaccggaatgtatgtggcaaaccgtgcttcggacaagattagtcagctcactgataatgtctatgtctgccgttctggatctgccgctgatacacaagttatttcagattatgtgcgctattttctccaccagcacacaattcagcttgggcaaccagctaccgtgaaagtcgcatccaacttggttaggttgctggcctatcagaacaagagcatgttgcaagctggtatgatagttggtggatgggataagtacgaaggaggccaaatttactcggtccctcttggtggaacgattctgaggcaaccattcgcaattggaggatctggttccagctatctgtatggattgatggatcatgaatggaaagaggggatgacccaggaagaagctgagaaatttgtggtgaaggtggtttcccttgccattgcacgtgatggtgctagtggaggggttgttcgcaccgttactataaatgaggagggcgtgaagaggagcttccatcctggcgacaagctgccactgtggcatgaggagatggagccccagaactcgctcctcgacattctcgcggccgtgagctctgatgccatggtccagtgagccgtgcttcctactggttcttcctactgtgtctgatgatgacttgttctgaatttgagcttaatgttgtt

SEQ ID NO: 51278 - protein, 284 aa, Glycine max
  peptide (1)..(284): Ceres Seq. ID no. 13594475
  misc_feature (60)..(242): Pfam Name: Proteasome A-type and B-type Pfam Description: Proteasome A-type and B-type
  misc_feature (37)..(258): Homolog of NCBI NO: 464446 NR Description: Proteasome subunit beta type 6 precursor delta chain) (Macropain delta chain) (Multicatalytic
  misc_feature (41)..(258): Homolog of NCBI NO: 17380261 NR Description: Proteasome subunit beta type 6 precursor delta chain) (Macropain delta chain) (Multicatalytic
  misc_feature (37)..(258): Homolog of NCBI NO: 26347247 NR Description: unnamed protein product [Mus musculus]
  misc_feature (35)..(258): Homolog of NCBI NO: 23110925 NR Description: proteasome beta 6 subunit
  misc_feature (38)..(263): Homolog of NCBI NO: 2055301 NR Description: proteasome subunit Y [Lethenteron japonicum]
  misc_feature (58)..(251): Homolog of NCBI NO: 19113087 NR Description: proteasome component precursor
  misc_feature (57)..(283): Homolog of NCBI NO: 3024440 NR Description: Proteasome subunit beta type 6 precursor
  misc_feature (62)..(282): Homolog of NCBI NO: 21592365 NR Description: multicatalytic endopeptidase complex, proteasome
  misc_feature (53)..(282): Homolog of NCBI NO: 15235889 NR Description: 20S proteasome beta subunit A (PBA1) [Arabidopsis
  misc_feature (39)..(284): Homolog of NCBI NO: 8671502 NR Description: beta 1 subunit of 20S proteasome
NILIENFSFLRPKPQTARTHSPPSPLQISPARPPLSAAMDAASSLMGGPSSADAPTDGEHRMGTTIVGVCYAGGVVLAADSRTSTGMYVANRASDKISQLTDNVYVCRSGSAADTQVISDYVRYFLHQHTIQLGQPATVKVASNLVRLLAYQNKSMLQAGMIVGGWDKYEGGQIYSVPLGGTILRQPFAIGGSGSSYLYGLMDHEWKEGMTQEEAEKFVVKVVSLAIARDGASGGVVRTVTINEEGVKRSFHPGDKLPLWHEEMEPQNSLLDILAAVSSDAMVQ

SEQ ID NO: 51279 - protein, 246 aa, Glycine max
  peptide (1)..(246): Ceres Seq. ID no. 13594476
  misc_feature (22)..(204): Pfam Name: Proteasome A-type and B-type Pfam Description: Proteasome A-type and B-type
  misc_feature (1)..(220): Homolog of NCBI NO: 464446 NR Description: Proteasome subunit beta type 6 precursor delta chain) (Macropain delta chain) (Multicatalytic
  misc_feature (3)..(220): Homolog of NCBI NO: 17380261 NR Description: Proteasome subunit beta type 6 precursor delta chain) (Macropain delta chain) (Multicatalytic
  misc_feature (1)..(220): Homolog of NCBI NO: 26347247 NR Description: unnamed protein product [Mus musculus]
  misc_feature (1)..(220): Homolog of NCBI NO: 23110925 NR Description: proteasome beta 6 subunit
  misc_feature (1)..(225): Homolog of NCBI NO: 2055301 NR Description: proteasome subunit Y [Lethenteron japonicum]
  misc_feature (20)..(213): Homolog of NCBI NO: 19113087 NR Description: proteasome component precursor
  misc_feature (19)..(245): Homolog of NCBI NO: 3024440 NR Description: Proteasome subunit beta type 6 precursor
  misc_feature (24)..(244): Homolog of NCBI NO: 21592365 NR Description: multicatalytic endopeptidase complex, proteasome
  misc_feature (15)..(244): Homolog of NCBI NO: 15235889 NR Description: 20S proteasome beta subunit A (PBA1) [Arabidopsis
  misc_feature (1)..(246): Homolog of NCBI NO: 8671502 NR Description: beta 1 subunit of 20S proteasome
MDAASSLMGGPSSADAPTDGEHRMGTTIVGVCYAGGVVLAADSRTSTGMYVANRASDKISQLTDNVYVCRSGSAADTQVISDYVRYFLHQHTIQLGQPATVKVASNLVRLLAYQNKSMLQAGMIVGGWDKYEGGQIYSVPLGGTILRQPFAIGGSGSSYLYGLMDHEWKEGMTQEEAEKFVVKVVSLAIARDGASGGVVRTVTINEEGVKRSFHPGDKLPLWHEEMEPQNSLLDILAAVSSDAMVQ

SEQ ID NO: 51280 - protein, 239 aa, Glycine max
  peptide (1)..(239): Ceres Seq. ID no. 13594477
  misc_feature (15)..(197): Pfam Name: Proteasome A-type and B-type Pfam Description: Proteasome A-type and B-type
  misc_feature (1)..(213): Homolog of NCBI NO: 464446 NR Description: Proteasome subunit beta type 6 precursor delta chain) (Macropain delta chain) (Multicatalytic
  misc_feature (1)..(213): Homolog of NCBI NO: 17380261 NR Description: Proteasome subunit beta type 6 precursor delta chain) (Macropain delta chain) (Multicatalytic
  misc_feature (1)..(213): Homolog of NCBI NO: 26347247 NR Description: unnamed protein product [Mus musculus]
  misc_feature (1)..(213): Homolog of NCBI NO: 23110925 NR Description: proteasome beta 6 subunit
  misc_feature (1)..(218): Homolog of NCBI NO: 2055301 NR Description: proteasome subunit Y [Lethenteron japonicum]
  misc_feature (13)..(206): Homolog of NCBI NO: 19113087 NR Description: proteasome component precursor
  misc_feature (12)..(238): Homolog of NCBI NO: 3024440 NR Description: Proteasome subunit beta type 6 precursor
  misc_feature (17)..(237): Homolog of NCBI NO: 21592365 NR Description: multicatalytic endopeptidase complex, proteasome
  misc_feature (8)..(237): Homolog of NCBI NO: 15235889 NR Description: 20S proteasome beta subunit A (PBA1) [Arabidopsis
  misc_feature (1)..(239): Homolog of NCBI NO: 8671502 NR Description: beta 1 subunit of 20S proteasome
MGGPSSADAPTDGEHRMGTTIVGVCYAGGVVLAADSRTSTGMYVANRASDKISQLTDNVYVCRSGSAADTQVISDYVRYFLHQHTIQLGQPATVKVASNLVRLLAYQNKSMLQAGMIVGGWDKYEGGQIYSVPLGGTILRQPFAIGGSGSSYLYGLMDHEWKEGMTQEEAEKFVVKVVSLAIARDGASGGVVRTVTINEEGVKRSFHPGDKLPLWHEEMEPQNSLLDILAAVSSDAMVQ

SEQ ID NO: 51281 - DNA, 1148 bp, Glycine max
  misc_feature (1)..(1148): Ceres Seq. ID no. 15174863
aagcaaagtagcatacattgggcaaactaggccagcttcgcctcccctcccacatcagccatggctgctcaagcagtagtagctccatccatgatgagtgatccagagagtactactgccaagagttcaacaacacaagaagaagaagatgtcctcccacccaaggatttcgtagccgcacttccagtaagagaggggtggtctgaaccactggttcaatacaagaactactggttcaggccgaggctcctggagcagatcctgctcgttcagcacgcctttgtgccccgcgccgacgacatcatcctcgccacgcagcccaaatgcggcaccacctggctcaaagccctcgccttcaccatcgccaaccgatcccgctacggcttcagcgaccacccgctcctcacacgccacccacagcatgtcgtgccgttcatcgagatcccgggcgccggcccgaaccacaccgacatccatacacttccgcctccgaggcttctcgccacgcacatgcccatgtcgttgctcccgccgggcacgagatcggtcggctgccgggtcgtgtacctgtgccgggaccccaaagacgccctcgtgtcaaggctgcacttcgagaacaaggcgttccagggcaccaatctgtccatggacaatgctttcagcatgttctgcgaggggttctcgccctatggccccttctgggatcactgccttgggtactggagggagagcatagcaaggccggacaacgtcctcttcttgaagtatgaagagatcaagtccgatcctgtgcccgtggtgaggaagctggcgaaatttctcggcgtcccgctgaccgaggaggaggagagctctggtgttgctcaagaggtggtgaagttgtgcagctttgagacgcttaccagcctgcaagtgaatcaggtcggcggcgttcgtcacggtgataaaattttcatgagtaactctgtgttttacagaaaaggagaagtaggggactgggcaaaccacatgagccacgtgatgggggaggagttggatcgcatcgtccaacaaaagcttgagggatctgggcttgtgttttgacttttgagttgttgttatctgttcatttctcctttcctcaccatgtacgcggtattgcacattac

SEQ ID NO: 51282 - protein, 340 aa, Glycine max
  peptide (1)..(340): Ceres Seq. ID no. 15174864
  misc_feature (80)..(337): Pfam Name: Sulfotransferase domain Pfam Description: Sulfotransferase domain
  misc_feature (21)..(338): Homolog of NCBI NO: 40253319 NR Description: putative flavonol 3-sulfotransferase
  misc_feature (35)..(340): Homolog of NCBI NO: 15230602 NR Description: sulfotransferase family [Arabidopsis thaliana]
  misc_feature (1)..(339): Homolog of NCBI NO: 21593660 NR Description: putative flavonol sulfotransferase [Arabidopsis
  misc_feature (25)..(339): Homolog of NCBI NO: 21593087 NR Description: putative flavonol sulfotransferase [Arabidopsis
  misc_feature (1)..(339): Homolog of NCBI NO: 15221130 NR Description: sulfotransferase family [Arabidopsis thaliana]
  misc_feature (235)..(340): Homolog of NCBI NO: 34905062 NR Description: P0686C03.14 [Oryza sativa (japonica
  misc_feature (14)..(187): Homolog of NCBI NO: 34905062 NR Description: P0686C03.14 [Oryza sativa (japonica
  misc_feature (25)..(339): Homolog of NCBI NO: 15221131 NR Description: sulfotransferase family [Arabidopsis thaliana]
  misc_feature (11)..(339): Homolog of NCBI NO: 15221820 NR Description: sulfotransferase family [Arabidopsis thaliana]
  misc_feature (36)..(338): Homolog of NCBI NO: 34905060 NR Description: putative flavonol 4'-sulfotransferase
MAAQAVVAPSMMSDPESTTAKSSTTQEEEDVLPPKDFVAALPVREGWSEPLVQYKNYWFRPRLLEQILLVQHAFVPRADDIILATQPKCGTTWLKALAFTIANRSRYGFSDHPLLTRHPQHVVPFIEIPGAGPNHTDIHTLPPPRLLATHMPMSLLPPGTRSVGCRVVYLCRDPKDALVSRLHFENKAFQGTNLSMDNAFSMFCEGFSPYGPFWDHCLGYWRESIARPDNVLFLKYEEIKSDPVPVVRKLAKFLGVPLTEEEESSGVAQEVVKLCSFETLTSLQVNQVGGVRHGDKIFMSNSVFYRKGEVGDWANHMSHVMGEELDRIVQQKLEGSGLVF

SEQ ID NO: 51283 - protein, 330 aa, Glycine max
  peptide (1)..(330): Ceres Seq. ID no. 15174865
  misc_feature (70)..(327): Pfam Name: Sulfotransferase domain Pfam Description: Sulfotransferase domain
  misc_feature (11)..(328): Homolog of NCBI NO: 40253319 NR Description: putative flavonol 3-sulfotransferase
  misc_feature (25)..(330): Homolog of NCBI NO: 15230602 NR Description: sulfotransferase family [Arabidopsis thaliana]
  misc_feature (1)..(329): Homolog of NCBI NO: 21593660 NR Description: putative flavonol sulfotransferase [Arabidopsis
  misc_feature (15)..(329): Homolog of NCBI NO: 21593087 NR Description: putative flavonol sulfotransferase [Arabidopsis
  misc_feature (1)..(329): Homolog of NCBI NO: 15221130 NR Description: sulfotransferase family [Arabidopsis thaliana]
  misc_feature (225)..(330): Homolog of NCBI NO: 34905062 NR Description: P0686C03.14 [Oryza sativa (japonica
  misc_feature (4)..(177): Homolog of NCBI NO: 34905062 NR Description: P0686C03.14 [Oryza sativa (japonica
  misc_feature (15)..(329): Homolog of NCBI NO: 15221131 NR Description: sulfotransferase family [Arabidopsis thaliana]
  misc_feature (1)..(329): Homolog of NCBI NO: 15221820 NR Description: sulfotransferase family [Arabidopsis thaliana]
  misc_feature (26)..(328): Homolog of NCBI NO: 34905060 NR Description: putative flavonol 4'-sulfotransferase
MMSDPESTTAKSSTTQEEEDVLPPKDFVAALPVREGWSEPLVQYKNYWFRPRLLEQILLVQHAFVPRADDIILATQPKCGTTWLKALAFTIANRSRYGFSDHPLLTRHPQHVVPFIEIPGAGPNHTDIHTLPPPRLLATHMPMSLLPPGTRSVGCRVVYLCRDPKDALVSRLHFENKAFQGTNLSMDNAFSMFCEGFSPYGPFWDHCLGYWRESIARPDNVLFLKYEEIKSDPVPVVRKLAKFLGVPLTEEEESSGVAQEVVKLCSFETLTSLQVNQVGGVRHGDKIFMSNSVFYRKGEVGDWANHMSHVMGEELDRIVQQKLEGSGLVF

SEQ ID NO: 51284 - protein, 329 aa, Glycine max
  peptide (1)..(329): Ceres Seq. ID no. 15174866
  misc_feature (69)..(326): Pfam Name: Sulfotransferase domain Pfam Description: Sulfotransferase domain
  misc_feature (10)..(327): Homolog of NCBI NO: 40253319 NR Description: putative flavonol 3-sulfotransferase
  misc_feature (24)..(329): Homolog of NCBI NO: 15230602 NR Description: sulfotransferase family [Arabidopsis thaliana]
  misc_feature (1)..(328): Homolog of NCBI NO: 21593660 NR Description: putative flavonol sulfotransferase [Arabidopsis
  misc_feature (14)..(328): Homolog of NCBI NO: 21593087 NR Description: putative flavonol sulfotransferase [Arabidopsis
  misc_feature (1)..(328): Homolog of NCBI NO: 15221130 NR Description: sulfotransferase family [Arabidopsis thaliana]
  misc_feature (224)..(329): Homolog of NCBI NO: 34905062 NR Description: P0686C03.14 [Oryza sativa (japonica
  misc_feature (3)..(176): Homolog of NCBI NO: 34905062 NR Description: P0686C03.14 [Oryza sativa (japonica
  misc_feature (14)..(328): Homolog of NCBI NO: 15221131 NR Description: sulfotransferase family [Arabidopsis thaliana]
  misc_feature (1)..(328): Homolog of NCBI NO: 15221820 NR Description: sulfotransferase family [Arabidopsis thaliana]
  misc_feature (25)..(327): Homolog of NCBI NO: 34905060 NR Description: putative flavonol 4'-sulfotransferase
MSDPESTTAKSSTTQEEEDVLPPKDFVAALPVREGWSEPLVQYKNYWFRPRLLEQILLVQHAFVPRADDIILATQPKCGTTWLKALAFTIANRSRYGFSDHPLLTRHPQHVVPFIEIPGAGPNHTDIHTLPPPRLLATHMPMSLLPPGTRSVGCRVVYLCRDPKDALVSRLHFENKAFQGTNLSMDNAFSMFCEGFSPYGPFWDHCLGYWRESIARPDNVLFLKYEEIKSDPVPVVRKLAKFLGVPLTEEEESSGVAQEVVKLCSFETLTSLQVNQVGGVRHGDKIFMSNSVFYRKGEVGDWANHMSHVMGEELDRIVQQKLEGSGLVF

SEQ ID NO: 51285 - DNA, 1119 bp, Glycine max
  misc_feature (1)..(1119): Ceres Seq. ID no. 13594482
aaaaatgccactgctcctccgccgacccctctccccctccctcgtctcctccttcttcctccgccgccgctcaatgtcttccaaatccgatccaatcagcccctccaacacccgaatcggctggatcggaaccggcgtcatgggccggtcaatgtgcggacacctaatcaaagccggatactccgtcaccgtcttcaaccgcacaatctccaaagcccagcctctcctcgccatgggcgctaacctcgccgcctcgccgaactccctcgcttcccaatccgacgtcgtcttctccatcgtcggctacccctccgacgtccgccgcgtcctcctcgatccaaactccggcgccttatccggcctctctcccggcggcgtcctcgtcgacatgaccacctccgagccttctctagccgaggagatctccaaatcagcttcctccgcgggctgcttctcagtcgacgctcccgtctccggcggagacctcggcgctaaaaacgggaagctctcgatcttcgccgggggagacgaagcaacggtgaagcgtctggatccattgtttcgtttaatggggaaagtcaacttcatgggagcgagcgggaaggggcagttcgctaagctggcgaatcaggtcacgatcgcttcgacgatggtggggctcgtcgaagggatcgtgtacgcgcacaaggccgggctcgatgtgaggaagtttctagaagcgatttcgaccggagccgcgggttcgaagtcgatagatttgtatggggagaggattctcaagagggatttcgatccggggttctatgtggatcatttcgttaaggatttggggatttgtttgaacgagtgtcagaggatggggttggctttgcctgggttggctcttgcgcagcagctttacttgtctctcaaggcacatggtgaaggtggtcttggaactcaagctctcatcttggctcttgagcgacttaataatgtctctgttcaaccaagtgtctgattatgtttttatgttgatttggagaaaaaagatttgaacttttgttgtgtatcgttgcttaaacatgaacttttgctggaatgtgtattgtttagatatatagaagtgtattgttggtt

SEQ ID NO: 51286 - protein, 332 aa, Glycine max
  peptide (1)..(332): Ceres Seq. ID no. 13594483
  misc_feature (36)..(197): Pfam Name: NAD binding domain of 6-phosphogluconate dehydrogenase Pfam Description: NAD binding domain of 6-phosphogluconate
  misc_feature (38)..(317): Homolog of NCBI NO: 16803045 NR Description: similar to 3-hydroxyisobutyrate dehydrogenase (B.
  misc_feature (36)..(316): Homolog of NCBI NO: 15896585 NR Description: Dehydrogenase related to 3-hydroxyisobutyrate
  misc_feature (38)..(317): Homolog of NCBI NO: 16800073 NR Description: similar to 3-hydroxyisobutyrate dehydrogenase (B.
  misc_feature (32)..(320): Homolog of NCBI NO: 23098036 NR Description: 3-hydroxyisobutyrate dehydrogenase
  misc_feature (32)..(316): Homolog of NCBI NO: 23113025 NR Description: hypothetical protein [Desulfitobacterium
  misc_feature (32)..(327): Homolog of NCBI NO: 30698779 NR Description: dehydrogenase -related [Arabidopsis thaliana]
  misc_feature (32)..(327): Homolog of NCBI NO: 25283629 NR Description: probable dehydrogenase F23N20.17
  misc_feature (32)..(327): Homolog of NCBI NO: 18409781 NR Description: dehydrogenase -related [Arabidopsis thaliana]
  misc_feature (29)..(325): Homolog of NCBI NO: 34909392 NR Description: putative dehydrogenase [Oryza sativa (japonica
  misc_feature (2)..(331): Homolog of NCBI NO: 15233455 NR Description: expressed protein [Arabidopsis thaliana]
KMPLLLRRPLSPSLVSSFFLRRRSMSSKSDPISPSNTRIGWIGTGVMGRSMCGHLIKAGYSVTVFNRTISKAQPLLAMGANLAASPNSLASQSDVVFSIVGYPSDVRRVLLDPNSGALSGLSPGGVLVDMTTSEPSLAEEISKSASSAGCFSVDAPVSGGDLGAKNGKLSIFAGGDEATVKRLDPLFRLMGKVNFMGASGKGQFAKLANQVTIASTMVGLVEGIVYAHKAGLDVRKFLEAISTGAAGSKSIDLYGERILKRDFDPGFYVDHFVKDLGICLNECQRMGLALPGLALAQQLYLSLKAHGEGGLGTQALILALERLNNVSVQPSV

SEQ ID NO: 51287 - protein, 331 aa, Glycine max
  peptide (1)..(331): Ceres Seq. ID no. 13594484
  misc_feature (35)..(196): Pfam Name: NAD binding domain of 6-phosphogluconate dehydrogenase Pfam Description: NAD binding domain of 6-phosphogluconate
  misc_feature (37)..(316): Homolog of NCBI NO: 16803045 NR Description: similar to 3-hydroxyisobutyrate dehydrogenase (B.
  misc_feature (35)..(315): Homolog of NCBI NO: 15896585 NR Description: Dehydrogenase related to 3-hydroxyisobutyrate
  misc_feature (37)..(316): Homolog of NCBI NO: 16800073 NR Description: similar to 3-hydroxyisobutyrate dehydrogenase (B.
  misc_feature (31)..(319): Homolog of NCBI NO: 23098036 NR Description: 3-hydroxyisobutyrate dehydrogenase
  misc_feature (31)..(315): Homolog of NCBI NO: 23113025 NR Description: hypothetical protein [Desulfitobacterium
  misc_feature (31)..(326): Homolog of NCBI NO: 30698779 NR Description: dehydrogenase -related [Arabidopsis thaliana]
  misc_feature (31)..(326): Homolog of NCBI NO: 25283629 NR Description: probable dehydrogenase F23N20.17
  misc_feature (31)..(326): Homolog of NCBI NO: 18409781 NR Description: dehydrogenase -related [Arabidopsis thaliana]
  misc_feature (28)..(324): Homolog of NCBI NO: 34909392 NR Description: putative dehydrogenase [Oryza sativa (japonica
  misc_feature (1)..(330): Homolog of NCBI NO: 15233455 NR Description: expressed protein [Arabidopsis thaliana]
MPLLLRRPLSPSLVSSFFLRRRSMSSKSDPISPSNTRIGWIGTGVMGRSMCGHLIKAGYSVTVFNRTISKAQPLLAMGANLAASPNSLASQSDVVFSIVGYPSDVRRVLLDPNSGALSGLSPGGVLVDMTTSEPSLAEEISKSASSAGCFSVDAPVSGGDLGAKNGKLSIFAGGDEATVKRLDPLFRLMGKVNFMGASGKGQFAKLANQVTIASTMVGLVEGIVYAHKAGLDVRKFLEAISTGAAGSKSIDLYGERILKRDFDPGFYVDHFVKDLGICLNECQRMGLALPGLALAQQLYLSLKAHGEGGLGTQALILALERLNNVSVQPSV

SEQ ID NO: 51288 - protein, 308 aa, Glycine max
  peptide (1)..(308): Ceres Seq. ID no. 13594485
  misc_feature (12)..(173): Pfam Name: NAD binding domain of 6-phosphogluconate dehydrogenase Pfam Description: NAD binding domain of 6-phosphogluconate
  misc_feature (14)..(293): Homolog of NCBI NO: 16803045 NR Description: similar to 3-hydroxyisobutyrate dehydrogenase (B.
  misc_feature (12)..(292): Homolog of NCBI NO: 15896585 NR Description: Dehydrogenase related to 3-hydroxyisobutyrate
  misc_feature (14)..(293): Homolog of NCBI NO: 16800073 NR Description: similar to 3-hydroxyisobutyrate dehydrogenase (B.
  misc_feature (8)..(296): Homolog of NCBI NO: 23098036 NR Description: 3-hydroxyisobutyrate dehydrogenase
  misc_feature (8)..(292): Homolog of NCBI NO: 23113025 NR Description: hypothetical protein [Desulfitobacterium
  misc_feature (8)..(303): Homolog of NCBI NO: 30698779 NR Description: dehydrogenase -related [Arabidopsis thaliana]
  misc_feature (8)..(303): Homolog of NCBI NO: 25283629 NR Description: probable dehydrogenase F23N20.17
  misc_feature (8)..(303): Homolog of NCBI NO: 18409781 NR Description: dehydrogenase -related [Arabidopsis thaliana]
  misc_feature (5)..(301): Homolog of NCBI NO: 34909392 NR Description: putative dehydrogenase [Oryza sativa (japonica
  misc_feature (1)..(307): Homolog of NCBI NO: 15233455 NR Description: expressed protein [Arabidopsis thaliana]
MSSKSDPISPSNTRIGWIGTGVMGRSMCGHLIKAGYSVTVFNRTISKAQPLLAMGANLAASPNSLASQSDVVFSIVGYPSDVRRVLLDPNSGALSGLSPGGVLVDMTTSEPSLAEEISKSASSAGCFSVDAPVSGGDLGAKNGKLSIFAGGDEATVKRLDPLFRLMGKVNFMGASGKGQFAKLANQVTIASTMVGLVEGIVYAHKAGLDVRKFLEAISTGAAGSKSIDLYGERILKRDFDPGFYVDHFVKDLGICLNECQRMGLALPGLALAQQLYLSLKAHGEGGLGTQALILALERLNNVSVQPSV

SEQ ID NO: 51289 - DNA, 1087 bp, Glycine max
  misc_feature (1)..(1087): Ceres Seq. ID no. 13594490
accccccatccccatctcgctctcgcggccgagagatcgaatcggagaagaagaaggagcggagaggcctctgctgccctagctccgccgccccccaccagccatggcgctcgccgctcgcctcgtatcccgctcccgccagttatattctgtccaagctgctttggccaatggaggtctcactcaagtccgctcatttgccaaggaggcagctcctgtcagcggagatgacctattgaagggcatctttttttgaggtgaagaaaaagtttgagaccgcacttggggtccttaagaaggagaagatcacgattgacccagatgaccaaacagcagttgctaactatgcccaagtcatgaggactgtaagagaaaaggcagatcttctttctgattctcagagaattaaatatactattgagactttcacgaagggcatccctgatgcaaggacgtacttggatacccttcagcagctcaggaaaaagagtggtctcatagatgatatgggtattgaggatatgatgatggaagctctcgagaaagttgagaaggacattaagaaacctcttctgaggagtgacaagaagaacatgggtctcctcttggcagagtttgacaagattaacaaaaagcttggcattcggaaggaggatcttcccaagattgaggaaaatcttgaaatggaacttgccaaagctgagctgacggaacttaagaaggaagttgttgaagcaatggagggccaactaaagagggaggagtttaaagatgaggcgatgcctgacgtcaggaagttggacattagaaacttcctctaggtccctgattgatgataaccctcggggtgaccgatctgtgatttttcttttcaagtgacggccggtgctgtaagccacaccgaatggatgttattgttgctttttgtaataaaactgcaccgaaaatatgacagtcaaccgttgagttgggttgcttggttaccttccggcgttgagagttttgtttcttaggctggcaacgtgaacatcaagcgttgctgaatatgtgcctgcggctgctgttgtatgtagtagccacacattat

SEQ ID NO: 51290 - protein, 154 aa, Glycine max
  peptide (1)..(154): Ceres Seq. ID no. 13594491
  misc_feature (1)..(93): Homolog of NCBI NO: 1084358 NR Description: ATP synthase - soybean
  misc_feature (1)..(134): Homolog of NCBI NO: 30681554 NR Description: ATP synthase -related [Arabidopsis thaliana]
  misc_feature (1)..(154): Homolog of NCBI NO: 21592716 NR Description: putative ATP synthase [Arabidopsis thaliana]
  misc_feature (1)..(154): Homolog of NCBI NO: 15227104 NR Description: ATP synthase -related [Arabidopsis thaliana]
MRTVREKADLLSDSQRIKYTIETFTKGIPDARTYLDTLQQLRKKSGLIDDMGIEDMMMEALEKVEKDIKKPLLRSDKKNMGLLLAEFDKINKKLGIRKEDLPKIEENLEMELAKAELTELKKEVVEAMEGQLKREEFKDEAMPDVRKLDIRNFL

SEQ ID NO: 51291 - protein, 104 aa, Glycine max
  peptide (1)..(104): Ceres Seq. ID no. 13594492
  misc_feature (1)..(43): Homolog of NCBI NO: 1084358 NR Description: ATP synthase - soybean
  misc_feature (1)..(84): Homolog of NCBI NO: 30681554 NR Description: ATP synthase -related [Arabidopsis thaliana]
  misc_feature (1)..(104): Homolog of NCBI NO: 21592716 NR Description: putative ATP synthase [Arabidopsis thaliana]
  misc_feature (1)..(104): Homolog of NCBI NO: 15227104 NR Description: ATP synthase -related [Arabidopsis thaliana]
MGIEDMMMEALEKVEKDIKKPLLRSDKKNMGLLLAEFDKINKKLGIRKEDLPKIEENLEMELAKAELTELKKEVVEAMEGQLKREEFKDEAMPDVRKLDIRNFL

SEQ ID NO: 51292 - protein, 99 aa, Glycine max
  peptide (1)..(99): Ceres Seq. ID no. 13594493
  misc_feature (1)..(38): Homolog of NCBI NO: 1084358 NR Description: ATP synthase - soybean
  misc_feature (1)..(79): Homolog of NCBI NO: 30681554 NR Description: ATP synthase -related [Arabidopsis thaliana]
  misc_feature (1)..(99): Homolog of NCBI NO: 21592716 NR Description: putative ATP synthase [Arabidopsis thaliana]
  misc_feature (1)..(99): Homolog of NCBI NO: 15227104 NR Description: ATP synthase -related [Arabidopsis thaliana]
MMMEALEKVEKDIKKPLLRSDKKNMGLLLAEFDKINKKLGIRKEDLPKIEENLEMELAKAELTELKKEVVEAMEGQLKREEFKDEAMPDVRKLDIRNFL

SEQ ID NO: 51293 - DNA, 968 bp, Glycine max
  misc_feature (1)..(968): Ceres Seq. ID no. 13594494
aatatacacggagaagagatcgtcatcatccgccaaaccagatcggctcggctgcttcctcttcttcaacttcgcagaatcgctggtcttctcgtcctctagttaagtccctcgacagcaatgggaggaggcaacgacggtcatgggtacccacccggtggccaggggggataccctccgcaagggtacccgccgcagcagggaggttaccctccacagcaaggatacccgcctgcacctggagcttacccacctgcacctggggcataccctcctgcacctggggcataccctcctgcgcccggagcgggtggcagtgacggggagaaggggctcctctccaacatcatgcacggtgttgccggtgctcatggtggtggccatggctacccatctggtggccacgggtaccccccgcagcagcatggataccctcagcaaggctaccctcctcagcatggctacccaccgcaacagcatggctaccctccacagcagcatggctatccccctgctggctaccctggctcatctggtcacagtggtagccatggaggaggaggcatgggcatgggcggcatgctagctggaggcgcagcagctgctgccgccgcttacggagcacacaagatttctcacggcggccacggtggaggtggacacatgatgggaggcatgatgggcggccatggaggctatggcggcgggtacggccaccacggcggcaagttcaagcacgggaagcacggccacggcaagttcaagcacggcaagcatgggaagcacggcatgttcggcggcggcggaaagttcaagaagtggaagtaatgcgctagctagtagcttcaccatggctgatgaatcaaaaaaaatacctaaactcttcgtgtaggcttccagaacttggtttggtcagggaaagcctttgagatgtatctaagcagggtgtggtgtggttgctgcccggc

SEQ ID NO: 51294 - protein, 235 aa, Glycine max
  peptide (1)..(235): Ceres Seq. ID no. 13594495
  misc_feature (1)..(229): Pfam Name: Dehydrin Pfam Description: Dehydrin
  misc_feature (87)..(235): Homolog of NCBI NO: 21553447 NR Description: putative glycine and proline-rich protein
  misc_feature (87)..(235): Homolog of NCBI NO: 18398103 NR Description: proline-rich protein family [Arabidopsis
  misc_feature (65)..(235): Homolog of NCBI NO: 15238005 NR Description: glycine/proline-rich protein [Arabidopsis
  misc_feature (43)..(228): Homolog of NCBI NO: 18422542 NR Description: proline-rich protein family [Arabidopsis
  misc_feature (64)..(235): Homolog of NCBI NO: 13543234 NR Description: Unknown (protein for MGC:12025) [Mus musculus]
  misc_feature (64)..(227): Homolog of NCBI NO: 8099125 NR Description: rice EST C27893 corresponds to a region of the
  misc_feature (86)..(235): Homolog of NCBI NO: 15234178 NR Description: glycine/proline-rich protein [Arabidopsis
  misc_feature (60)..(235): Homolog of NCBI NO: 13543234 NR Description: Unknown (protein for MGC:12025) [Mus musculus]
  misc_feature (67)..(235): Homolog of NCBI NO: 6478148 NR Description: putative glycine and proline-rich protein
  misc_feature (67)..(235): Homolog of NCBI NO: 33668156 NR Description: GPRP [Oryza sativa (indica cultivar-group)]
MGGGNDGHGYPPGGQGGYPPQGYPPQQGGYPPQQGYPPAPGAYPPAPGAYPPAPGAYPPAPGAGGSDGEKGLLSNIMHGVAGAHGGGHGYPSGGHGYPPQQHGYPQQGYPPQHGYPPQQHGYPPQQHGYPPAGYPGSSGHSGSHGGGGMGMGGMLAGGAAAAAAAYGAHKISHGGHGGGGHMMGGMMGGHGGYGGGYGHHGGKFKHGKHGHGKFKHGKHGKHGMFGGGGKFKKWK

SEQ ID NO: 51295 - protein, 159 aa, Glycine max
  peptide (1)..(159): Ceres Seq. ID no. 13594496
  misc_feature (1)..(153): Pfam Name: Dehydrin Pfam Description: Dehydrin
  misc_feature (11)..(159): Homolog of NCBI NO: 21553447 NR Description: putative glycine and proline-rich protein
  misc_feature (11)..(159): Homolog of NCBI NO: 18398103 NR Description: proline-rich protein family [Arabidopsis
  misc_feature (1)..(159): Homolog of NCBI NO: 15238005 NR Description: glycine/proline-rich protein [Arabidopsis
  misc_feature (1)..(152): Homolog of NCBI NO: 18422542 NR Description: proline-rich protein family [Arabidopsis
  misc_feature (1)..(159): Homolog of NCBI NO: 13543234 NR Description: Unknown (protein for MGC:12025) [Mus musculus]
  misc_feature (1)..(151): Homolog of NCBI NO: 8099125 NR Description: rice EST C27893 corresponds to a region of the
  misc_feature (10)..(159): Homolog of NCBI NO: 15234178 NR Description: glycine/proline-rich protein [Arabidopsis
  misc_feature (1)..(159): Homolog of NCBI NO: 13543234 NR Description: Unknown (protein for MGC:12025) [Mus musculus]
  misc_feature (1)..(159): Homolog of NCBI NO: 6478148 NR Description: putative glycine and proline-rich protein
  misc_feature (1)..(159): Homolog of NCBI NO: 33668156 NR Description: GPRP [Oryza sativa (indica cultivar-group)]
MHGVAGAHGGGHGYPSGGHGYPPQQHGYPQQGYPPQHGYPPQQHGYPPQQHGYPPAGYPGSSGHSGSHGGGGMGMGGMLAGGAAAAAAAYGAHKISHGGHGGGGHMMGGMMGGHGGYGGGYGHHGGKFKHGKHGHGKFKHGKHGKHGMFGGGGKFKKWK

SEQ ID NO: 51296 - protein, 147 aa, Glycine max
  peptide (1)..(147): Ceres Seq. ID no. 13594497
MGTHPVARGDTLRKGTRRSREVTLHSKDTRLHLELTHLHLGHTLLHLGHTLLRPERVAVTGRRGSSPTSCTVLPVLMVVAMATHLVATGTPRSSMDTLSKATLLSMATHRNSMATLHSSMAIPLLATLAHLVTVVAMEEEAWAWAAC

SEQ ID NO: 51297 - DNA, 1157 bp, Glycine max
  misc_feature (1)..(1157): Ceres Seq. ID no. 15171268
ctctccatctcgttcctcccccacctgcgcagccaagaagttcaaaccctagtccagcctgcgagcgccgacacgtcgcgccgtgcggcttcccgcaagcaggggctcgggccgaccgcgggggatgagcggcgcagcctacagggaccggggattcggcggcgccgcggagatggaccggaagcgcatcaaggaggcgctcgagaagcacacggagaggccgtccccgtccacctccaggggggcgtccagggagaaggagctgctcgccgccggcaagataaccactcagatcggcaaggtccccaaggtctccgacgtcgaggaattcgaaactgacagtgaagattctgatgttagtggttctgaaggagaggacacatcttggatttcatggttctgtagcttgcgaggcaacgaattcttctgtgagattgatgatgattatatacaggatgatttcaatctctgtggcctaagcagtcaggtgccatattatgattatgcacttgatctcatcctagacattgagtcttctaatggtgatgtattcactgaggagcaaaatgaattaattgagtcatctgcagagatgctgtatggtttaattcatgcacgttacatcttaaccagcaagggtctagctgcaatgttagagaagttcaagaactatgattttggcagatgccctcgagtatactgctgtggtcaaccctgtcttccagcaggacaatcagacattcctaggtcaagcacagtgaaggtgttttgtccaaaatgtgaagatttacactatccaaggtccaagtaccaaggcaacattgatggagcatactttggtacgacattccctcatctcttcttgatgacatacccacacctgaagccacagaagccatcacagcaatatgttccaagagtttttggcttcaaacttcacaagcaatcatgacgaacttttaccagtgagcgctatttgtttttacctagtgttagagatggaacaccttggcctgaaaatgttgtggcctcttgattcgagtactcgcgagctcgaatcttgctgtaaactgctgagcaactgtatctgttttgttgtatgactgttgtgtaatctaggtttcctcacttgatcaatctatgcacatttgcatgtt

SEQ ID NO: 51298 - protein, 275 aa, Glycine max
  peptide (1)..(275): Ceres Seq. ID no. 15171269
  misc_feature (84)..(262): Pfam Name: Casein kinase II regulatory subunit Pfam Description: Casein kinase II regulatory subunit
  misc_feature (74)..(275): Homolog of NCBI NO: 40746709 NR Description: hypothetical protein AN1272.2 [Aspergillus
  misc_feature (81)..(275): Homolog of NCBI NO: 29841444 NR Description: similar to NM_009975 Casein kinase II beta
  misc_feature (6)..(273): Homolog of NCBI NO: 15236597 NR Description: casein kinase II beta chain, putative
  misc_feature (1)..(274): Homolog of NCBI NO: 30689795 NR Description: casein kinase II beta chain, putative
  misc_feature (1)..(274): Homolog of NCBI NO: 15224934 NR Description: casein kinase II beta chain, putative
  misc_feature (10)..(273): Homolog of NCBI NO: 34901776 NR Description: OJ1058_B11.17 [Oryza sativa (japonica
  misc_feature (6)..(273): Homolog of NCBI NO: 11527004 NR Description: protein kinase CK2 regulatory subunit CK2B3 [Zea
  misc_feature (6)..(273): Homolog of NCBI NO: 21261784 NR Description: protein kinase Ck2 regulatory subunit 2
  misc_feature (17)..(275): Homolog of NCBI NO: 11527002 NR Description: protein kinase CK2 regulatory subunit CK2B2 [Zea
  misc_feature (1)..(275): Homolog of NCBI NO: 37536920 NR Description: putative casein kinase II beta subunit
MSGAAYRDRGFGGAAEMDRKRIKEALEKHTERPSPSTSRGASREKELLAAGKITTQIGKVPKVSDVEEFETDSEDSDVSGSEGEDTSWISWFCSLRGNEFFCEIDDDYIQDDFNLCGLSSQVPYYDYALDLILDIESSNGDVFTEEQNELIESSAEMLYGLIHARYILTSKGLAAMLEKFKNYDFGRCPRVYCCGQPCLPAGQSDIPRSSTVKVFCPKCEDLHYPRSKYQGNIDGAYFGTTFPHLFLMTYPHLKPQKPSQQYVPRVFGFKLHKQS

SEQ ID NO: 51299 - protein, 259 aa, Glycine max
  peptide (1)..(259): Ceres Seq. ID no. 15171270
  misc_feature (68)..(246): Pfam Name: Casein kinase II regulatory subunit Pfam Description: Casein kinase II regulatory subunit
  misc_feature (58)..(259): Homolog of NCBI NO: 40746709 NR Description: hypothetical protein AN1272.2 [Aspergillus
  misc_feature (65)..(259): Homolog of NCBI NO: 29841444 NR Description: similar to NM_009975 Casein kinase II beta
  misc_feature (1)..(257): Homolog of NCBI NO: 15236597 NR Description: casein kinase II beta chain, putative
  misc_feature (1)..(258): Homolog of NCBI NO: 30689795 NR Description: casein kinase II beta chain, putative
  misc_feature (1)..(258): Homolog of NCBI NO: 15224934 NR Description: casein kinase II beta chain, putative
  misc_feature (1)..(257): Homolog of NCBI NO: 34901776 NR Description: OJ1058_B11.17 [Oryza sativa (japonica
  misc_feature (1)..(257): Homolog of NCBI NO: 11527004 NR Description: protein kinase CK2 regulatory subunit CK2B3 [Zea
  misc_feature (1)..(257): Homolog of NCBI NO: 21261784 NR Description: protein kinase Ck2 regulatory subunit 2
  misc_feature (1)..(259): Homolog of NCBI NO: 11527002 NR Description: protein kinase CK2 regulatory subunit CK2B2 [Zea
  misc_feature (1)..(259): Homolog of NCBI NO: 37536920 NR Description: putative casein kinase II beta subunit
MDRKRIKEALEKHTERPSPSTSRGASREKELLAAGKITTQIGKVPKVSDVEEFETDSEDSDVSGSEGEDTSWISWFCSLRGNEFFCEIDDDYIQDDFNLCGLSSQVPYYDYALDLILDIESSNGDVFTEEQNELIESSAEMLYGLIHARYILTSKGLAAMLEKFKNYDFGRCPRVYCCGQPCLPAGQSDIPRSSTVKVFCPKCEDLHYPRSKYQGNIDGAYFGTTFPHLFLMTYPHLKPQKPSQQYVPRVFGFKLHKQS

SEQ ID NO: 51300 - DNA, 1007 bp, Glycine max
  misc_feature (1)..(1007): Ceres Seq. ID no. 13595844
aaatccgtcgagcagaaccaaatccgtcacgactccacgagcactcgagcagggcaacacagattcgcgcagcccacctcgtcgagcattccccatcagatctgatcgaatccggcggcggcggcgatggcggcggagaagccggccccggcgaaggtgctctactgcggcgtctgcggcctccccgcggagtactgcgaattcggccccgacttcgagcgctgcaagccgtggctccgcgcccacgcgcccagagtctaccccgacgagctcgtggcctcctcctccggtggcgatgataaggacgtgggcaaggtcggcgagcgcctccagggcgtcagcatctccaccgccgacggctccacaagcgcagggggtgcttcggcatccaagactgaagaggtgaaacgactgccgggtggtaagctcaagaaaaaggacaagcaagaggttattattgagaagattgtccgcaacaagcgcaagtgtgttactgtggtgaaaggcctggatttgtttggtgtaaagctgagtgatgcttcgaagaagcttggaaagaagtttgctactggagcttcggttgtcaagggcccaactgagaaggagcaaatcgatgtccaaggagacatatcatatgatgttgtggacttcattacagctacatggccagatgttcctgaatcggccgtatatttcattgaagatggaaggaaggttgctgctgcttgattgaatatggtttacaaggcaatacaccagtggagttacaaatatgatagaaatataaggcaagagatggccgttaaggcatgcctgtcacatgggttcttaatccttactcccgagatactactcgctccattttgacttgtgggtcagttcacaagtggtgttttaactaccgctggcacgtcgccttcgtgtatcatcttttatttgatagtcgagttcctcctgcaggcgagtatgacatccatatgtggtttatatatgtttaatgttttttc

SEQ ID NO: 51301 - protein, 200 aa, Glycine max
  peptide (1)..(200): Ceres Seq. ID no. 13595845
  misc_feature (8)..(173): Homolog of NCBI NO: 4755083 NR Description: density regulated protein drp1 [Homo sapiens]
  misc_feature (3)..(82): Homolog of NCBI NO: 11357422 NR Description: hypothetical protein F14F18.70 - Arabidopsis
  misc_feature (10)..(176): Homolog of NCBI NO: 6322474 NR Description: Hypothetical ORF; Yjr014wp [Saccharomyces
  misc_feature (8)..(196): Homolog of NCBI NO: 34872329 NR Description: similar to density-regulated protein [Rattus
  misc_feature (8)..(58): Homolog of NCBI NO: 18859973 NR Description: CG9099-PA [Drosophila melanogaster]
  misc_feature (82)..(196): Homolog of NCBI NO: 18859973 NR Description: CG9099-PA [Drosophila melanogaster]
  misc_feature (1)..(193): Homolog of NCBI NO: 19113595 NR Description: hypothetical protein [Schizosaccharomyces pombe]
  misc_feature (46)..(199): Homolog of NCBI NO: 11357422 NR Description: hypothetical protein F14F18.70 - Arabidopsis
  misc_feature (3)..(199): Homolog of NCBI NO: 22326739 NR Description: expressed protein [Arabidopsis thaliana]
  misc_feature (1)..(191): Homolog of NCBI NO: 34903554 NR Description: P0001B06.29 [Oryza sativa (japonica
MAAEKPAPAKVLYCGVCGLPAEYCEFGPDFERCKPWLRAHAPRVYPDELVASSSGGDDKDVGKVGERLQGVSISTADGSTSAGGASASKTEEVKRLPGGKLKKKDKQEVIIEKIVRNKRKCVTVVKGLDLFGVKLSDASKKLGKKFATGASVVKGPTEKEQIDVQGDISYDVVDFITATWPDVPESAVYFIEDGRKVAAA

SEQ ID NO: 51302 - protein, 134 aa, Glycine max
  peptide (1)..(134): Ceres Seq. ID no. 13595846
NPSSRTKSVTTPRALEQGNTDSRSPPRRAFPIRSDRIRRRRRWRRRSRPRRRCSTAASAASPRSTANSAPTSSAASRGSAPTRPESTPTSSWPPPPVAMIRTWARSASASRASASPPPTAPQAQGVLRHPRLKR

SEQ ID NO: 51303 - DNA, 960 bp, Glycine max
  misc_feature (1)..(960): Ceres Seq. ID no. 13638567
acatcctaatcgaaaaatcccacatcccatcccatccgcagcggctttattacctaccgagaagaagagagaaaaaaaggttcgagtgcgttcgagagtgaggagtgagaagagatggctccggtgaagctgtacggcgcgaccctgtcgtggaacgtcaccaggtgcgtggcggcgctggaggaagccggcgtcgagtacgagctcgtccccatcaacttcggcaccggcgagcacaagggccccgaccacctcgccaggaacccctttggccaggtgccagctttgcaggatggtgacttgtacgtcttcgaatcacgtgctatttgcaagtatgcgtgccgcaagagcaagccagagctgttgaaggagggcgacatcaaggagtcagctatggtggatgtgtggctcgaggtggaggcccatcagtacaccgccgcgctgagccccattctcttcgagtgccttatccatcctatgcttgggggagccactgaccagacggtcatcgatgctaaccttgttaagatcaagaacgtgctggcggtgtacgaggcgcacctgagcaagtccaagtacctggctggagacttcctcagtcttgcggaccttaaccatgtgtctgtcaccctgtgcttggcggctacaccctacgcgtctctgttcgacgcgtacccgcatgtgaaggcctggtggactgacctgctggcgaggccgtccgtccagaaggtcgctgcgctgatgaagccatgatcttagtttctggcgctcgttcgtcgcgaaataagccgaagtgtgtttcccccgatgtgtgcctgtccgagtgtgtgttcttgtgatgtctcctcgtgttgaatgttcaggcttgtgcttgcgatcctgtctagatcttgtactgaaatgagcattcctatgctctggtttaataataaattgtgcccagagattatctcagcttcg

SEQ ID NO: 51304 - protein, 212 aa, Glycine max
  peptide (1)..(212): Ceres Seq. ID no. 13638568
  misc_feature (1)..(210): Homolog of NCBI NO: 232200 NR Description: GLUTATHIONE S-TRANSFERASE 2 (GST CLASS-PHI)
  misc_feature (2)..(210): Homolog of NCBI NO: 3891607 NR Description: Chain A, Structure Of Glutathione S-Transferase-I
  misc_feature (1)..(212): Homolog of NCBI NO: 66615 NR Description: glutathione transferase (EC 2.5.1.18) I - maize
  misc_feature (2)..(212): Homolog of NCBI NO: 3891705 NR Description: Chain A, Glutathione S-Transferase I From Mais In
  misc_feature (1)..(212): Homolog of NCBI NO: 168489 NR Description: glutathione S-transferase I
  misc_feature (1)..(212): Homolog of NCBI NO: 121695 NR Description: Glutathione S-transferase I (GST-I) (GST-29) (GST
  misc_feature (1)..(212): Homolog of NCBI NO: 554565 NR Description: glutathione S-transferase
  misc_feature (1)..(212): Homolog of NCBI NO: 21212950 NR Description: glutathione-S-transferase, I subunit
  misc_feature (1)..(212): Homolog of NCBI NO: 5923877 NR Description: glutathione S-transferase [Triticum aestivum]
  misc_feature (1)..(212): Homolog of NCBI NO: 23504749 NR Description: glutathione transferase F1 [Triticum aestivum]
MAPVKLYGATLSWNVTRCVAALEEAGVEYELVPINFGTGEHKGPDHLARNPFGQVPALQDGDLYVFESRAICKYACRKSKPELLKEGDIKESAMVDVWLEVEAHQYTAALSPILFECLIHPMLGGATDQTVIDANLVKIKNVLAVYEAHLSKSKYLAGDFLSLADLNHVSVTLCLAATPYASLFDAYPHVKAWWTDLLARPSVQKVAALMKP

SEQ ID NO: 51305 - protein, 119 aa, Glycine max
  peptide (1)..(119): Ceres Seq. ID no. 13638569
  misc_feature (1)..(117): Homolog of NCBI NO: 232200 NR Description: GLUTATHIONE S-TRANSFERASE 2 (GST CLASS-PHI)
  misc_feature (1)..(117): Homolog of NCBI NO: 3891607 NR Description: Chain A, Structure Of Glutathione S-Transferase-I
  misc_feature (1)..(119): Homolog of NCBI NO: 66615 NR Description: glutathione transferase (EC 2.5.1.18) I - maize
  misc_feature (1)..(119): Homolog of NCBI NO: 3891705 NR Description: Chain A, Glutathione S-Transferase I From Mais In
  misc_feature (1)..(119): Homolog of NCBI NO: 168489 NR Description: glutathione S-transferase I
  misc_feature (1)..(119): Homolog of NCBI NO: 121695 NR Description: Glutathione S-transferase I (GST-I) (GST-29) (GST
  misc_feature (1)..(119): Homolog of NCBI NO: 554565 NR Description: glutathione S-transferase
  misc_feature (1)..(119): Homolog of NCBI NO: 21212950 NR Description: glutathione-S-transferase, I subunit
  misc_feature (1)..(119): Homolog of NCBI NO: 5923877 NR Description: glutathione S-transferase [Triticum aestivum]
  misc_feature (1)..(119): Homolog of NCBI NO: 23504749 NR Description: glutathione transferase F1 [Triticum aestivum]
MVDVWLEVEAHQYTAALSPILFECLIHPMLGGATDQTVIDANLVKIKNVLAVYEAHLSKSKYLAGDFLSLADLNHVSVTLCLAATPYASLFDAYPHVKAWWTDLLARPSVQKVAALMKP

SEQ ID NO: 51306 - DNA, 915 bp, Glycine max
  misc_feature (1)..(915): Ceres Seq. ID no. 12609037
gctcatttatcttatggtagttttctgggttccccactcagacttagatgttgagtcgtgcactttcaaccccaacaactcaaagcctcaaggcaacaagaacaaatgcaatgctttatccaactcatagattattgtctcttaagaacccagtatcaaataccagaggattttcatcaaaagagaatatttttatcagaggtcaccaaatcaatataaaataattttttggccttatctcgggtcgtacgccacgaaacaaagcaggagttgtttccccaaggtgtggcctgccactgacagaagagaatgtggagaaggttttggatgaggtaaggcctggcttgatggctgatggagggaatgtggcattacatgagatagatggtcttgttgttgtcctcaagctgcaaggggcatgtggatcatgtcctagctcagctatgacattgaaaatgggaattgaaactcgcctccgggataagattccagaaatcttggaagtggagcagataatggacaccgagactggtcttgagttaaccgaagaaaatgttgaaaatgttctttctgaaattagaccataccttgttggcaccgggggaggaatattagagcttgttcagatcaaggattatactgtcaaagttcggctaagtggacctgcagctggggttacaacagttcgtgttgccttaacacagaagctgagagataagatacctgctattgcagctgtgcagctaatagactgatgtcacatacaatacaagttcttttatattttgatttatctgttacaagatgaactggaaccatccatagaaagaacatgtaaacttctgttaggaaaacaaattcagtgtcagttactcagttttataggatttaatgtttgtctcctccgttcacttc

SEQ ID NO: 51307 - protein, 135 aa, Glycine max
  peptide (1)..(135): Ceres Seq. ID no. 12609038
  misc_feature (1)..(55): Pfam Name: NifU-like domain Pfam Description: NifU-like domain
  misc_feature (1)..(57): Homolog of NCBI NO: 33862527 NR Description: NifU-like protein [Prochlorococcus marinus str.
  misc_feature (1)..(57): Homolog of NCBI NO: 33860975 NR Description: NifU-like protein
  misc_feature (1)..(57): Homolog of NCBI NO: 23126802 NR Description: hypothetical protein [Nostoc punctiforme]
  misc_feature (1)..(57): Homolog of NCBI NO: 22298836 NR Description: ORF_ID:tsl1293~similar to NifU protein
  misc_feature (1)..(121): Homolog of NCBI NO: 8777425 NR Description: gene_id:K9P8.8~pir||T09896~strong similarity to
  misc_feature (1)..(134): Homolog of NCBI NO: 30698492 NR Description: NifU1 [Oryza sativa (japonica cultivar-group)]
  misc_feature (1)..(134): Homolog of NCBI NO: 18423084 NR Description: Expressed protein
  misc_feature (1)..(135): Homolog of NCBI NO: 21554503 NR Description: nitrogen fixation like protein [Arabidopsis
  misc_feature (1)..(135): Homolog of NCBI NO: 7485833 NR Description: hypothetical protein F20B18.20 - Arabidopsis
  misc_feature (1)..(135): Homolog of NCBI NO: 18416645 NR Description: nitrogen fixation like protein
MADGGNVALHEIDGLVVVLKLQGACGSCPSSAMTLKMGIETRLRDKIPEILEVEQIMDTETGLELTEENVENVLSEIRPYLVGTGGGILELVQIKDYTVKVRLSGPAAGVTTVRVALTQKLRDKIPAIAAVQLID

SEQ ID NO: 51308 - protein, 103 aa, Glycine max
  peptide (1)..(103): Ceres Seq. ID no. 12609039
  misc_feature (38)..(100): Pfam Name: NifU-like domain Pfam Description: NifU-like domain
  misc_feature (1)..(25): Homolog of NCBI NO: 33862527 NR Description: NifU-like protein [Prochlorococcus marinus str.
  misc_feature (1)..(25): Homolog of NCBI NO: 33860975 NR Description: NifU-like protein
  misc_feature (1)..(25): Homolog of NCBI NO: 23126802 NR Description: hypothetical protein [Nostoc punctiforme]
  misc_feature (1)..(25): Homolog of NCBI NO: 22298836 NR Description: ORF_ID:tsl1293~similar to NifU protein
  misc_feature (1)..(89): Homolog of NCBI NO: 8777425 NR Description: gene_id:K9P8.8~pir||T09896~strong similarity to
  misc_feature (1)..(102): Homolog of NCBI NO: 30698492 NR Description: NifU1 [Oryza sativa (japonica cultivar-group)]
  misc_feature (1)..(102): Homolog of NCBI NO: 18423084 NR Description: Expressed protein
  misc_feature (1)..(103): Homolog of NCBI NO: 21554503 NR Description: nitrogen fixation like protein [Arabidopsis
  misc_feature (1)..(103): Homolog of NCBI NO: 7485833 NR Description: hypothetical protein F20B18.20 - Arabidopsis
  misc_feature (1)..(103): Homolog of NCBI NO: 18416645 NR Description: nitrogen fixation like protein
MTLKMGIETRLRDKIPEILEVEQIMDTETGLELTEENVENVLSEIRPYLVGTGGGILELVQIKDYTVKVRLSGPAAGVTTVRVALTQKLRDKIPAIAAVQLID

SEQ ID NO: 51309 - protein, 99 aa, Glycine max
  peptide (1)..(99): Ceres Seq. ID no. 12609040
  misc_feature (34)..(96): Pfam Name: NifU-like domain Pfam Description: NifU-like domain
  misc_feature (1)..(21): Homolog of NCBI NO: 33862527 NR Description: NifU-like protein [Prochlorococcus marinus str.
  misc_feature (1)..(21): Homolog of NCBI NO: 33860975 NR Description: NifU-like protein
  misc_feature (1)..(21): Homolog of NCBI NO: 23126802 NR Description: hypothetical protein [Nostoc punctiforme]
  misc_feature (1)..(21): Homolog of NCBI NO: 22298836 NR Description: ORF_ID:tsl1293~similar to NifU protein
  misc_feature (1)..(85): Homolog of NCBI NO: 8777425 NR Description: gene_id:K9P8.8~pir||T09896~strong similarity to
  misc_feature (1)..(98): Homolog of NCBI NO: 30698492 NR Description: NifU1 [Oryza sativa (japonica cultivar-group)]
  misc_feature (1)..(98): Homolog of NCBI NO: 18423084 NR Description: Expressed protein
  misc_feature (1)..(99): Homolog of NCBI NO: 21554503 NR Description: nitrogen fixation like protein [Arabidopsis
  misc_feature (1)..(99): Homolog of NCBI NO: 7485833 NR Description: hypothetical protein F20B18.20 - Arabidopsis
  misc_feature (1)..(99): Homolog of NCBI NO: 18416645 NR Description: nitrogen fixation like protein
MGIETRLRDKIPEILEVEQIMDTETGLELTEENVENVLSEIRPYLVGTGGGILELVQIKDYTVKVRLSGPAAGVTTVRVALTQKLRDKIPAIAAVQLID

SEQ ID NO: 51310 - DNA, 930 bp, Glycine max
  misc_feature (1)..(930): Ceres Seq. ID no. 12609041
cccccgccgcattgctccccgtgcaccgccggaccccactcgccccacaggcctgcgagacggcgcgcaggaagagcgggcgggcggcggcggcggaggcgggcagggtagcatgtgcgacctcgtggcccgcacggggcgccaccagcagcggtacgaagacggcagacggctcgtcgccgggtgcataccattcaggtatagagctgatgaaacttctggtgatgaacagaaaaaagttgttgaagttctcatgataaactcccaaagcggaccaggtttattattccccaagggaggatgggagaacgatgaaacggttgaacaagcagctgctcgagaagctatagaagaagctggagttcgaggagatatagtgcaatttctaggtttctacgatttcaagagcaagacgcatcaggacgcgtgctgccccgagggcatgtgcagagcggcagtgtttgcgctgcacgtgaaggaggagctggcctcatggcccgagcagagcacccgccggaggacctggctgacggtccccgaagccacgtcacaatgtcgataccagtggatgcaagaggccttgctgacgggcttctctgagtggcatgacaactggagcaaaggcggcagtgcaggtggcgacccaatctaaacgcaagaaggcgtcctcctctgtcgtctctcgctttcctttgccttctcctctgttctcccctctaggccccaaccttgcacgcaaattgcaataatacagtgtggtgcttttacttgatgatgcctagtaggtcattgacccttggttcctgggattgaagtcttagcgtagtggtatatctcatcgaagacgagaattatcacaaattttaagtgtctgattctcgccgcgtcatattatttctcaaatttcagcttgattttgatttcttgctc

SEQ ID NO: 51311 - protein, 216 aa, Glycine max
  peptide (1)..(216): Ceres Seq. ID no. 12609042
  misc_feature (56)..(199): Pfam Name: NUDIX domain Pfam Description: NUDIX domain
  misc_feature (38)..(194): Homolog of NCBI NO: 21595695 NR Description: unknown [Arabidopsis thaliana]
  misc_feature (34)..(194): Homolog of NCBI NO: 18379275 NR Description: expressed protein
  misc_feature (41)..(194): Homolog of NCBI NO: 15221055 NR Description: unknown protein; protein id: At1g18300.1
  misc_feature (38)..(194): Homolog of NCBI NO: 15223919 NR Description: hypothetical protein; protein id: At1g14860.1
  misc_feature (38)..(194): Homolog of NCBI NO: 25518008 NR Description: F13K23.14 protein - Arabidopsis thaliana
  misc_feature (38)..(194): Homolog of NCBI NO: 18391450 NR Description: expressed protein
  misc_feature (38)..(194): Homolog of NCBI NO: 15231598 NR Description: MutT-like protein; protein id: At3g26690.1
  misc_feature (38)..(214): Homolog of NCBI NO: 18399682 NR Description: expressed protein; protein id: At3g12600.1
  misc_feature (38)..(208): Homolog of NCBI NO: 34900054 NR Description: MutT-like protein~contains ESTs
  misc_feature (38)..(208): Homolog of NCBI NO: 38175436 NR Description: MutT-like protein [Oryza sativa (japonica
PRRIAPRAPPDPTRPTGLRDGAQEERAGGGGGGGQGSMCDLVARTGRHQQRYEDGRRLVAGCIPFRYRADETSGDEQKKVVEVLMINSQSGPGLLFPKGGWENDETVEQAAAREAIEEAGVRGDIVQFLGFYDFKSKTHQDACCPEGMCRAAVFALHVKEELASWPEQSTRRRTWLTVPEATSQCRYQWMQEALLTGFSEWHDNWSKGGSAGGDPI

SEQ ID NO: 51312 - protein, 179 aa, Glycine max
  peptide (1)..(179): Ceres Seq. ID no. 12609043
  misc_feature (19)..(162): Pfam Name: NUDIX domain Pfam Description: NUDIX domain
  misc_feature (1)..(157): Homolog of NCBI NO: 21595695 NR Description: unknown [Arabidopsis thaliana]
  misc_feature (1)..(157): Homolog of NCBI NO: 18379275 NR Description: expressed protein
  misc_feature (4)..(157): Homolog of NCBI NO: 15221055 NR Description: unknown protein; protein id: At1g18300.1
  misc_feature (1)..(157): Homolog of NCBI NO: 15223919 NR Description: hypothetical protein; protein id: At1g14860.1
  misc_feature (1)..(157): Homolog of NCBI NO: 25518008 NR Description: F13K23.14 protein - Arabidopsis thaliana
  misc_feature (1)..(157): Homolog of NCBI NO: 18391450 NR Description: expressed protein
  misc_feature (1)..(157): Homolog of NCBI NO: 15231598 NR Description: MutT-like protein; protein id: At3g26690.1
  misc_feature (1)..(177): Homolog of NCBI NO: 18399682 NR Description: expressed protein; protein id: At3g12600.1
  misc_feature (1)..(171): Homolog of NCBI NO: 34900054 NR Description: MutT-like protein~contains ESTs
  misc_feature (1)..(171): Homolog of NCBI NO: 38175436 NR Description: MutT-like protein [Oryza sativa (japonica
MCDLVARTGRHQQRYEDGRRLVAGCIPFRYRADETSGDEQKKVVEVLMINSQSGPGLLFPKGGWENDETVEQAAAREAIEEAGVRGDIVQFLGFYDFKSKTHQDACCPEGMCRAAVFALHVKEELASWPEQSTRRRTWLTVPEATSQCRYQWMQEALLTGFSEWHDNWSKGGSAGGDPI

SEQ ID NO: 51313 - protein, 132 aa, Glycine max
  peptide (1)..(132): Ceres Seq. ID no. 12609044
  misc_feature (1)..(115): Pfam Name: NUDIX domain Pfam Description: NUDIX domain
  misc_feature (1)..(110): Homolog of NCBI NO: 21595695 NR Description: unknown [Arabidopsis thaliana]
  misc_feature (1)..(110): Homolog of NCBI NO: 18379275 NR Description: expressed protein
  misc_feature (1)..(110): Homolog of NCBI NO: 15221055 NR Description: unknown protein; protein id: At1g18300.1
  misc_feature (1)..(110): Homolog of NCBI NO: 15223919 NR Description: hypothetical protein; protein id: At1g14860.1
  misc_feature (1)..(110): Homolog of NCBI NO: 25518008 NR Description: F13K23.14 protein - Arabidopsis thaliana
  misc_feature (1)..(110): Homolog of NCBI NO: 18391450 NR Description: expressed protein
  misc_feature (1)..(110): Homolog of NCBI NO: 15231598 NR Description: MutT-like protein; protein id: At3g26690.1
  misc_feature (1)..(130): Homolog of NCBI NO: 18399682 NR Description: expressed protein; protein id: At3g12600.1
  misc_feature (1)..(124): Homolog of NCBI NO: 34900054 NR Description: MutT-like protein~contains ESTs
  misc_feature (1)..(124): Homolog of NCBI NO: 38175436 NR Description: MutT-like protein [Oryza sativa (japonica
MINSQSGPGLLFPKGGWENDETVEQAAAREAIEEAGVRGDIVQFLGFYDFKSKTHQDACCPEGMCRAAVFALHVKEELASWPEQSTRRRTWLTVPEATSQCRYQWMQEALLTGFSEWHDNWSKGGSAGGDPI

SEQ ID NO: 51314 - DNA, 1075 bp, Glycine max
  misc_feature (1)..(1075): Ceres Seq. ID no. 12609045
atacacaacacaagacttcgaataatgtccgaaccatctccagtctctgatccttacgctcacataggcatcgtaaagaacccagatggctccatcactcgcgaccccaccagattcccgtacgcctcagccacacctgacccctccccggtaaacaccgtcgtatccaaagacatcaccgtgagccactcaaactccacgtggatgcgtctctacgtccccgttaccgcactaaacgacggcgtttcgtctaaaaaactccctctcgtcgtctactaccacggcggaggcttcgtcatctgcagcgtcgacttcaaacccttccacgacttctgcaaccgtatggcgcgtgagctcaacgcggtcgtcgcgtcgccttcctaccggctggctccggagcacagactcccggcggcgtacgacgacggagtggacgctctgaggtttattagaacctcagacgacgagtggatcaagtctcacgctgatctctccaacgtgttcctcatggggacaagcgctggtggtaacttggcctacaacgtcgggctcagatccgccttggcggacctgagtcccgtacgtatccgtggactggtcttacaccatccgttcttcggcggcgaggagcggtgcgagtccgagatcagacttgagcacgatcaggtttttccgcctactgccggagacgtttgctgggagctttgtctccctgtcggagctaaccgggatcacgagtattctaatctgacggtgggagatggaccggtgaatatggagatgatcggacggttgggatggaaggtggtggtgagtggaggaggaggagatccgatgatagataggcagagagatgtggcgaagctgatgaaggagaagggagttgatgtggtggagcgttttactgacggcgttgttcacggtgctgagctcggtgatccgaccaagagtacaactctgtttgcttccatcagaaatctcatttactcttagaggccagcccaatatgttaggcccatttaaaggttaccttaatgtattggtttgtggaaaagttataaataagaaaaatatt

SEQ ID NO: 51315 - protein, 330 aa, Glycine max
  peptide (1)..(330): Ceres Seq. ID no. 12609046
  misc_feature (7)..(316): Homolog of NCBI NO: 34904760 NR Description: similar to carboxylesterase
  misc_feature (23)..(308): Homolog of NCBI NO: 21593215 NR Description: unknown [Arabidopsis thaliana]
  misc_feature (22)..(299): Homolog of NCBI NO: 34904770 NR Description: similar to carboxylesterase
  misc_feature (26)..(291): Homolog of NCBI NO: 21618039 NR Description: unknown [Arabidopsis thaliana]
  misc_feature (26)..(291): Homolog of NCBI NO: 15237783 NR Description: putative protein
  misc_feature (9)..(328): Homolog of NCBI NO: 15225521 NR Description: unknown protein; protein id: At2g45610.1
  misc_feature (12)..(328): Homolog of NCBI NO: 8574455 NR Description: pepper esterase [Capsicum annuum]
  misc_feature (9)..(330): Homolog of NCBI NO: 18406834 NR Description: expressed protein
  misc_feature (9)..(330): Homolog of NCBI NO: 21593183 NR Description: unknown [Arabidopsis thaliana]
  misc_feature (9)..(330): Homolog of NCBI NO: 15241725 NR Description: putative protein; protein id: At5g62180.1
IHNTRLRIMSEPSPVSDPYAHIGIVKNPDGSITRDPTRFPYASATPDPSPVNTVVSKDITVSHSNSTWMRLYVPVTALNDGVSSKKLPLVVYYHGGGFVICSVDFKPFHDFCNRMARELNAVVASPSYRLAPEHRLPAAYDDGVDALRFIRTSDDEWIKSHADLSNVFLMGTSAGGNLAYNVGLRSALADLSPVRIRGLVLHHPFFGGEERCESEIRLEHDQVFPPTAGDVCWELCLPVGANRDHEYSNLTVGDGPVNMEMIGRLGWKVVVSGGGGDPMIDRQRDVAKLMKEKGVDVVERFTDGVVHGAELGDPTKSTTLFASIRNLIYS

SEQ ID NO: 51316 - protein, 322 aa, Glycine max
  peptide (1)..(322): Ceres Seq. ID no. 12609047
  misc_feature (1)..(308): Homolog of NCBI NO: 34904760 NR Description: similar to carboxylesterase
  misc_feature (15)..(300): Homolog of NCBI NO: 21593215 NR Description: unknown [Arabidopsis thaliana]
  misc_feature (14)..(291): Homolog of NCBI NO: 34904770 NR Description: similar to carboxylesterase
  misc_feature (18)..(283): Homolog of NCBI NO: 21618039 NR Description: unknown [Arabidopsis thaliana]
  misc_feature (18)..(283): Homolog of NCBI NO: 15237783 NR Description: putative protein
  misc_feature (1)..(320): Homolog of NCBI NO: 15225521 NR Description: unknown protein; protein id: At2g45610.1
  misc_feature (4)..(320): Homolog of NCBI NO: 8574455 NR Description: pepper esterase [Capsicum annuum]
  misc_feature (1)..(322): Homolog of NCBI NO: 18406834 NR Description: expressed protein
  misc_feature (1)..(322): Homolog of NCBI NO: 21593183 NR Description: unknown [Arabidopsis thaliana]
  misc_feature (1)..(322): Homolog of NCBI NO: 15241725 NR Description: putative protein; protein id: At5g62180.1
MSEPSPVSDPYAHIGIVKNPDGSITRDPTRFPYASATPDPSPVNTVVSKDITVSHSNSTWMRLYVPVTALNDGVSSKKLPLVVYYHGGGFVICSVDFKPFHDFCNRMARELNAVVASPSYRLAPEHRLPAAYDDGVDALRFIRTSDDEWIKSHADLSNVFLMGTSAGGNLAYNVGLRSALADLSPVRIRGLVLHHPFFGGEERCESEIRLEHDQVFPPTAGDVCWELCLPVGANRDHEYSNLTVGDGPVNMEMIGRLGWKVVVSGGGGDPMIDRQRDVAKLMKEKGVDVVERFTDGVVHGAELGDPTKSTTLFASIRNLIYS

SEQ ID NO: 51317 - protein, 262 aa, Glycine max
  peptide (1)..(262): Ceres Seq. ID no. 12609048
  misc_feature (1)..(248): Homolog of NCBI NO: 34904760 NR Description: similar to carboxylesterase
  misc_feature (1)..(240): Homolog of NCBI NO: 21593215 NR Description: unknown [Arabidopsis thaliana]
  misc_feature (1)..(231): Homolog of NCBI NO: 34904770 NR Description: similar to carboxylesterase
  misc_feature (1)..(223): Homolog of NCBI NO: 21618039 NR Description: unknown [Arabidopsis thaliana]
  misc_feature (1)..(223): Homolog of NCBI NO: 15237783 NR Description: putative protein
  misc_feature (1)..(260): Homolog of NCBI NO: 15225521 NR Description: unknown protein; protein id: At2g45610.1
  misc_feature (1)..(260): Homolog of NCBI NO: 8574455 NR Description: pepper esterase [Capsicum annuum]
  misc_feature (1)..(262): Homolog of NCBI NO: 18406834 NR Description: expressed protein
  misc_feature (1)..(262): Homolog of NCBI NO: 21593183 NR Description: unknown [Arabidopsis thaliana]
  misc_feature (1)..(262): Homolog of NCBI NO: 15241725 NR Description: putative protein; protein id: At5g62180.1
MRLYVPVTALNDGVSSKKLPLVVYYHGGGFVICSVDFKPFHDFCNRMARELNAVVASPSYRLAPEHRLPAAYDDGVDALRFIRTSDDEWIKSHADLSNVFLMGTSAGGNLAYNVGLRSALADLSPVRIRGLVLHHPFFGGEERCESEIRLEHDQVFPPTAGDVCWELCLPVGANRDHEYSNLTVGDGPVNMEMIGRLGWKVVVSGGGGDPMIDRQRDVAKLMKEKGVDVVERFTDGVVHGAELGDPTKSTTLFASIRNLIYS

SEQ ID NO: 51318 - DNA, 1145 bp, Glycine max
  misc_feature (1)..(1145): Ceres Seq. ID no. 15173003
agagccgcagagactgaccgaacagacgttcgcaccaactcccctgaagcctgaacggagcggcggagaggaaggggagagatcacccgccggcggcgaggggagatggccggaggcgaggaagggtggaggaggagcggcatcgaggtgagcaccctgcagttcggctacgacggggaggcgccgctcttcgcgcgcttcaacctccgcgtcgcccccggctcgcgctgcctcctcgtcggcgccaacggatccggcaagaccactctcttaaagattcttgcaggaaaacatatggttggaggaaaggatgttgtccgtgttcttaatggttctgcttttcatgacacacagtttgtgtgcagtggtgacctttcctacttgggtggttcgtggagtcggaatgtcagttcagttggtgatgttccactacaaggcgatttctctgctgagcacatgatatttggagttgatggggttgatcctgttaggcgggagaagctgattgatctactggatattgatctgcaatggcgcatgcataaagtttcagatggacagcgccgcagggtacaaatttgcatgggtcttcttcatccatacaaggtactcttactcgatgagatcaccgtggatctcgatgtcgtgaccaggatggatctcctcgacttcttcaaggaagagtgcgagcagagggaagccacgatcgtctacgccacgcacatattcgacggcctggagacatgggcgaccgacatcgcgtacatccaggagggcgagctgaaaaagtcggcgaaatactcggacatcgaagagctcaagacggccaagaacctgctgtcggtcgtggagtcatggctgaagtccgagaccaaactcccgaagaaagagcccgcgcgcgtcgagagccagcccaggcgcccctccccgttcgacgcctcccctttccgagcgtcgcgccacatggcctactaccgatgatgatcgtgtaaaaccatgatcgtgtaaaacctctacacccattccggtgtcatacaactctggagtctgtatctttctttttcctgttcctcatgcatccctgtatacggcaatgtatctatctgaagaacaaacaagtcgagcttaattaccctattcccagc

SEQ ID NO: 51319 - protein, 291 aa, Glycine max
  peptide (1)..(291): Ceres Seq. ID no. 15173004
  misc_feature (39)..(224): Pfam Name: ABC transporter Pfam Description: ABC transporter
  misc_feature (33)..(247): Homolog of NCBI NO: 23483625 NR Description: NBD-like protein [Plasmodium yoelii yoelii]
  misc_feature (90)..(271): Homolog of NCBI NO: 40738662 NR Description: hypothetical protein AN6512.2 [Aspergillus
  misc_feature (13)..(242): Homolog of NCBI NO: 14318491 NR Description: CCR4 associated factor; Caf16p [Saccharomyces
  misc_feature (13)..(248): Homolog of NCBI NO: 32405648 NR Description: hypothetical protein [Neurospora crassa]
  misc_feature (39)..(257): Homolog of NCBI NO: 19115648 NR Description: probable ATP-dependent transporter
  misc_feature (5)..(261): Homolog of NCBI NO: 15241744 NR Description: ABC transporter family protein [Arabidopsis
  misc_feature (13)..(291): Homolog of NCBI NO: 25406749 NR Description: hypothetical protein [imported] - Arabidopsis
  misc_feature (13)..(291): Homolog of NCBI NO: 21592901 NR Description: NBD-like protein [Arabidopsis thaliana]
  misc_feature (13)..(291): Homolog of NCBI NO: 15240093 NR Description: ABC transporter family protein [Arabidopsis
  misc_feature (13)..(291): Homolog of NCBI NO: 18379174 NR Description: ABC transporter family protein [Arabidopsis
MAGGEEGWRRSGIEVSTLQFGYDGEAPLFARFNLRVAPGSRCLLVGANGSGKTTLLKILAGKHMVGGKDVVRVLNGSAFHDTQFVCSGDLSYLGGSWSRNVSSVGDVPLQGDFSAEHMIFGVDGVDPVRREKLIDLLDIDLQWRMHKVSDGQRRRVQICMGLLHPYKVLLLDEITVDLDVVTRMDLLDFFKEECEQREATIVYATHIFDGLETWATDIAYIQEGELKKSAKYSDIEELKTAKNLLSVVESWLKSETKLPKKEPARVESQPRRPSPFDASPFRASRHMAYYR

SEQ ID NO: 51320 - protein, 228 aa, Glycine max
  peptide (1)..(228): Ceres Seq. ID no. 15173005
  misc_feature (1)..(161): Pfam Name: ABC transporter Pfam Description: ABC transporter
  misc_feature (1)..(184): Homolog of NCBI NO: 23483625 NR Description: NBD-like protein [Plasmodium yoelii yoelii]
  misc_feature (27)..(208): Homolog of NCBI NO: 40738662 NR Description: hypothetical protein AN6512.2 [Aspergillus
  misc_feature (1)..(179): Homolog of NCBI NO: 14318491 NR Description: CCR4 associated factor; Caf16p [Saccharomyces
  misc_feature (1)..(185): Homolog of NCBI NO: 32405648 NR Description: hypothetical protein [Neurospora crassa]
  misc_feature (1)..(194): Homolog of NCBI NO: 19115648 NR Description: probable ATP-dependent transporter
  misc_feature (1)..(198): Homolog of NCBI NO: 15241744 NR Description: ABC transporter family protein [Arabidopsis
  misc_feature (1)..(228): Homolog of NCBI NO: 25406749 NR Description: hypothetical protein [imported] - Arabidopsis
  misc_feature (1)..(228): Homolog of NCBI NO: 21592901 NR Description: NBD-like protein [Arabidopsis thaliana]
  misc_feature (1)..(228): Homolog of NCBI NO: 15240093 NR Description: ABC transporter family protein [Arabidopsis
  misc_feature (1)..(228): Homolog of NCBI NO: 18379174 NR Description: ABC transporter family protein [Arabidopsis
MVGGKDVVRVLNGSAFHDTQFVCSGDLSYLGGSWSRNVSSVGDVPLQGDFSAEHMIFGVDGVDPVRREKLIDLLDIDLQWRMHKVSDGQRRRVQICMGLLHPYKVLLLDEITVDLDVVTRMDLLDFFKEECEQREATIVYATHIFDGLETWATDIAYIQEGELKKSAKYSDIEELKTAKNLLSVVESWLKSETKLPKKEPARVESQPRRPSPFDASPFRASRHMAYYR

SEQ ID NO: 51321 - protein, 174 aa, Glycine max
  peptide (1)..(174): Ceres Seq. ID no. 15173006
  misc_feature (1)..(107): Pfam Name: ABC transporter Pfam Description: ABC transporter
  misc_feature (1)..(130): Homolog of NCBI NO: 23483625 NR Description: NBD-like protein [Plasmodium yoelii yoelii]
  misc_feature (1)..(154): Homolog of NCBI NO: 40738662 NR Description: hypothetical protein AN6512.2 [Aspergillus
  misc_feature (1)..(125): Homolog of NCBI NO: 14318491 NR Description: CCR4 associated factor; Caf16p [Saccharomyces
  misc_feature (1)..(131): Homolog of NCBI NO: 32405648 NR Description: hypothetical protein [Neurospora crassa]
  misc_feature (1)..(140): Homolog of NCBI NO: 19115648 NR Description: probable ATP-dependent transporter
  misc_feature (1)..(144): Homolog of NCBI NO: 15241744 NR Description: ABC transporter family protein [Arabidopsis
  misc_feature (1)..(174): Homolog of NCBI NO: 25406749 NR Description: hypothetical protein [imported] - Arabidopsis
  misc_feature (1)..(174): Homolog of NCBI NO: 21592901 NR Description: NBD-like protein [Arabidopsis thaliana]
  misc_feature (1)..(174): Homolog of NCBI NO: 15240093 NR Description: ABC transporter family protein [Arabidopsis
  misc_feature (1)..(174): Homolog of NCBI NO: 18379174 NR Description: ABC transporter family protein [Arabidopsis
MIFGVDGVDPVRREKLIDLLDIDLQWRMHKVSDGQRRRVQICMGLLHPYKVLLLDEITVDLDVVTRMDLLDFFKEECEQREATIVYATHIFDGLETWATDIAYIQEGELKKSAKYSDIEELKTAKNLLSVVESWLKSETKLPKKEPARVESQPRRPSPFDASPFRASRHMAYYR

SEQ ID NO: 51322 - DNA, 1013 bp, Glycine max
  misc_feature (1)..(1013): Ceres Seq. ID no. 13594498
acatcgaccagacgacagcccctgcccgatccccaaacccacccaccgcatcctagtccacctccgaaccaaggatccaagccatggagcgcggcgatgctgccaccggcagcggcagccgcagcggtgcgggaacgagcatccaggtcacggctctggacggcatcgtgaacgtgaactctctcttcaccctcgccgcgttcctcggcttggcgtggcgcccctcctccgacgggccaggcctcgccgacggcgccgaccacctgggcgcctgcgccgcgggggaccgcatcgagtctgacctcgtctcctttcacgtcctcgccttcgcttgtttcctcttctccagcctcgtcgcgctctgcctcaagcagatcgtccgcaccttcccccactaccgccgtgcctcctccgccgccgccggagccgccgtcagctggacggtgaagatcaaccgggcagcgctccgggtcgggatcttggcgtgcgcggtgggatccgtgtgcggatgcgggttcctgacgatggccctcgtcaacgtggtgcaggtgaagctcggccggctcggctgcggcgccggcggctccgcggcatggggcgccgtcatcccgctcgtcacgctcgtgccttccgccatgctgatctacattggcatcgtcttctacgccttcacccgctagcctgaatcggatccagtaactccacttagtgcttcctttgcattttcttatgcttagattatgcgtctgtgtgatgactgattagagtgcagtgagattgcagctgacatgcctgtgtacgtatcagtgtgtccatgcttgtgttcttggtgttctttgtgtgggcaactttttgtgttagtacttggtagtagtactgtactgcttaattaccttgattgactccttttagcaagtcaatttgttatgatttgcaaggtggcaacttgatatgcaaagtccaatctaaaacgaaaaaaaaaaaaaaaaaagcttatcgataccgtcgacctc

SEQ ID NO: 51323 - protein, 198 aa, Glycine max
  peptide (1)..(198): Ceres Seq. ID no. 13594499
  misc_feature (18)..(197): Homolog of NCBI NO: 37531676 NR Description: hypothetical protein [Oryza sativa (japonica
  misc_feature (10)..(196): Homolog of NCBI NO: 18397969 NR Description: expressed protein [Arabidopsis thaliana]
  misc_feature (10)..(196): Homolog of NCBI NO: 6041846 NR Description: unknown protein [Arabidopsis thaliana]
  misc_feature (1)..(198): Homolog of NCBI NO: 15226312 NR Description: expressed protein [Arabidopsis thaliana]
  misc_feature (18)..(196): Homolog of NCBI NO: 15232676 NR Description: expressed protein [Arabidopsis thaliana]
  misc_feature (18)..(198): Homolog of NCBI NO: 15239293 NR Description: expressed protein [Arabidopsis thaliana]
  misc_feature (1)..(198): Homolog of NCBI NO: 34395171 NR Description: unknown protein [Oryza sativa (japonica
  misc_feature (1)..(198): Homolog of NCBI NO: 34900646 NR Description: hypothetical protein~similar to Arabidopsis
MERGDAATGSGSRSGAGTSIQVTALDGIVNVNSLFTLAAFLGLAWRPSSDGPGLADGADHLGACAAGDRIESDLVSFHVLAFACFLFSSLVALCLKQIVRTFPHYRRASSAAAGAAVSWTVKINRAALRVGILACAVGSVCGCGFLTMALVNVVQVKLGRLGCGAGGSAAWGAVIPLVTLVPSAMLIYIGIVFYAFTR

SEQ ID NO: 51324 - protein, 99 aa, Glycine max
  peptide (1)..(99): Ceres Seq. ID no. 13594500
HRPDDSPCPIPKPTHRILVHLRTKDPSHGARRCCHRQRQPQRCGNEHPGHGSGRHRERELSLHPRRVPRLGVAPLLRRARPRRRRRPPGRLRRGGPHRV

SEQ ID NO: 51325 - DNA, 1003 bp, Glycine max
  misc_feature (1)..(1003): Ceres Seq. ID no. 13639704
acttttgatgcattatcacactcgacaatcctcaaaaaccactttcatcgcaactcagccagccagagcttaggcgagagagacagagacagaagatggcgtacagcgcgtgtttcctacatcagagcgcactggcctcctccgccgctcgatcatcatcttcctcctcatcccagcgctacgtttcactctccaaacccgtccaggtagtgtgtaaagctcaacagtctcatgaagacgataatcccgccgtctctcgccgtctcgccctcacactcctcgtcggcgccgccgccgttgattccaaagtgtctcctgccgatgccgcctatggtgaagctgcaaatgtgtttgggaagccaaagaaaaacacagacttcacgccatacaatggagatggattccaagtgcaggttccagctaaatggaacccaagcagagaggtagagtatccaggacaagtccttaggtacgaagacaactttgatgctactagcaatctcaatgtcatggtcactcctaccgacaagaagtccatcactgattacggctctcctgaagagttcctctctcaggtcaactaccttcttgggaaacaagcttacttcggtgagactgcctccgagggaggctttgacaacaatgcagtggcaacagcaaacattctggagacaaatgttcaggacgttggtgggaaaccatactactacttgtccgtgttgacaagaacggccgatggagatgaaggtggtaagcatcagctgatcacagccaccgtgaacggaggcaagctttacatctgcaaagcacaagctggagacaagaggtggttcaagggagccaacaaatttgtcgagaaagcagccacttctttcagtgttgcttgaatcaaagcaacacaaacagaacaatgctctgctttctttttttttcatttgtctcttgtaaaaaaatggaaaatgaaactaagcttttgagaaactatcaagatgatgatgatgct

SEQ ID NO: 51326 - protein, 263 aa, Glycine max
  peptide (1)..(263): Ceres Seq. ID no. 13639705
  misc_feature (61)..(263): Pfam Name: PsbP Pfam Description: PsbP
  misc_feature (1)..(263): Homolog of NCBI NO: 417604 NR Description: 23 kDa polypeptide of water-oxidizing complex of
  misc_feature (8)..(263): Homolog of NCBI NO: 19898 NR Description: photosystem II 23 kDa polypeptide [Nicotiana
  misc_feature (6)..(263): Homolog of NCBI NO: 1345550 NR Description: 23-kDa ploypeptide of photosystem II
  misc_feature (47)..(263): Homolog of NCBI NO: 11134091 NR Description: Oxygen-evolving enhancer protein 2, chloroplast (OEE2) (23 kDa subunit of oxygen evolving system of photosystem (OEC 23 kDa subunit) (23 kDa thylakoid membrane protein) of
  misc_feature (1)..(263): Homolog of NCBI NO: 15224572 NR Description: photosystem II oxygen-evolving complex 23 (OEC23)
  misc_feature (1)..(263): Homolog of NCBI NO: 7443216 NR Description: photosystem II oxygen-evolving complex protein 2
  misc_feature (1)..(263): Homolog of NCBI NO: 11133887 NR Description: OXYGEN-EVOLVING ENHANCER PROTEIN 2-2, CHLOROPLAST (OEE2) (23 KDA SUBUNIT OF OXYGEN EVOLVING SYSTEM OF PHOTOSYSTEM
  misc_feature (13)..(263): Homolog of NCBI NO: 81723 NR Description: photosystem II oxygen-evolving complex protein 2
  misc_feature (1)..(263): Homolog of NCBI NO: 131391 NR Description: Oxygen-evolving enhancer protein 2, chloroplast (OEE2) (23 kDa subunit of oxygen evolving system of photosystem
  misc_feature (1)..(263): Homolog of NCBI NO: 15222166 NR Description: photosystem II oxygen-evolving complex 23 (OEC23)
MAYSACFLHQSALASSAARSSSSSSSQRYVSLSKPVQVVCKAQQSHEDDNPAVSRRLALTLLVGAAAVDSKVSPADAAYGEAANVFGKPKKNTDFTPYNGDGFQVQVPAKWNPSREVEYPGQVLRYEDNFDATSNLNVMVTPTDKKSITDYGSPEEFLSQVNYLLGKQAYFGETASEGGFDNNAVATANILETNVQDVGGKPYYYLSVLTRTADGDEGGKHQLITATVNGGKLYICKAQAGDKRWFKGANKFVEKAATSFSVA

SEQ ID NO: 51327 - DNA, 788 bp, Glycine max
  misc_feature (1)..(788): Ceres Seq. ID no. 13594501
accgattgcgactcgagaacctttcgttcatctccaaaatatcttcctcctctgttctgcgcctccagccctccactatcccttgcgtggttttagtctgtgaactcgagagaccgagcgaggaaagttgccgtgtgagacctgaaagttagggagatatggctgggattggtcctatcaggcaggactgggagccgatagtggcgcggaagaaggcgcagaacgccgccgacaagaaggacgaaaaggccgtcaacgctgcccgccgctccggcgccgagatcgacaccaccaagaagtacaacgctggaacgaacaaggctgcatctagcggaacttccctcaacaccaagcggctcgacgacgacacggagaacctttcccatgagcgtgtttcaagtgacctgaagaaaaaccttatgcaagcaagactggataagaagatgacccaggcacaacttgctcagatgatcaatgagaagccacaggtgatccaggagtacgagtcgggcaaggcgattccgaacaatcagataattggaaagctcgagagggcacttggagctaagctgcgtagcaagaagtaatgccttgaaggccaagccctgtctatttgccttacactgcatttgctaggtcctaaaagctcttacaggctgtttctgttggttgatactgaataactatgccacagaacgactttatgtatcattatattcccgtgttctaaaatgtgtcgtcatatgacccagtgtaagagctgcattgagcatgcagattgacatggc

SEQ ID NO: 51328 - protein, 142 aa, Glycine max
  peptide (1)..(142): Ceres Seq. ID no. 13594502
  misc_feature (87)..(141): Pfam Name: Helix-turn-helix Pfam Description: Helix-turn-helix
  misc_feature (5)..(141): Homolog of NCBI NO: 19225065 NR Description: ethylene-responsive transciptional
  misc_feature (1)..(141): Homolog of NCBI NO: 5669634 NR Description: ethylene-responsive transcriptional coactivator
  misc_feature (7)..(141): Homolog of NCBI NO: 21553721 NR Description: ethylene-responsive transcriptional coactivator,
  misc_feature (5)..(141): Homolog of NCBI NO: 15230125 NR Description: ethylene-responsive transcriptional coactivator
  misc_feature (5)..(142): Homolog of NCBI NO: 20086364 NR Description: putative multiprotein bridging factor 1
  misc_feature (7)..(142): Homolog of NCBI NO: 8895787 NR Description: multiprotein bridging factor 1 [Solanum tuberosum]
  misc_feature (1)..(142): Homolog of NCBI NO: 7488897 NR Description: hypothetical protein - castor bean
  misc_feature (1)..(142): Homolog of NCBI NO: 15231105 NR Description: transcriptional coactivator - like protein
  misc_feature (1)..(142): Homolog of NCBI NO: 18406032 NR Description: expressed protein [Arabidopsis thaliana]
  misc_feature (1)..(142): Homolog of NCBI NO: 38637102 NR Description: putative ethylene-responsive transcriptional
MAGIGPIRQDWEPIVARKKAQNAADKKDEKAVNAARRSGAEIDTTKKYNAGTNKAASSGTSLNTKRLDDDTENLSHERVSSDLKKNLMQARLDKKMTQAQLAQMINEKPQVIQEYESGKAIPNNQIIGKLERALGAKLRSKK

SEQ ID NO: 51329 - DNA, 1194 bp, Glycine max
  misc_feature (1)..(1194): Ceres Seq. ID no. 13594560
acgattccatccacacatcaacacatggctccgccgaacagatcgttttcgccagagctatattgcctacagcgatcctcaccctcgcatcacttgaataactgcacgtggtgggcaggcgaggccgactcgtgatctgatcgggcgacaagagaatatcgctgtgcttgttctctttcgcggcgcatgtggccttgcccgcgagcgagcgcgacggacggacggacggacggacgccggcgatcacagtcacatggtcacatggaggatgacggaatggatgtgaccacatgctgttatcctattattaatggggtgttgccacgggattgccacaactctcgcggggagcaggggatgtgcgtcgtcggggccatcaacaactacacggagcagctctacacctacggggactcccccaagagttcgtcgtacaacctgacggagagcctcatgttcctggcgcacttcgtgggggacgtgcaccagccgctgcacgtcggctacgaggacgacgagggcggcaacaccatcacggtgcactggtaccacaggaaggccaacctccaccacgtgtgggacgtgagcatcatcgacacggtgatgaaggacttctacaacaagagcctcgacaccatggtggccgccctgcagacgaacctcaccgagggatggtctgacgatgtcggtcactgggagaattgcgccaacaagaaggcgacctgcgcaaacgactacgcgatcgagagcataagtctgtcgtgcaactacgcctacaaagatgtggtgcagaacatcaccctaggagatgattattacttcacccgctacccggttgtggagaagagattggcgcaggccggcgtcagactggcgctgatactcaaccgtatatttgacaagaaagaagctgatactatgccgttatacgtgcagtagaatagctatacttgtacaaaaggtgtatatatacgggctggacaaaattcggtattgtagctgccactgccacgccgtttgatcaatttccacttcaataggtttaccattatgtaatataaagagtcacgcaaccttggcacggctttcagaaattcattagttgtaaagttgcaatacaaaccctcttattagtctatttgcttgaacaataaacaaatccacaagtgcagtttaaagcgatgttttagtttc

SEQ ID NO: 51330 - protein, 250 aa, Glycine max
  peptide (1)..(250): Ceres Seq. ID no. 13594561
  misc_feature (47)..(237): Homolog of NCBI NO: 21554516 NR Description: putative bifunctional nuclease [Arabidopsis
  misc_feature (47)..(237): Homolog of NCBI NO: 15221343 NR Description: bifunctional nuclease -related [Arabidopsis
  misc_feature (47)..(237): Homolog of NCBI NO: 7489371 NR Description: endonuclease (EC 3.1.30.-) precursor - barley
  misc_feature (47)..(242): Homolog of NCBI NO: 5672692 NR Description: nuclease I [Hordeum vulgare]
  misc_feature (47)..(240): Homolog of NCBI NO: 13274190 NR Description: putative nuclease [Hordeum vulgare subsp. vulgare]
  misc_feature (47)..(237): Homolog of NCBI NO: 38345900 NR Description: OSJNBa0060D06.10 [Oryza sativa (japonica
  misc_feature (47)..(238): Homolog of NCBI NO: 4099835 NR Description: bifunctional nuclease [Zinnia elegans]
  misc_feature (47)..(240): Homolog of NCBI NO: 22328857 NR Description: expressed protein [Arabidopsis thaliana]
  misc_feature (40)..(250): Homolog of NCBI NO: 34895514 NR Description: putative bifunctional nuclease
  misc_feature (40)..(250): Homolog of NCBI NO: 9558456 NR Description: unnamed protein product [Oryza sativa (japonica
MWPCPRASATDGRTDGRRRSQSHGHMEDDGMDVTTCCYPIINGVLPRDCHNSRGEQGMCVVGAINNYTEQLYTYGDSPKSSSYNLTESLMFLAHFVGDVHQPLHVGYEDDEGGNTITVHWYHRKANLHHVWDVSIIDTVMKDFYNKSLDTMVAALQTNLTEGWSDDVGHWENCANKKATCANDYAIESISLSCNYAYKDVVQNITLGDDYYFTRYPVVEKRLAQAGVRLALILNRIFDKKEADTMPLYVQ

SEQ ID NO: 51331 - protein, 225 aa, Glycine max
  peptide (1)..(225): Ceres Seq. ID no. 13594562
  misc_feature (22)..(212): Homolog of NCBI NO: 21554516 NR Description: putative bifunctional nuclease [Arabidopsis
  misc_feature (22)..(212): Homolog of NCBI NO: 15221343 NR Description: bifunctional nuclease -related [Arabidopsis
  misc_feature (22)..(212): Homolog of NCBI NO: 7489371 NR Description: endonuclease (EC 3.1.30.-) precursor - barley
  misc_feature (22)..(217): Homolog of NCBI NO: 5672692 NR Description: nuclease I [Hordeum vulgare]
  misc_feature (22)..(215): Homolog of NCBI NO: 13274190 NR Description: putative nuclease [Hordeum vulgare subsp. vulgare]
  misc_feature (22)..(212): Homolog of NCBI NO: 38345900 NR Description: OSJNBa0060D06.10 [Oryza sativa (japonica
  misc_feature (22)..(213): Homolog of NCBI NO: 4099835 NR Description: bifunctional nuclease [Zinnia elegans]
  misc_feature (22)..(215): Homolog of NCBI NO: 22328857 NR Description: expressed protein [Arabidopsis thaliana]
  misc_feature (15)..(225): Homolog of NCBI NO: 34895514 NR Description: putative bifunctional nuclease
  misc_feature (15)..(225): Homolog of NCBI NO: 9558456 NR Description: unnamed protein product [Oryza sativa (japonica
MEDDGMDVTTCCYPIINGVLPRDCHNSRGEQGMCVVGAINNYTEQLYTYGDSPKSSSYNLTESLMFLAHFVGDVHQPLHVGYEDDEGGNTITVHWYHRKANLHHVWDVSIIDTVMKDFYNKSLDTMVAALQTNLTEGWSDDVGHWENCANKKATCANDYAIESISLSCNYAYKDVVQNITLGDDYYFTRYPVVEKRLAQAGVRLALILNRIFDKKEADTMPLYVQ

SEQ ID NO: 51332 - protein, 220 aa, Glycine max
  peptide (1)..(220): Ceres Seq. ID no. 13594563
  misc_feature (17)..(207): Homolog of NCBI NO: 21554516 NR Description: putative bifunctional nuclease [Arabidopsis
  misc_feature (17)..(207): Homolog of NCBI NO: 15221343 NR Description: bifunctional nuclease -related [Arabidopsis
  misc_feature (17)..(207): Homolog of NCBI NO: 7489371 NR Description: endonuclease (EC 3.1.30.-) precursor - barley
  misc_feature (17)..(212): Homolog of NCBI NO: 5672692 NR Description: nuclease I [Hordeum vulgare]
  misc_feature (17)..(210): Homolog of NCBI NO: 13274190 NR Description: putative nuclease [Hordeum vulgare subsp. vulgare]
  misc_feature (17)..(207): Homolog of NCBI NO: 38345900 NR Description: OSJNBa0060D06.10 [Oryza sativa (japonica
  misc_feature (17)..(208): Homolog of NCBI NO: 4099835 NR Description: bifunctional nuclease [Zinnia elegans]
  misc_feature (17)..(210): Homolog of NCBI NO: 22328857 NR Description: expressed protein [Arabidopsis thaliana]
  misc_feature (10)..(220): Homolog of NCBI NO: 34895514 NR Description: putative bifunctional nuclease
  misc_feature (10)..(220): Homolog of NCBI NO: 9558456 NR Description: unnamed protein product [Oryza sativa (japonica
MDVTTCCYPIINGVLPRDCHNSRGEQGMCVVGAINNYTEQLYTYGDSPKSSSYNLTESLMFLAHFVGDVHQPLHVGYEDDEGGNTITVHWYHRKANLHHVWDVSIIDTVMKDFYNKSLDTMVAALQTNLTEGWSDDVGHWENCANKKATCANDYAIESISLSCNYAYKDVVQNITLGDDYYFTRYPVVEKRLAQAGVRLALILNRIFDKKEADTMPLYVQ

SEQ ID NO: 51333 - DNA, 760 bp, Glycine max
  misc_feature (1)..(760): Ceres Seq. ID no. 15172991
tcttaatctctcggcctctcacttgaatctcctcacaacacacgtacgatccttttgctctcctctctctctctctctagaaaccctgcaatcctcttcttcaagattcgagtatgaaaggaggtaaatcaaagactgaaaccaggagctccaagctctctgtggccaagaagcctgctaaagcagcaggtcgcagcaaagcggcggctaaggatcctaacaaacctaagaggccagccagtgccttcttcgttttcatggaggactttcgccagacttacaagaaggaacaccccagcaacaaatctgttgccgctgttggtaaagctggtggagaaaagtggaagtccttgtccgactctgagaaggctcccttcgtagctaaggctgataagcgcaaggttgagtatgagaagaccatgaaagcctacaacaagaagctggaggaaggtccaaaggaggacgaggaggaatctgacaagtctgtgtccgaggtgaatgatgaggatgatgccgatgatggtagtgatgaggaggaagacgatgactaaagaagttgaagctggtagcacaatataggacgctacatcaaggatctcggatgttttttattttctttctttttactgatgttttcaacttagtaaagctgccactatctctctgattatgattctaccggtaatggaaaaagtgtgtgtagaatgtttgaattagagatatgcacctctatgtaacgatttagcttttttatcattct

SEQ ID NO: 51334 - protein, 145 aa, Glycine max
  peptide (1)..(145): Ceres Seq. ID no. 15172992
  misc_feature (38)..(107): Pfam Name: HMG (high mobility group) box Pfam Description: HMG (high mobility group) box
  misc_feature (1)..(140): Homolog of NCBI NO: 25402921 NR Description: protein F2D10.18 [imported] - Arabidopsis
  misc_feature (1)..(145): Homolog of NCBI NO: 18394900 NR Description: expressed protein [Arabidopsis thaliana]
  misc_feature (1)..(145): Homolog of NCBI NO: 25402921 NR Description: protein F2D10.18 [imported] - Arabidopsis
  misc_feature (1)..(145): Homolog of NCBI NO: 18394898 NR Description: expressed protein [Arabidopsis thaliana]
MKGGKSKTETRSSKLSVAKKPAKAAGRSKAAAKDPNKPKRPASAFFVFMEDFRQTYKKEHPSNKSVAAVGKAGGEKWKSLSDSEKAPFVAKADKRKVEYEKTMKAYNKKLEEGPKEDEEESDKSVSEVNDEDDADDGSDEEEDDD

SEQ ID NO: 51335 - protein, 97 aa, Glycine max
  peptide (1)..(97): Ceres Seq. ID no. 15172993
  misc_feature (1)..(59): Pfam Name: HMG (high mobility group) box Pfam Description: HMG (high mobility group) box
  misc_feature (1)..(92): Homolog of NCBI NO: 25402921 NR Description: protein F2D10.18 [imported] - Arabidopsis
  misc_feature (1)..(97): Homolog of NCBI NO: 18394900 NR Description: expressed protein [Arabidopsis thaliana]
  misc_feature (1)..(97): Homolog of NCBI NO: 25402921 NR Description: protein F2D10.18 [imported] - Arabidopsis
  misc_feature (1)..(97): Homolog of NCBI NO: 18394898 NR Description: expressed protein [Arabidopsis thaliana]
MEDFRQTYKKEHPSNKSVAAVGKAGGEKWKSLSDSEKAPFVAKADKRKVEYEKTMKAYNKKLEEGPKEDEEESDKSVSEVNDEDDADDGSDEEEDDD

SEQ ID NO: 51336 - DNA, 1091 bp, Glycine max
  misc_feature (1)..(1091): Ceres Seq. ID no. 13594503
gtaaagtatagtcccgcggtgctgctctgttcattactcgggcgatcggcgatcggtagtgcacttgccgtagctgtatattgatagcgggctgattgaggtagctgcctgccatgtctggaaaatcgcttgcagtggcgccgcggtctgacccggacaacggggcggagcggcagccgtcgtcggcgatgctcgggggcgtcatgggctcgctccgcgtcatcgagctccagctcgtcgccttcatcatggtcttctcgatgtcaggcctcgtcccgctcatcgacctcgccttcccggtcgtcaccactctctacctcctcgccctctcccgcctcgccttcccttcgctccacagcaaggtcgacgacgaggccgccgccgtccactccgccgcgtcccaggagatcttccgcggaagcaagctgtttcaggtgtacgtggtgatgggcaccacggtggggctgttcctgccgctggcgcacgtcctgggtgggttcgcgcgcggcgacgatgccgccgtgcgctccgcgacgccgcacctgttcctgctctcctgccagatcctcacggagaacatcgtcggctcgctcggcgtcttctcgccgccgctgagggcgctggtgccgcttctctacaccgtgcgccgcgtcttcgtcatcgtcgactgggtctatgacgtgtggaccaacaagctcatcacccgcaccgcccccgttcaggataaggcctgggtgtggttcggcaggtacctcgcggtggcgaacctggtctacttctccatcaacctgttcgtcttcctgatccccaagttcctcccccgcgcgttcgagaagtacttccacacgcgcaacgaggtgtacgccaagacggcggaggacaagcgggcaagggatctatcctcgctcgatgatgacagtgcgccaaaatcggaggtctgcaagaaggccgactgagatcgatgatcgtgttcgttgcgcggcgtttgagctgcgctcgtagtgtgctctctagcttcaactttgcttacctgtatgtggaccggtgtttgtacatttgggtcttcgcttctcaattctgaaattccgtgc

SEQ ID NO: 51337 - protein, 280 aa, Glycine max
  peptide (1)..(280): Ceres Seq. ID no. 13594504
  misc_feature (1)..(110): Homolog of NCBI NO: 26449376 NR Description: unknown protein [Arabidopsis thaliana]
  misc_feature (38)..(248): Homolog of NCBI NO: 15237854 NR Description: expressed protein [Arabidopsis thaliana]
  misc_feature (47)..(274): Homolog of NCBI NO: 37536624 NR Description: unknown protein [Oryza sativa (japonica
  misc_feature (10)..(248): Homolog of NCBI NO: 18423389 NR Description: expressed protein [Arabidopsis thaliana]
  misc_feature (10)..(248): Homolog of NCBI NO: 15146256 NR Description: AT5g52420/K24M7_17 [Arabidopsis thaliana]
  misc_feature (1)..(257): Homolog of NCBI NO: 15217782 NR Description: expressed protein [Arabidopsis thaliana]
  misc_feature (1)..(259): Homolog of NCBI NO: 38347228 NR Description: OSJNBa0044M19.10 [Oryza sativa (japonica
MSGKSLAVAPRSDPDNGAERQPSSAMLGGVMGSLRVIELQLVAFIMVFSMSGLVPLIDLAFPVVTTLYLLALSRLAFPSLHSKVDDEAAAVHSAASQEIFRGSKLFQVYVVMGTTVGLFLPLAHVLGGFARGDDAAVRSATPHLFLLSCQILTENIVGSLGVFSPPLRALVPLLYTVRRVFVIVDWVYDVWTNKLITRTAPVQDKAWVWFGRYLAVANLVYFSINLFVFLIPKFLPRAFEKYFHTRNEVYAKTAEDKRARDLSSLDDDSAPKSEVCKKAD

SEQ ID NO: 51338 - protein, 255 aa, Glycine max
  peptide (1)..(255): Ceres Seq. ID no. 13594505
  misc_feature (1)..(85): Homolog of NCBI NO: 26449376 NR Description: unknown protein [Arabidopsis thaliana]
  misc_feature (13)..(223): Homolog of NCBI NO: 15237854 NR Description: expressed protein [Arabidopsis thaliana]
  misc_feature (22)..(249): Homolog of NCBI NO: 37536624 NR Description: unknown protein [Oryza sativa (japonica
  misc_feature (1)..(223): Homolog of NCBI NO: 18423389 NR Description: expressed protein [Arabidopsis thaliana]
  misc_feature (1)..(223): Homolog of NCBI NO: 15146256 NR Description: AT5g52420/K24M7_17 [Arabidopsis thaliana]
  misc_feature (1)..(232): Homolog of NCBI NO: 15217782 NR Description: expressed protein [Arabidopsis thaliana]
  misc_feature (1)..(234): Homolog of NCBI NO: 38347228 NR Description: OSJNBa0044M19.10 [Oryza sativa (japonica
MLGGVMGSLRVIELQLVAFIMVFSMSGLVPLIDLAFPVVTTLYLLALSRLAFPSLHSKVDDEAAAVHSAASQEIFRGSKLFQVYVVMGTTVGLFLPLAHVLGGFARGDDAAVRSATPHLFLLSCQILTENIVGSLGVFSPPLRALVPLLYTVRRVFVIVDWVYDVWTNKLITRTAPVQDKAWVWFGRYLAVANLVYFSINLFVFLIPKFLPRAFEKYFHTRNEVYAKTAEDKRARDLSSLDDDSAPKSEVCKKAD

SEQ ID NO: 51339 - protein, 250 aa, Glycine max
  peptide (1)..(250): Ceres Seq. ID no. 13594506
  misc_feature (1)..(80): Homolog of NCBI NO: 26449376 NR Description: unknown protein [Arabidopsis thaliana]
  misc_feature (8)..(218): Homolog of NCBI NO: 15237854 NR Description: expressed protein [Arabidopsis thaliana]
  misc_feature (17)..(244): Homolog of NCBI NO: 37536624 NR Description: unknown protein [Oryza sativa (japonica
  misc_feature (1)..(218): Homolog of NCBI NO: 18423389 NR Description: expressed protein [Arabidopsis thaliana]
  misc_feature (1)..(218): Homolog of NCBI NO: 15146256 NR Description: AT5g52420/K24M7_17 [Arabidopsis thaliana]
  misc_feature (1)..(227): Homolog of NCBI NO: 15217782 NR Description: expressed protein [Arabidopsis thaliana]
  misc_feature (1)..(229): Homolog of NCBI NO: 38347228 NR Description: OSJNBa0044M19.10 [Oryza sativa (japonica
MGSLRVIELQLVAFIMVFSMSGLVPLIDLAFPVVTTLYLLALSRLAFPSLHSKVDDEAAAVHSAASQEIFRGSKLFQVYVVMGTTVGLFLPLAHVLGGFARGDDAAVRSATPHLFLLSCQILTENIVGSLGVFSPPLRALVPLLYTVRRVFVIVDWVYDVWTNKLITRTAPVQDKAWVWFGRYLAVANLVYFSINLFVFLIPKFLPRAFEKYFHTRNEVYAKTAEDKRARDLSSLDDDSAPKSEVCKKAD

SEQ ID NO: 51340 - DNA, 1283 bp, Glycine max
  misc_feature (1)..(1283): Ceres Seq. ID no. 13581848
agatggagagaaagtttaaaaattctaaagacccaatctcaatacctcaaactctaaacactgcatatttaattatcataccaccacccacccttctcccatccctcactctctcgacgaaaccctaagcttcccctttcaatctcatcagatcctttcgtggttgcgcgaaaccctaattttgaatctgcaaacatgtctgcagctatggatatgtcgctcgacgacataatcaagaacaacaaaaaatctggatccggaagttcccgtggccggatccgaccctccggttccggaccttctcgccggttccccaaccgtgccgccaaccgcgccgctccttatgccaccgctaaggcgccggaggcgacgtggcagcacgatttatatgcagatcagcaagtggctgcggcggggtaccctgctcaaggtggtcgtgcggcttccatagaaactgggactaagctttacatttcaaacttggattatggtgtttccagtgacgatattaaggaattgtttgctgaagttggtgacctgaaacggcatgcggttcattatgacaggagtggcagatcaaagggtacagcagaagtagtattttcacgacgagctgatgctgtagctgctgtaaagagatacaacaatgttcagttggatgggaaaccaatgaagattgagattgtgggaaccaacatttccacacctggtgtggctcctgctcgtaacggggctattggaaattttgatggagttcctcgaagtggacaaggaagaggtggggcattaagaaggccaggaggaagagggcagggcgttcgaagggatcggggacggggaagaggtcgtggcggagcaggtcgcggtgaaaaggtatctgctgatgatcttgatgcggatttggagaagtatcatgcagaggcaatgcaattgaactgaaggaattggccatattttattttcttgctattacatctatgatgtttattagggacttggtgctggaacaccatgtgtttatgtatctttcacgctggcctactttttagggaaagagaatggatttcctgagtgaaaacatttagacttgccatatggagtttgggcttctgttgtctatttttgattttccttgggtatgaaatatggattacgaaacagaagtcagcatgtaatatgcagtcaagtttgccttcactggcattaatttgttttaacgagtggattatggaagtgggaaccatgatttcatctatcaatgtacaaagaaatgtttggctgcc

SEQ ID NO: 51341 - protein, 247 aa, Glycine max
  peptide (1)..(247): Ceres Seq. ID no. 13581849
  misc_feature (91)..(161): Pfam Name: RNA recognition motif. (a.k.a. RRM, RBD, or RNP domain) Pfam Description: RNA recognition motif. (a.k.a. RRM, RBD, or RNP
  misc_feature (1)..(241): Homolog of NCBI NO: 17572810 NR Description: transcriptional coactivator; bZIP enhancing
  misc_feature (1)..(241): Homolog of NCBI NO: 6755763 NR Description: RNA and export factor binding protein 1
  misc_feature (1)..(241): Homolog of NCBI NO: 7159945 NR Description: RNA and export factor binding protein 2-I [Mus
  misc_feature (1)..(224): Homolog of NCBI NO: 33146678 NR Description: putative RNA and export factor binding protein
  misc_feature (20)..(226): Homolog of NCBI NO: 11358209 NR Description: hypothetical protein T22P11.120 - Arabidopsis
  misc_feature (20)..(226): Homolog of NCBI NO: 30679669 NR Description: RNA and export factor binding protein, putative
  misc_feature (1)..(247): Homolog of NCBI NO: 30697313 NR Description: RNA and export factor binding protein, putative
  misc_feature (1)..(247): Homolog of NCBI NO: 9757916 NR Description: RNA and export factor binding protein 2-I-like
  misc_feature (1)..(247): Homolog of NCBI NO: 21555029 NR Description: transcriptional coactivator-like protein
  misc_feature (1)..(247): Homolog of NCBI NO: 30697310 NR Description: RNA and export factor binding protein, putative
MSAAMDMSLDDIIKNNKKSGSGSSRGRIRPSGSGPSRRFPNRAANRAAPYATAKAPEATWQHDLYADQQVAAAGYPAQGGRAASIETGTKLYISNLDYGVSSDDIKELFAEVGDLKRHAVHYDRSGRSKGTAEVVFSRRADAVAAVKRYNNVQLDGKPMKIEIVGTNISTPGVAPARNGAIGNFDGVPRSGQGRGGALRRPGGRGQGVRRDRGRGRGRGGAGRGEKVSADDLDADLEKYHAEAMQLN

SEQ ID NO: 51342 - protein, 243 aa, Glycine max
  peptide (1)..(243): Ceres Seq. ID no. 13581850
  misc_feature (87)..(157): Pfam Name: RNA recognition motif. (a.k.a. RRM, RBD, or RNP domain) Pfam Description: RNA recognition motif. (a.k.a. RRM, RBD, or RNP
  misc_feature (1)..(237): Homolog of NCBI NO: 17572810 NR Description: transcriptional coactivator; bZIP enhancing
  misc_feature (1)..(237): Homolog of NCBI NO: 6755763 NR Description: RNA and export factor binding protein 1
  misc_feature (1)..(237): Homolog of NCBI NO: 7159945 NR Description: RNA and export factor binding protein 2-I [Mus
  misc_feature (1)..(220): Homolog of NCBI NO: 33146678 NR Description: putative RNA and export factor binding protein
  misc_feature (16)..(222): Homolog of NCBI NO: 11358209 NR Description: hypothetical protein T22P11.120 - Arabidopsis
  misc_feature (16)..(222): Homolog of NCBI NO: 30679669 NR Description: RNA and export factor binding protein, putative
  misc_feature (1)..(243): Homolog of NCBI NO: 30697313 NR Description: RNA and export factor binding protein, putative
  misc_feature (1)..(243): Homolog of NCBI NO: 9757916 NR Description: RNA and export factor binding protein 2-I-like
  misc_feature (1)..(243): Homolog of NCBI NO: 21555029 NR Description: transcriptional coactivator-like protein
  misc_feature (1)..(243): Homolog of NCBI NO: 30697310 NR Description: RNA and export factor binding protein, putative
MDMSLDDIIKNNKKSGSGSSRGRIRPSGSGPSRRFPNRAANRAAPYATAKAPEATWQHDLYADQQVAAAGYPAQGGRAASIETGTKLYISNLDYGVSSDDIKELFAEVGDLKRHAVHYDRSGRSKGTAEVVFSRRADAVAAVKRYNNVQLDGKPMKIEIVGTNISTPGVAPARNGAIGNFDGVPRSGQGRGGALRRPGGRGQGVRRDRGRGRGRGGAGRGEKVSADDLDADLEKYHAEAMQLN

SEQ ID NO: 51343 - protein, 241 aa, Glycine max
  peptide (1)..(241): Ceres Seq. ID no. 13581851
  misc_feature (85)..(155): Pfam Name: RNA recognition motif. (a.k.a. RRM, RBD, or RNP domain) Pfam Description: RNA recognition motif. (a.k.a. RRM, RBD, or RNP
  misc_feature (1)..(235): Homolog of NCBI NO: 17572810 NR Description: transcriptional coactivator; bZIP enhancing
  misc_feature (1)..(235): Homolog of NCBI NO: 6755763 NR Description: RNA and export factor binding protein 1
  misc_feature (1)..(235): Homolog of NCBI NO: 7159945 NR Description: RNA and export factor binding protein 2-I [Mus
  misc_feature (1)..(218): Homolog of NCBI NO: 33146678 NR Description: putative RNA and export factor binding protein
  misc_feature (14)..(220): Homolog of NCBI NO: 11358209 NR Description: hypothetical protein T22P11.120 - Arabidopsis
  misc_feature (14)..(220): Homolog of NCBI NO: 30679669 NR Description: RNA and export factor binding protein, putative
  misc_feature (1)..(241): Homolog of NCBI NO: 30697313 NR Description: RNA and export factor binding protein, putative
  misc_feature (1)..(241): Homolog of NCBI NO: 9757916 NR Description: RNA and export factor binding protein 2-I-like
  misc_feature (1)..(241): Homolog of NCBI NO: 21555029 NR Description: transcriptional coactivator-like protein
  misc_feature (1)..(241): Homolog of NCBI NO: 30697310 NR Description: RNA and export factor binding protein, putative
MSLDDIIKNNKKSGSGSSRGRIRPSGSGPSRRFPNRAANRAAPYATAKAPEATWQHDLYADQQVAAAGYPAQGGRAASIETGTKLYISNLDYGVSSDDIKELFAEVGDLKRHAVHYDRSGRSKGTAEVVFSRRADAVAAVKRYNNVQLDGKPMKIEIVGTNISTPGVAPARNGAIGNFDGVPRSGQGRGGALRRPGGRGQGVRRDRGRGRGRGGAGRGEKVSADDLDADLEKYHAEAMQLN

SEQ ID NO: 51344 - DNA, 899 bp, Glycine max
  misc_feature (1)..(899): Ceres Seq. ID no. 15227143
cttcttcctagtgttacaacattccacaaacaactctttcttttaaattttataatattcttctgagtctgttttttttttttctcacaagaccattataccagatccagtttgaagagatcgagtagtatgagcagccagacgtcgaagccgaacgtggatggagtgcacatcgatgtgaaggttgtggagaggccaatgagagaaaggccctacgatctgttgctgcggtttcttggcctttcactcactcttgtggcagtcatcattgttggtgttgacaatgagaccaaagtcatctcctatgccgaaatgcagttcaaagccactgctaagtgggaatatgtctctgccattgtgtttttcttggtgataaacgcgatagcatgctcatacgcagctgcatcattggttatcacattgatggcaagaagcaatggaagaaaaaacgatgtgacactgttggggctaacagcgctagatcttgtgatgatggctttgttgttctcggccaatggtgcagcttgtgcagtgggagtgatagcacagaaggggaactcgcacgtgcaatggatgaaagtgtgcaacgtctttgatgcctattgtcgccacgtcactgcagcattggtcctctccatcattggatccacggtctttctcttgctcgtgctcctttctgttcttaaactccattacagaacaggaatttagatctcgatatgatatgatacacgctataatatatatttgtagggttaattaattaattgagggtgttcttgtacgtgtgaatcgtgtttttggcatagaccttgtgcacttgttgtggttgatgaagaacgccaaagcacttaaaagatatagatgctatatttaatttattaaaaaaaaaaaaaaaa

SEQ ID NO: 51345 - protein, 193 aa, Glycine max
  peptide (1)..(193): Ceres Seq. ID no. 15227144
  misc_feature (30)..(175): Pfam Name: Domain of unknown function (DUF588) Pfam Description: Domain of unknown function (DUF588)
  misc_feature (33)..(187): Homolog of NCBI NO: 21553953 NR Description: unknown [Arabidopsis thaliana]
  misc_feature (18)..(187): Homolog of NCBI NO: 15237068 NR Description: expressed integral membrane protein common family
  misc_feature (30)..(191): Homolog of NCBI NO: 34394242 NR Description: integral membrane protein-like
  misc_feature (27)..(185): Homolog of NCBI NO: 15230708 NR Description: expressed protein [Arabidopsis thaliana]
  misc_feature (75)..(188): Homolog of NCBI NO: 7430335 NR Description: hypothetical 15.5K protein - Arabidopsis thaliana
  misc_feature (28)..(188): Homolog of NCBI NO: 34915110 NR Description: P0503E05.4 [Oryza sativa (japonica
  misc_feature (31)..(188): Homolog of NCBI NO: 18414489 NR Description: expressed integral membrane protein common family
  misc_feature (7)..(187): Homolog of NCBI NO: 15234654 NR Description: expressed protein [Arabidopsis thaliana]
  misc_feature (6)..(187): Homolog of NCBI NO: 21617994 NR Description: unknown [Arabidopsis thaliana]
  misc_feature (6)..(187): Homolog of NCBI NO: 18414493 NR Description: expressed integral membrane protein common family
MSSQTSKPNVDGVHIDVKVVERPMRERPYDLLLRFLGLSLTLVAVIIVGVDNETKVISYAEMQFKATAKWEYVSAIVFFLVINAIACSYAAASLVITLMARSNGRKNDVTLLGLTALDLVMMALLFSANGAACAVGVIAQKGNSHVQWMKVCNVFDAYCRHVTAALVLSIIGSTVFLLLVLLSVLKLHYRTGI

SEQ ID NO: 51346 - protein, 170 aa, Glycine max
  peptide (1)..(170): Ceres Seq. ID no. 15227145
  misc_feature (7)..(152): Pfam Name: Domain of unknown function (DUF588) Pfam Description: Domain of unknown function (DUF588)
  misc_feature (10)..(164): Homolog of NCBI NO: 21553953 NR Description: unknown [Arabidopsis thaliana]
  misc_feature (1)..(164): Homolog of NCBI NO: 15237068 NR Description: expressed integral membrane protein common family
  misc_feature (7)..(168): Homolog of NCBI NO: 34394242 NR Description: integral membrane protein-like
  misc_feature (4)..(162): Homolog of NCBI NO: 15230708 NR Description: expressed protein [Arabidopsis thaliana]
  misc_feature (52)..(165): Homolog of NCBI NO: 7430335 NR Description: hypothetical 15.5K protein - Arabidopsis thaliana
  misc_feature (5)..(165): Homolog of NCBI NO: 34915110 NR Description: P0503E05.4 [Oryza sativa (japonica
  misc_feature (8)..(165): Homolog of NCBI NO: 18414489 NR Description: expressed integral membrane protein common family
  misc_feature (1)..(164): Homolog of NCBI NO: 15234654 NR Description: expressed protein [Arabidopsis thaliana]
  misc_feature (1)..(164): Homolog of NCBI NO: 21617994 NR Description: unknown [Arabidopsis thaliana]
  misc_feature (1)..(164): Homolog of NCBI NO: 18414493 NR Description: expressed integral membrane protein common family
MRERPYDLLLRFLGLSLTLVAVIIVGVDNETKVISYAEMQFKATAKWEYVSAIVFFLVINAIACSYAAASLVITLMARSNGRKNDVTLLGLTALDLVMMALLFSANGAACAVGVIAQKGNSHVQWMKVCNVFDAYCRHVTAALVLSIIGSTVFLLLVLLSVLKLHYRTGI

SEQ ID NO: 51347 - protein, 132 aa, Glycine max
  peptide (1)..(132): Ceres Seq. ID no. 15227146
  misc_feature (1)..(114): Pfam Name: Domain of unknown function (DUF588) Pfam Description: Domain of unknown function (DUF588)
  misc_feature (1)..(126): Homolog of NCBI NO: 21553953 NR Description: unknown [Arabidopsis thaliana]
  misc_feature (1)..(126): Homolog of NCBI NO: 15237068 NR Description: expressed integral membrane protein common family
  misc_feature (1)..(130): Homolog of NCBI NO: 34394242 NR Description: integral membrane protein-like
  misc_feature (1)..(124): Homolog of NCBI NO: 15230708 NR Description: expressed protein [Arabidopsis thaliana]
  misc_feature (14)..(127): Homolog of NCBI NO: 7430335 NR Description: hypothetical 15.5K protein - Arabidopsis thaliana
  misc_feature (1)..(127): Homolog of NCBI NO: 34915110 NR Description: P0503E05.4 [Oryza sativa (japonica
  misc_feature (1)..(127): Homolog of NCBI NO: 18414489 NR Description: expressed integral membrane protein common family
  misc_feature (1)..(126): Homolog of NCBI NO: 15234654 NR Description: expressed protein [Arabidopsis thaliana]
  misc_feature (1)..(126): Homolog of NCBI NO: 21617994 NR Description: unknown [Arabidopsis thaliana]
  misc_feature (1)..(126): Homolog of NCBI NO: 18414493 NR Description: expressed integral membrane protein common family
MQFKATAKWEYVSAIVFFLVINAIACSYAAASLVITLMARSNGRKNDVTLLGLTALDLVMMALLFSANGAACAVGVIAQKGNSHVQWMKVCNVFDAYCRHVTAALVLSIIGSTVFLLLVLLSVLKLHYRTGI

SEQ ID NO: 51348 - DNA, 751 bp, Glycine max
  misc_feature (1)..(751): Ceres Seq. ID no. 15170007
aaaaagacactgaaagaacagcaatggaagctgcattatgcagtgcacttgctctttcacccaaccaagtattcaacgcagcaaatcctggagataaaaatgttcctttgaaatatagcaaagatcggagtgttgtaatgacagtggcagccactggaatattagggaaaggtggtgggttgttggagaggccaaccatagagacaacatcacctggtcgggaatctgaatttgacttgaggaaatcgcggaaaacatccccaccctaccgagttttgctgcacaatgacaacttcaacaagcgagaatatgttgtgcaagtgttgatgaaggtgataccaggaatgaccattgataatgcggttaacatcatgcaggaggcacattataatggactagcagtggtgatagtatgtgctcaagtggatgctgaagatcactgcatgcagttaagaggaaacggtcttttaagttctattgagccagctgatggtggtggttgttgatacatagagagaccattgacatgatgagctttggccaaatagtttcattgaagaagtgacatcatatacacatttccatgatgtgcatctttccaaccactgaagatggttgtatagaaaattattgactaggtaaggaaagggatagtgctagttagttagtagttagtacttatacaggacataatttgctaccagccagtggcattatttggatttaacgtgttatactatcattagtccct

SEQ ID NO: 51349 - protein, 167 aa, Glycine max
  peptide (1)..(167): Ceres Seq. ID no. 15170008
  misc_feature (71)..(161): Homolog of NCBI NO: 33241103 NR Description: Uncharacterized conserved protein
  misc_feature (68)..(161): Homolog of NCBI NO: 33866680 NR Description: conserved hypothetical protein [Synechococcus sp.
  misc_feature (83)..(163): Homolog of NCBI NO: 22297755 NR Description: ORF_ID:tll0211~hypothetical protein
  misc_feature (83)..(161): Homolog of NCBI NO: 16331021 NR Description: unknown protein [Synechocystis sp. PCC 6803]
  misc_feature (82)..(161): Homolog of NCBI NO: 17231817 NR Description: hypothetical protein [Nostoc sp. PCC 7120]
  misc_feature (83)..(161): Homolog of NCBI NO: 23043721 NR Description: hypothetical protein [Trichodesmium erythraeum
  misc_feature (8)..(167): Homolog of NCBI NO: 18409086 NR Description: expressed protein [Arabidopsis thaliana]
KDTERTAMEAALCSALALSPNQVFNAANPGDKNVPLKYSKDRSVVMTVAATGILGKGGGLLERPTIETTSPGRESEFDLRKSRKTSPPYRVLLHNDNFNKREYVVQVLMKVIPGMTIDNAVNIMQEAHYNGLAVVIVCAQVDAEDHCMQLRGNGLLSSIEPADGGGC

SEQ ID NO: 51350 - protein, 160 aa, Glycine max
  peptide (1)..(160): Ceres Seq. ID no. 15170009
  misc_feature (64)..(154): Homolog of NCBI NO: 33241103 NR Description: Uncharacterized conserved protein
  misc_feature (61)..(154): Homolog of NCBI NO: 33866680 NR Description: conserved hypothetical protein [Synechococcus sp.
  misc_feature (76)..(156): Homolog of NCBI NO: 22297755 NR Description: ORF_ID:tll0211~hypothetical protein
  misc_feature (76)..(154): Homolog of NCBI NO: 16331021 NR Description: unknown protein [Synechocystis sp. PCC 6803]
  misc_feature (75)..(154): Homolog of NCBI NO: 17231817 NR Description: hypothetical protein [Nostoc sp. PCC 7120]
  misc_feature (76)..(154): Homolog of NCBI NO: 23043721 NR Description: hypothetical protein [Trichodesmium erythraeum
  misc_feature (1)..(160): Homolog of NCBI NO: 18409086 NR Description: expressed protein [Arabidopsis thaliana]
MEAALCSALALSPNQVFNAANPGDKNVPLKYSKDRSVVMTVAATGILGKGGGLLERPTIETTSPGRESEFDLRKSRKTSPPYRVLLHNDNFNKREYVVQVLMKVIPGMTIDNAVNIMQEAHYNGLAVVIVCAQVDAEDHCMQLRGNGLLSSIEPADGGGC

SEQ ID NO: 51351 - protein, 122 aa, Glycine max
  peptide (1)..(122): Ceres Seq. ID no. 15170010
  misc_feature (26)..(116): Homolog of NCBI NO: 33241103 NR Description: Uncharacterized conserved protein
  misc_feature (23)..(116): Homolog of NCBI NO: 33866680 NR Description: conserved hypothetical protein [Synechococcus sp.
  misc_feature (38)..(118): Homolog of NCBI NO: 22297755 NR Description: ORF_ID:tll0211~hypothetical protein
  misc_feature (38)..(116): Homolog of NCBI NO: 16331021 NR Description: unknown protein [Synechocystis sp. PCC 6803]
  misc_feature (37)..(116): Homolog of NCBI NO: 17231817 NR Description: hypothetical protein [Nostoc sp. PCC 7120]
  misc_feature (38)..(116): Homolog of NCBI NO: 23043721 NR Description: hypothetical protein [Trichodesmium erythraeum
  misc_feature (1)..(122): Homolog of NCBI NO: 18409086 NR Description: expressed protein [Arabidopsis thaliana]
MTVAATGILGKGGGLLERPTIETTSPGRESEFDLRKSRKTSPPYRVLLHNDNFNKREYVVQVLMKVIPGMTIDNAVNIMQEAHYNGLAVVIVCAQVDAEDHCMQLRGNGLLSSIEPADGGGC

SEQ ID NO: 51352 - DNA, 655 bp, Glycine max
  misc_feature (1)..(655): Ceres Seq. ID no. 15226140
acatcctaatcgaaaaaagatttgtgctatctaagagctgagtttttctgaatcttcagaggaaacataacatcatattagggaccctccctctctacattgttgcagagaatacaaagcctcaagtgaaccaagcaattcatctgcggaaggacatcatattttgtacacgccttctcaactatctaggaaagggatggagggaaatatggagaaaaagtccccttgcatgaatgtaataaagctggatggtaaagaaataaaaatgcctggcttgaatatggatgatatcaataagcagtcaaatatggttgtgtctgtgtcaacaacacctcaagctgcatctgcattgaagaagtcttcgagtgaaaggaggagttgtctatgctcacccaccacacatgttggatccttcaggtgccggcaccaccgttcaggaatgagccatgctagctctgttggctccaatctctctgcaatgagctccaacgactcactccaatctcaatactagccttgcctggcttctgtgcttgaatatgttgtgaatactgcaaagtttcaatggaaagaactctcatgttaactaaattacttgtaatgaaataagttttttaataacaaaaatattattttaattaattttttttgtggg

SEQ ID NO: 51353 - protein, 105 aa, Glycine max
  peptide (1)..(105): Ceres Seq. ID no. 15226141
  misc_feature (57)..(100): Homolog of NCBI NO: 15241100 NR Description: hypothetical protein [Arabidopsis thaliana]
  misc_feature (43)..(97): Homolog of NCBI NO: 4105790 NR Description: PGPS/D10 [Petunia x hybrida]
  misc_feature (1)..(100): Homolog of NCBI NO: 22331053 NR Description: expressed protein [Arabidopsis thaliana]
MEGNMEKKSPCMNVIKLDGKEIKMPGLNMDDINKQSNMVVSVSTTPQAASALKKSSSERRSCLCSPTTHVGSFRCRHHRSGMSHASSVGSNLSAMSSNDSLQSQY

SEQ ID NO: 51354 - protein, 101 aa, Glycine max
  peptide (1)..(101): Ceres Seq. ID no. 15226142
  misc_feature (53)..(96): Homolog of NCBI NO: 15241100 NR Description: hypothetical protein [Arabidopsis thaliana]
  misc_feature (39)..(93): Homolog of NCBI NO: 4105790 NR Description: PGPS/D10 [Petunia x hybrida]
  misc_feature (1)..(96): Homolog of NCBI NO: 22331053 NR Description: expressed protein [Arabidopsis thaliana]
MEKKSPCMNVIKLDGKEIKMPGLNMDDINKQSNMVVSVSTTPQAASALKKSSSERRSCLCSPTTHVGSFRCRHHRSGMSHASSVGSNLSAMSSNDSLQSQY

SEQ ID NO: 51355 - protein, 94 aa, Glycine max
  peptide (1)..(94): Ceres Seq. ID no. 15226143
  misc_feature (46)..(89): Homolog of NCBI NO: 15241100 NR Description: hypothetical protein [Arabidopsis thaliana]
  misc_feature (32)..(86): Homolog of NCBI NO: 4105790 NR Description: PGPS/D10 [Petunia x hybrida]
  misc_feature (1)..(89): Homolog of NCBI NO: 22331053 NR Description: expressed protein [Arabidopsis thaliana]
MNVIKLDGKEIKMPGLNMDDINKQSNMVVSVSTTPQAASALKKSSSERRSCLCSPTTHVGSFRCRHHRSGMSHASSVGSNLSAMSSNDSLQSQY

SEQ ID NO: 51356 - DNA, 1416 bp, Glycine max
  misc_feature (1)..(1416): Ceres Seq. ID no. 14311713
aggttaggttacttagcttaaggaggggagaataccaagaagctccgcttcctttttcaagtgcaattcttggtgatttccaatttttttcttgagtaggcaaaaaattgaaaaaaaaaaactatagtttcatgttaatgggtatccatcaatcatgcagaaattcataaacaaatgattgtgaaaaagatattttgttttacaaacttaggttattctttcttgttttcagtaatattcttctgtggttgctttattttctggccactttccacaagcatagattctcatagagagtccagagagagccctctctcctagctgtgcagcagaggaatggatgattgtgctctgctctgctttgattctctctgctcataaagaacctcttcatactcattgcagttgcagtacgtggggggtgctttcaacactttcttcaatcagcaaaatgagtcatgcacattctcatatgggctctggtagtagaaccactcgaagagcttttgagtttgggaagacacatgtagtgaggccaaaaggaaaacaccaagccactatagtttggctgcatggtcttggtgataatggtttgagctcatctcagctcctggaatcccttccacttccaaatataaaatggatttgcccaactgctcctacccgtcctgtggcgatactggtgggttttccctgcactgcatggtttgatgtgggagaactttcagaagatggtccagatgattgggagggtttagatgcctcagcagcacacattgctaacttgttgtccacagagccagctgatgtgaaagttggtattggaggcttcagcatgggtgcagcaatagctctgtactcttcaacttgttttgccatgggaaggtatggaaatggcattccataccctctcaacttaagaacagtggttggactaagtggttggcttcccggatcaaggagcttaaggaacaagatagaagtgtcacatgaagcaagaaggcgagcagcttcattacccattttgctgtgccatggaatcagtgatgatgtagtcctttgcaaatacggagaaaaatctgctcaatccttatgttcagcagggtttcgatatgttgcattcaaatcttatgatgggcttggtcattacacagttcctagagaaatggatgaggtttgcacttggcttagttcaaggctgggacttgaaggtatataggaggatttattttcttggtccctttttgtcatgttcctcgggcaataaagatctgcatatgttttttaagaattttcctagggactggattagttgtattattgaagagatttttagttattattattattattctaacatagcacggaccttgacctccttatttctcaatttcaaagaagatatggttaaaaaat

SEQ ID NO: 51357 - protein, 292 aa, Glycine max
  peptide (1)..(292): Ceres Seq. ID no. 14311714
  misc_feature (58)..(287): Pfam Name: Phospholipase/Carboxylesterase Pfam Description: Phospholipase/Carboxylesterase
  misc_feature (140)..(291): Homolog of NCBI NO: 28932772 NR Description: FPh1 [Gossypium hirsutum]
  misc_feature (103)..(290): Homolog of NCBI NO: 34912598 NR Description: P0046B10.16 [Oryza sativa (japonica
  misc_feature (235)..(266): Homolog of NCBI NO: 5903036 NR Description: F6D8.5 [Arabidopsis thaliana]
  misc_feature (38)..(204): Homolog of NCBI NO: 5903036 NR Description: F6D8.5 [Arabidopsis thaliana]
  misc_feature (235)..(291): Homolog of NCBI NO: 15219072 NR Description: hypothetical protein [Arabidopsis thaliana]
  misc_feature (38)..(204): Homolog of NCBI NO: 15219072 NR Description: hypothetical protein [Arabidopsis thaliana]
  misc_feature (38)..(291): Homolog of NCBI NO: 15241251 NR Description: expressed protein [Arabidopsis thaliana]
  misc_feature (27)..(289): Homolog of NCBI NO: 29409364 NR Description: biostress-resistance-related protein [Triticum
  misc_feature (54)..(289): Homolog of NCBI NO: 34910274 NR Description: OSJNBa0089K24.24 [Oryza sativa (japonica
  misc_feature (38)..(291): Homolog of NCBI NO: 15232645 NR Description: lysophospholipase -related [Arabidopsis thaliana]
MIVLCSALILSAHKEPLHTHCSCSTWGVLSTLSSISKMSHAHSHMGSGSRTTRRAFEFGKTHVVRPKGKHQATIVWLHGLGDNGLSSSQLLESLPLPNIKWICPTAPTRPVAILVGFPCTAWFDVGELSEDGPDDWEGLDASAAHIANLLSTEPADVKVGIGGFSMGAAIALYSSTCFAMGRYGNGIPYPLNLRTVVGLSGWLPGSRSLRNKIEVSHEARRRAASLPILLCHGISDDVVLCKYGEKSAQSLCSAGFRYVAFKSYDGLGHYTVPREMDEVCTWLSSRLGLEGI

SEQ ID NO: 51358 - protein, 255 aa, Glycine max
  peptide (1)..(255): Ceres Seq. ID no. 14311715
  misc_feature (21)..(250): Pfam Name: Phospholipase/Carboxylesterase Pfam Description: Phospholipase/Carboxylesterase
  misc_feature (103)..(254): Homolog of NCBI NO: 28932772 NR Description: FPh1 [Gossypium hirsutum]
  misc_feature (66)..(253): Homolog of NCBI NO: 34912598 NR Description: P0046B10.16 [Oryza sativa (japonica
  misc_feature (198)..(229): Homolog of NCBI NO: 5903036 NR Description: F6D8.5 [Arabidopsis thaliana]
  misc_feature (1)..(167): Homolog of NCBI NO: 5903036 NR Description: F6D8.5 [Arabidopsis thaliana]
  misc_feature (198)..(254): Homolog of NCBI NO: 15219072 NR Description: hypothetical protein [Arabidopsis thaliana]
  misc_feature (1)..(167): Homolog of NCBI NO: 15219072 NR Description: hypothetical protein [Arabidopsis thaliana]
  misc_feature (1)..(254): Homolog of NCBI NO: 15241251 NR Description: expressed protein [Arabidopsis thaliana]
  misc_feature (1)..(252): Homolog of NCBI NO: 29409364 NR Description: biostress-resistance-related protein [Triticum
  misc_feature (17)..(252): Homolog of NCBI NO: 34910274 NR Description: OSJNBa0089K24.24 [Oryza sativa (japonica
  misc_feature (1)..(254): Homolog of NCBI NO: 15232645 NR Description: lysophospholipase -related [Arabidopsis thaliana]
MSHAHSHMGSGSRTTRRAFEFGKTHVVRPKGKHQATIVWLHGLGDNGLSSSQLLESLPLPNIKWICPTAPTRPVAILVGFPCTAWFDVGELSEDGPDDWEGLDASAAHIANLLSTEPADVKVGIGGFSMGAAIALYSSTCFAMGRYGNGIPYPLNLRTVVGLSGWLPGSRSLRNKIEVSHEARRRAASLPILLCHGISDDVVLCKYGEKSAQSLCSAGFRYVAFKSYDGLGHYTVPREMDEVCTWLSSRLGLEGI

SEQ ID NO: 51359 - protein, 248 aa, Glycine max
  peptide (1)..(248): Ceres Seq. ID no. 14311716
  misc_feature (14)..(243): Pfam Name: Phospholipase/Carboxylesterase Pfam Description: Phospholipase/Carboxylesterase
  misc_feature (96)..(247): Homolog of NCBI NO: 28932772 NR Description: FPh1 [Gossypium hirsutum]
  misc_feature (59)..(246): Homolog of NCBI NO: 34912598 NR Description: P0046B10.16 [Oryza sativa (japonica
  misc_feature (191)..(222): Homolog of NCBI NO: 5903036 NR Description: F6D8.5 [Arabidopsis thaliana]
  misc_feature (1)..(160): Homolog of NCBI NO: 5903036 NR Description: F6D8.5 [Arabidopsis thaliana]
  misc_feature (191)..(247): Homolog of NCBI NO: 15219072 NR Description: hypothetical protein [Arabidopsis thaliana]
  misc_feature (1)..(160): Homolog of NCBI NO: 15219072 NR Description: hypothetical protein [Arabidopsis thaliana]
  misc_feature (1)..(247): Homolog of NCBI NO: 15241251 NR Description: expressed protein [Arabidopsis thaliana]
  misc_feature (1)..(245): Homolog of NCBI NO: 29409364 NR Description: biostress-resistance-related protein [Triticum
  misc_feature (10)..(245): Homolog of NCBI NO: 34910274 NR Description: OSJNBa0089K24.24 [Oryza sativa (japonica
  misc_feature (1)..(247): Homolog of NCBI NO: 15232645 NR Description: lysophospholipase -related [Arabidopsis thaliana]
MGSGSRTTRRAFEFGKTHVVRPKGKHQATIVWLHGLGDNGLSSSQLLESLPLPNIKWICPTAPTRPVAILVGFPCTAWFDVGELSEDGPDDWEGLDASAAHIANLLSTEPADVKVGIGGFSMGAAIALYSSTCFAMGRYGNGIPYPLNLRTVVGLSGWLPGSRSLRNKIEVSHEARRRAASLPILLCHGISDDVVLCKYGEKSAQSLCSAGFRYVAFKSYDGLGHYTVPREMDEVCTWLSSRLGLEGI

SEQ ID NO: 51360 - DNA, 1104 bp, Glycine max
  misc_feature (1)..(1104): Ceres Seq. ID no. 15171646
atcaaaatctaggtatttacaccgcacaatattatgagattgcagtagcagtgtttgctttgctcaagtctcagcgatatgatggcagacccagcaagtttcatagcaagctggttaactccttcttacctcttcatcttggtcaacctcgtcataggcaccatagccatcacttctcgcttcagttccacgcccaaaaaccaacaagcccaccacccccaaccactcagctccttcaatacccatcatcaccaacccaactgcactcagccccaactccttccaataccctcactgttgcagcgagtcacgtccttcaacctctccctccacaaacaccaacccacacctccagaaacacaacatctgcatcccgaaccccaaccccaacctgaaaagccgccggaactgcttcggactccctcactcttggagcgactcaggtccttccataatctttctctccacaaacatgtccaacccgagccagagccagagccagaacctgaacctgaaaagccggaactggttcggagtccctcgctcttgcagcggattcagtccataaacttctcccatctctacagatccgacttcagtcaccgagatgatgaggatcccgattcgggttcggatccgggtcgcggttcgggaaaggcggcggagatgaggaaatcggcgagcgtgagagggggtttgacggatagcgagtgggaggaggtcgagaagcggaggccgcagacggcgaggccggttgaaacgacgacgtcgtggagagaagacgaagaagtagacgccaaagctgacgatttcatcaacaggttcaagaaacagttgaggttgcagaggattgattcccttctccgttacagaggaggtaactcatcatgagtaaagaaaaacccgccctaatcttccttgcgcctgcgtcgttgcctcaagttgttctgacgttaaagtttgttggttttcaaatgtttgtatagtactgcgtgctactaggttggtgtggcaaagttcttgtcttagtaatcatgtcatgtttgtctaatattaataatagacttgtgtaggcatacacaaattgataataaatttgatatt

SEQ ID NO: 51361 - protein, 270 aa, Glycine max
  peptide (1)..(270): Ceres Seq. ID no. 15171647
  misc_feature (1)..(124): Pfam Name: Cotton fibre expressed protein Pfam Description: Cotton fibre expressed protein
  misc_feature (9)..(189): Homolog of NCBI NO: 18423922 NR Description: expressed protein [Arabidopsis thaliana]
  misc_feature (9)..(189): Homolog of NCBI NO: 14326479 NR Description: AT5g56980/MHM17_10 [Arabidopsis thaliana]
  misc_feature (9)..(166): Homolog of NCBI NO: 9757987 NR Description: gene_id:MHM17.10~pir||T04268~similar to unknown
  misc_feature (63)..(265): Homolog of NCBI NO: 15236117 NR Description: uncharacterized protein [Arabidopsis thaliana]
  misc_feature (63)..(265): Homolog of NCBI NO: 549977 NR Description: cDNA-5-encoded protein
  misc_feature (63)..(265): Homolog of NCBI NO: 21594851 NR Description: uncharacterized protein [Arabidopsis thaliana]
  misc_feature (9)..(256): Homolog of NCBI NO: 21594851 NR Description: uncharacterized protein [Arabidopsis thaliana]
  misc_feature (9)..(256): Homolog of NCBI NO: 15236117 NR Description: uncharacterized protein [Arabidopsis thaliana]
  misc_feature (9)..(256): Homolog of NCBI NO: 549977 NR Description: cDNA-5-encoded protein
  misc_feature (1)..(265): Homolog of NCBI NO: 15225251 NR Description: expressed protein [Arabidopsis thaliana]
MMADPASFIASWLTPSYLFILVNLVIGTIAITSRFSSTPKNQQAHHPQPLSSFNTHHHQPNCTQPQLLPIPSLLQRVTSFNLSLHKHQPTPPETQHLHPEPQPQPEKPPELLRTPSLLERLRSFHNLSLHKHVQPEPEPEPEPEPEKPELVRSPSLLQRIQSINFSHLYRSDFSHRDDEDPDSGSDPGRGSGKAAEMRKSASVRGGLTDSEWEEVEKRRPQTARPVETTTSWREDEEVDAKADDFINRFKKQLRLQRIDSLLRYRGGNSS

SEQ ID NO: 51362 - protein, 269 aa, Glycine max
  peptide (1)..(269): Ceres Seq. ID no. 15171648
  misc_feature (1)..(123): Pfam Name: Cotton fibre expressed protein Pfam Description: Cotton fibre expressed protein
  misc_feature (8)..(188): Homolog of NCBI NO: 18423922 NR Description: expressed protein [Arabidopsis thaliana]
  misc_feature (8)..(188): Homolog of NCBI NO: 14326479 NR Description: AT5g56980/MHM17_10 [Arabidopsis thaliana]
  misc_feature (8)..(165): Homolog of NCBI NO: 9757987 NR Description: gene_id:MHM17.10~pir||T04268~similar to unknown
  misc_feature (62)..(264): Homolog of NCBI NO: 15236117 NR Description: uncharacterized protein [Arabidopsis thaliana]
  misc_feature (62)..(264): Homolog of NCBI NO: 549977 NR Description: cDNA-5-encoded protein
  misc_feature (62)..(264): Homolog of NCBI NO: 21594851 NR Description: uncharacterized protein [Arabidopsis thaliana]
  misc_feature (8)..(255): Homolog of NCBI NO: 21594851 NR Description: uncharacterized protein [Arabidopsis thaliana]
  misc_feature (8)..(255): Homolog of NCBI NO: 15236117 NR Description: uncharacterized protein [Arabidopsis thaliana]
  misc_feature (8)..(255): Homolog of NCBI NO: 549977 NR Description: cDNA-5-encoded protein
  misc_feature (1)..(264): Homolog of NCBI NO: 15225251 NR Description: expressed protein [Arabidopsis thaliana]
MADPASFIASWLTPSYLFILVNLVIGTIAITSRFSSTPKNQQAHHPQPLSSFNTHHHQPNCTQPQLLPIPSLLQRVTSFNLSLHKHQPTPPETQHLHPEPQPQPEKPPELLRTPSLLERLRSFHNLSLHKHVQPEPEPEPEPEPEKPELVRSPSLLQRIQSINFSHLYRSDFSHRDDEDPDSGSDPGRGSGKAAEMRKSASVRGGLTDSEWEEVEKRRPQTARPVETTTSWREDEEVDAKADDFINRFKKQLRLQRIDSLLRYRGGNSS

SEQ ID NO: 51363 - DNA, 1355 bp, Glycine max
  misc_feature (1)..(1355): Ceres Seq. ID no. 14311721
actatactagtgagaaaagaaagggaagtcctccgcgccgccactcctcccatctctctgctctaaacgacaccgttttagtcttctcctcaagtcatggccacactcaagagcctctgcttcagaggaactgcctttcccgtttgcccctccaatgtcaccaacaatagaaactccaggagctcatattggaggcctgcacaagcagccgtgaagcccaatttccatctcccaatgcgcagttttgagttaaaaaataggacttctccagaggacataaaggctctgagattgataactgccattaaaactccatacctacctgatggtcgatttgatcttgaagcatatgatgacttggtgaatatgcagattggacaaggggccgaaggtattattgttggtgggacaactggtgaaggccaattaatgagctgggaagagcacataatgcttattgctcacacagtcaactgttttggtgggaaaattaaggttattggaaatactggaagcaactccaccagggaagcaattcatgccaccgagcaaggttttgctgttggaatgcatgctgcccttcacataaacccttactatggcaaaacctccttggatggtatgcttgctcactttcaaagtgtgctttccatgggtcccacaataatctacaatgtgcctgcacggactggtcaagacattcccccgcatgtaattcaaaccttagctgaaagtgctaacctggctggtgtcaaggagtgtgtgggaaatgaccggatcaagcagtatacagatgatggaattgttgtgtggagtgggaatgatgatcaatgccatgatgctagatggggttatggggctactggtgtgatatctgttgtaagcaacctggttcctggtttaatgcgagaactcatgtttggcggcgtaaaccctacactaaattctaagcttttgcctctgattgactggcttttccacatgccaaaccccattggtttgaacactgctcttgctcaacttggagttgtcagacccgtttttaggctaccgtttgtacctctccctgtggacaaaaggatagagtttgccaatttggtgaaggaaattggtcgagagcattttgttggaaataaagatgttgaggttcttgatgacgatgactttttcttggttagtcgttattaagttaccatgtaggttcgttgtatcctttcttggggtttgccaaatttaaaatccagatgagagtctattgtagtgaactagttaatgatcatctagtttctttttactggctactttgtagttgcaaactggttcaaatttattctggatttttttcttttggtaat

SEQ ID NO: 51364 - protein, 363 aa, Glycine max
  peptide (1)..(363): Ceres Seq. ID no. 14311722
  misc_feature (62)..(339): Pfam Name: Dihydrodipicolinate synthetase family Pfam Description: Dihydrodipicolinate synthetase family
  misc_feature (28)..(363): Homolog of NCBI NO: 1076317 NR Description: dihydrodipicolinate synthase (EC 4.2.1.52)
  misc_feature (28)..(363): Homolog of NCBI NO: 15232971 NR Description: dihydrodipicolinate synthase precursor
  misc_feature (19)..(363): Homolog of NCBI NO: 30695296 NR Description: dihydrodipicolinate synthase precursor
  misc_feature (28)..(363): Homolog of NCBI NO: 6014908 NR Description: Dihydrodipicolinate synthase, chloroplast
  misc_feature (1)..(362): Homolog of NCBI NO: 8648949 NR Description: dihydrodipicolinate synthase
  misc_feature (1)..(362): Homolog of NCBI NO: 1076280 NR Description: dihydrodipicolinate synthase (EC 4.2.1.52)
  misc_feature (1)..(363): Homolog of NCBI NO: 11066382 NR Description: dihydrodipicolinate synthase 2 [Arabidopsis
  misc_feature (1)..(363): Homolog of NCBI NO: 15225477 NR Description: dihydrodipicolinate synthase -related
  misc_feature (38)..(363): Homolog of NCBI NO: 1084359 NR Description: dihydrodipicolinate synthase (EC 4.2.1.52)
  misc_feature (37)..(363): Homolog of NCBI NO: 6014907 NR Description: Dihydrodipicolinate synthase, chloroplast
MATLKSLCFRGTAFPVCPSNVTNNRNSRSSYWRPAQAAVKPNFHLPMRSFELKNRTSPEDIKALRLITAIKTPYLPDGRFDLEAYDDLVNMQIGQGAEGIIVGGTTGEGQLMSWEEHIMLIAHTVNCFGGKIKVIGNTGSNSTREAIHATEQGFAVGMHAALHINPYYGKTSLDGMLAHFQSVLSMGPTIIYNVPARTGQDIPPHVIQTLAESANLAGVKECVGNDRIKQYTDDGIVVWSGNDDQCHDARWGYGATGVISVVSNLVPGLMRELMFGGVNPTLNSKLLPLIDWLFHMPNPIGLNTALAQLGVVRPVFRLPFVPLPVDKRIEFANLVKEIGREHFVGNKDVEVLDDDDFFLVSRY

SEQ ID NO: 51365 - protein, 317 aa, Glycine max
  peptide (1)..(317): Ceres Seq. ID no. 14311723
  misc_feature (16)..(293): Pfam Name: Dihydrodipicolinate synthetase family Pfam Description: Dihydrodipicolinate synthetase family
  misc_feature (1)..(317): Homolog of NCBI NO: 1076317 NR Description: dihydrodipicolinate synthase (EC 4.2.1.52)
  misc_feature (1)..(317): Homolog of NCBI NO: 15232971 NR Description: dihydrodipicolinate synthase precursor
  misc_feature (1)..(317): Homolog of NCBI NO: 30695296 NR Description: dihydrodipicolinate synthase precursor
  misc_feature (1)..(317): Homolog of NCBI NO: 6014908 NR Description: Dihydrodipicolinate synthase, chloroplast
  misc_feature (1)..(316): Homolog of NCBI NO: 8648949 NR Description: dihydrodipicolinate synthase
  misc_feature (1)..(316): Homolog of NCBI NO: 1076280 NR Description: dihydrodipicolinate synthase (EC 4.2.1.52)
  misc_feature (1)..(317): Homolog of NCBI NO: 11066382 NR Description: dihydrodipicolinate synthase 2 [Arabidopsis
  misc_feature (1)..(317): Homolog of NCBI NO: 15225477 NR Description: dihydrodipicolinate synthase -related
  misc_feature (1)..(317): Homolog of NCBI NO: 1084359 NR Description: dihydrodipicolinate synthase (EC 4.2.1.52)
  misc_feature (1)..(317): Homolog of NCBI NO: 6014907 NR Description: Dihydrodipicolinate synthase, chloroplast
MRSFELKNRTSPEDIKALRLITAIKTPYLPDGRFDLEAYDDLVNMQIGQGAEGIIVGGTTGEGQLMSWEEHIMLIAHTVNCFGGKIKVIGNTGSNSTREAIHATEQGFAVGMHAALHINPYYGKTSLDGMLAHFQSVLSMGPTIIYNVPARTGQDIPPHVIQTLAESANLAGVKECVGNDRIKQYTDDGIVVWSGNDDQCHDARWGYGATGVISVVSNLVPGLMRELMFGGVNPTLNSKLLPLIDWLFHMPNPIGLNTALAQLGVVRPVFRLPFVPLPVDKRIEFANLVKEIGREHFVGNKDVEVLDDDDFFLVSRY

SEQ ID NO: 51366 - protein, 273 aa, Glycine max
  peptide (1)..(273): Ceres Seq. ID no. 14311724
  misc_feature (1)..(249): Pfam Name: Dihydrodipicolinate synthetase family Pfam Description: Dihydrodipicolinate synthetase family
  misc_feature (1)..(273): Homolog of NCBI NO: 1076317 NR Description: dihydrodipicolinate synthase (EC 4.2.1.52)
  misc_feature (1)..(273): Homolog of NCBI NO: 15232971 NR Description: dihydrodipicolinate synthase precursor
  misc_feature (1)..(273): Homolog of NCBI NO: 30695296 NR Description: dihydrodipicolinate synthase precursor
  misc_feature (1)..(273): Homolog of NCBI NO: 6014908 NR Description: Dihydrodipicolinate synthase, chloroplast
  misc_feature (1)..(272): Homolog of NCBI NO: 8648949 NR Description: dihydrodipicolinate synthase
  misc_feature (1)..(272): Homolog of NCBI NO: 1076280 NR Description: dihydrodipicolinate synthase (EC 4.2.1.52)
  misc_feature (1)..(273): Homolog of NCBI NO: 11066382 NR Description: dihydrodipicolinate synthase 2 [Arabidopsis
  misc_feature (1)..(273): Homolog of NCBI NO: 15225477 NR Description: dihydrodipicolinate synthase -related
  misc_feature (1)..(273): Homolog of NCBI NO: 1084359 NR Description: dihydrodipicolinate synthase (EC 4.2.1.52)
  misc_feature (1)..(273): Homolog of NCBI NO: 6014907 NR Description: Dihydrodipicolinate synthase, chloroplast
MQIGQGAEGIIVGGTTGEGQLMSWEEHIMLIAHTVNCFGGKIKVIGNTGSNSTREAIHATEQGFAVGMHAALHINPYYGKTSLDGMLAHFQSVLSMGPTIIYNVPARTGQDIPPHVIQTLAESANLAGVKECVGNDRIKQYTDDGIVVWSGNDDQCHDARWGYGATGVISVVSNLVPGLMRELMFGGVNPTLNSKLLPLIDWLFHMPNPIGLNTALAQLGVVRPVFRLPFVPLPVDKRIEFANLVKEIGREHFVGNKDVEVLDDDDFFLVSRY

SEQ ID NO: 51367 - DNA, 877 bp, Glycine max
  misc_feature (1)..(877): Ceres Seq. ID no. 13594535
ccttggatcccccgggctscaggaattcscactttattgwgwyyawyacctagaacatcctaatcgaaaatattagccttcccttgtcctcattgaaatctctttcttctcgtgggtttctctattttttttctttgtcacttctccaagtaggttctagcaatttcttcaattcttgagtatagtttaaaggatgattctttcgatgaagcaagttttctcactagtaatattcattgcattttgggaattttcttctggtgtagctgatgggggagatgtgattatagttcgagtatcaaataatttaaaccaaggtttaagtttcacaattcactgcaaaaccaataaccaagacttgggaactcaagtggtgaatccgggttactttgaacgacttgaactccatcatgacaatgcagctgacacaaaattcttgttttgcaaaataacatggagagatgcatcaattgattatgtcatttaccaagatgccagggattttcgtcgtagatgtataactgattgtaattgggaagtcaacaatgaaaaccttcttggcactaatcaatatactctaaaaccagatattattgtcccatggcctaaaaattgatacccatttagtgaacatccaattttacttgggtaatttaaataaaaaagtgttgtgttaaaaaaaaaaaaaaaaaaaaaaaaaaaaaaaaaaaaaaaaaaaaaaaaaaaaaaaaaaaaaaaaaaaaaaaaaaaaaaaaaaaaaaaaaaaaaaaaaaaaaaaaaaaaaaaaaaaagaaaaaattataaaaaaaaaaannctntttttttcacccccccccccccggggggggcccccccccccccctcccccaaaaagggg

SEQ ID NO: 51368 - protein, 140 aa, Glycine max
  peptide (1)..(140): Ceres Seq. ID no. 15221379
  misc_feature (31)..(126): Pfam Name: Plant self-incompatibility protein S1 Pfam Description: Plant self-incompatibility protein S1
  misc_feature (7)..(126): Homolog of NCBI NO: 2148045 NR Description: self-incompatibility protein S3 precursor -
  misc_feature (8)..(126): Homolog of NCBI NO: 1086231 NR Description: self-incompatibility protein S1 precursor -
MILSMKQVFSLVIFIAFWEFSSGVADGGDVIIVRVSNNLNQGLSFTIHCKTNNQDLGTQVVNPGYFERLELHHDNAADTKFLFCKITWRDASIDYVIYQDARDFRRRCITDCNWEVNNENLLGTNQYTLKPDIIVPWPKN

SEQ ID NO: 51369 - protein, 136 aa, Glycine max
  peptide (1)..(136): Ceres Seq. ID no. 15221380
  misc_feature (27)..(122): Pfam Name: Plant self-incompatibility protein S1 Pfam Description: Plant self-incompatibility protein S1
  misc_feature (3)..(122): Homolog of NCBI NO: 2148045 NR Description: self-incompatibility protein S3 precursor -
  misc_feature (4)..(122): Homolog of NCBI NO: 1086231 NR Description: self-incompatibility protein S1 precursor -
MKQVFSLVIFIAFWEFSSGVADGGDVIIVRVSNNLNQGLSFTIHCKTNNQDLGTQVVNPGYFERLELHHDNAADTKFLFCKITWRDASIDYVIYQDARDFRRRCITDCNWEVNNENLLGTNQYTLKPDIIVPWPKN

SEQ ID NO: 51370 - DNA, 1552 bp, Glycine max
  misc_feature (1)..(1552): Ceres Seq. ID no. 15171669
atccttctggcgtcgacggtgaaacttgttttccttgcgcgaagctttggcattcccccaatcgcttcatcctcatctacttaaccctaaccccacactctcacatactacatatataaaaccgccgtcacgatgatgctcagaattcgtagccgcgatggcctggagcgagtgagcgtcgaaaaccccctcgccacaacagtctcggacctaaaacggattatccaaacccaattgggaatcccggttcacaaccaaaccctctccaccaaccagaacctcctcttggccaaatccctcgaagatctcctccgattcaccgacatgtccaacctcgatgcgtctctctcgtctcttaacctcggccacggctccatcgtcttcttggcctacgagggcgagcggcgcgtggcgggccccgccttcaaccccgccggctccttcggccgcaagatgaccatggacgacctcatcgccaagcagatgcgcgtcacgcgccaggagaatccacactgcgagctcgtctccttcgaccgcgactgcgccaacgcgttccagcactacgtcaacgacactctcgccttcgccgtcaagcgcggggggttcatgtacggcaccgtttcggaggtgggaaaggtcgaggtggacttcatctacgagcctccgcagcagggttcggaggacaatctcgtctttttcagggacccagaagaggagaagtttgttgaagctattgcggtggggttggggatgaggaaggttgggtttattttcacgcagacgattactcaggataagaaggattacactttgtcgaatagggaggtgcttcaggctgtggagtaccatgccgagagtgggttgaaggagtgggctactgcggtggttaagcttgaggtgaatgaggaaatgggtggtgctgatgtgcattttgaagcgtttcagatgagtgatgtgtgtgtgaggttgtttaaggaagggtggttcgagacggagatcaaggaggacgatgatcccaagttgtcgaagatgaagaaggatgtggttgtcggggttaaggatactagagaggttgacaatgatttcttcttggtcgtcgtcaaaatcgctgatcatcagggtcctctttcatcatcatttcccattgagaaccggaacactcaagtgactatgaaggctttgaagaatcatctggaacggtcaaaaaatcttccatttgtgaagcgaatttctgattttcatcttcttctcgtattagcaagggttttagacctgaatgctgatgttcctgcattgacggaatgtgtgcagacacagacttctgttccagaaggttatcagatccttattgagtctatggcaagcactgcttgatgctgtatgcagttgttctggactcatggtgacacgagaattatgcactttacgttcaggtcctttgcagcaacatggtgcatattgccccatagcactcaaggaatgtttcgtatgttggtaatttgtacattgcttctttattgctgcggaaaatctcggatctgtcattttaccg

SEQ ID NO: 51371 - protein, 413 aa, Glycine max
  peptide (1)..(413): Ceres Seq. ID no. 15171670
  misc_feature (155)..(410): Pfam Name: NPL4 family Pfam Description: NPL4 family
  misc_feature (168)..(227): Homolog of NCBI NO: 21360364 NR Description: unknown [Squalus mitsukurii]
  misc_feature (277)..(329): Homolog of NCBI NO: 34905848 NR Description: P0483G10.28 [Oryza sativa (japonica
  misc_feature (1)..(410): Homolog of NCBI NO: 34914854 NR Description: P0416G11.10 [Oryza sativa (japonica
  misc_feature (1)..(412): Homolog of NCBI NO: 18407495 NR Description: expressed protein [Arabidopsis thaliana]
  misc_feature (2)..(413): Homolog of NCBI NO: 15229360 NR Description: expressed protein [Arabidopsis thaliana]
MMLRIRSRDGLERVSVENPLATTVSDLKRIIQTQLGIPVHNQTLSTNQNLLLAKSLEDLLRFTDMSNLDASLSSLNLGHGSIVFLAYEGERRVAGPAFNPAGSFGRKMTMDDLIAKQMRVTRQENPHCELVSFDRDCANAFQHYVNDTLAFAVKRGGFMYGTVSEVGKVEVDFIYEPPQQGSEDNLVFFRDPEEEKFVEAIAVGLGMRKVGFIFTQTITQDKKDYTLSNREVLQAVEYHAESGLKEWATAVVKLEVNEEMGGADVHFEAFQMSDVCVRLFKEGWFETEIKEDDDPKLSKMKKDVVVGVKDTREVDNDFFLVVVKIADHQGPLSSSFPIENRNTQVTMKALKNHLERSKNLPFVKRISDFHLLLVLARVLDLNADVPALTECVQTQTSVPEGYQILIESMASTA

SEQ ID NO: 51372 - protein, 412 aa, Glycine max
  peptide (1)..(412): Ceres Seq. ID no. 15171671
  misc_feature (154)..(409): Pfam Name: NPL4 family Pfam Description: NPL4 family
  misc_feature (167)..(226): Homolog of NCBI NO: 21360364 NR Description: unknown [Squalus mitsukurii]
  misc_feature (276)..(328): Homolog of NCBI NO: 34905848 NR Description: P0483G10.28 [Oryza sativa (japonica
  misc_feature (1)..(409): Homolog of NCBI NO: 34914854 NR Description: P0416G11.10 [Oryza sativa (japonica
  misc_feature (1)..(411): Homolog of NCBI NO: 18407495 NR Description: expressed protein [Arabidopsis thaliana]
  misc_feature (1)..(412): Homolog of NCBI NO: 15229360 NR Description: expressed protein [Arabidopsis thaliana]
MLRIRSRDGLERVSVENPLATTVSDLKRIIQTQLGIPVHNQTLSTNQNLLLAKSLEDLLRFTDMSNLDASLSSLNLGHGSIVFLAYEGERRVAGPAFNPAGSFGRKMTMDDLIAKQMRVTRQENPHCELVSFDRDCANAFQHYVNDTLAFAVKRGGFMYGTVSEVGKVEVDFIYEPPQQGSEDNLVFFRDPEEEKFVEAIAVGLGMRKVGFIFTQTITQDKKDYTLSNREVLQAVEYHAESGLKEWATAVVKLEVNEEMGGADVHFEAFQMSDVCVRLFKEGWFETEIKEDDDPKLSKMKKDVVVGVKDTREVDNDFFLVVVKIADHQGPLSSSFPIENRNTQVTMKALKNHLERSKNLPFVKRISDFHLLLVLARVLDLNADVPALTECVQTQTSVPEGYQILIESMASTA

SEQ ID NO: 51373 - protein, 349 aa, Glycine max
  peptide (1)..(349): Ceres Seq. ID no. 15171672
  misc_feature (91)..(346): Pfam Name: NPL4 family Pfam Description: NPL4 family
  misc_feature (104)..(163): Homolog of NCBI NO: 21360364 NR Description: unknown [Squalus mitsukurii]
  misc_feature (213)..(265): Homolog of NCBI NO: 34905848 NR Description: P0483G10.28 [Oryza sativa (japonica
  misc_feature (1)..(346): Homolog of NCBI NO: 34914854 NR Description: P0416G11.10 [Oryza sativa (japonica
  misc_feature (1)..(348): Homolog of NCBI NO: 18407495 NR Description: expressed protein [Arabidopsis thaliana]
  misc_feature (1)..(349): Homolog of NCBI NO: 15229360 NR Description: expressed protein [Arabidopsis thaliana]
MSNLDASLSSLNLGHGSIVFLAYEGERRVAGPAFNPAGSFGRKMTMDDLIAKQMRVTRQENPHCELVSFDRDCANAFQHYVNDTLAFAVKRGGFMYGTVSEVGKVEVDFIYEPPQQGSEDNLVFFRDPEEEKFVEAIAVGLGMRKVGFIFTQTITQDKKDYTLSNREVLQAVEYHAESGLKEWATAVVKLEVNEEMGGADVHFEAFQMSDVCVRLFKEGWFETEIKEDDDPKLSKMKKDVVVGVKDTREVDNDFFLVVVKIADHQGPLSSSFPIENRNTQVTMKALKNHLERSKNLPFVKRISDFHLLLVLARVLDLNADVPALTECVQTQTSVPEGYQILIESMASTA

SEQ ID NO: 51374 - DNA, 1461 bp, Glycine max
  misc_feature (1)..(1461): Ceres Seq. ID no. 15177336
aaaaaattagttgcgacttgcgagcaacaaaatgagtgttccaatggagacggagctctcaaccgaccaaaacggcgcttcttcccaacactcactttccgttcccgaggacaaagttcttgtccctgtcgaggtaaccctaaaactttccagcacagctaaaatcgacgacgttcgttccgccgttgaggggatgttagaaaagaggagtttgagctataacgatggacccattccggtgcctcttgatgacgcgtttctagcagataacgtgcaaagaatttgtgtttgtggatgtgatactgatgaggggatgcacaatgataatgttcttttgttctggcaagtcaagcctgttgtacatgtctttcagcttagcgaggaagggccatgtgaggatataagctctgatggccaatcttccagcttcaatgaatggattcttcctgcaaaagaatttgacggcatgtgggaaagcttaatatacgaatctggtctaaagcaacggttattacgatatgcagcaagtgctttgctctttactgaaaaaggggttgatccattccttgtttcatggaaccgcataattttgttacatggaccacctgggactggaaagacgtcgttatgtaaagcattagctcagaaattatcaattcgattcaattcgagatacccacaggcccagcttgttgaagtgaatgcacattctttgttcagtaaatggttctctgaaagtggcaagctggtagcgaaacttttccaaaagattcaagaaatggtagaggaagaaagcaatctagtatttgtattgattgatgaagtcgaaagccttgccgctgctagaaaagctgctttatctggttctgaaccttctgattctattcgggttgtcaatgcattactaactcagatggacaagttaaaatcatcgccaaatgtgataattctaaccacctccaacataactgcggctattgatattgcttttgttgatcgagctgatatcaaagcatatgttggtcccccaactcttcaagctcggtatgaaatattaaggtcctgcttacaggaaatgatgcgtacagggatattgactagtttacaggattgtaagaacgccatgcttcctcattacgctagtgcgaaagataggttgaacactctagattttcatgaggacgctacattcatgcaactgtgcaaacaactacttgaaactgcagaggcatgtgagggaatgagtggaaggtcgttgagaaagcttccatttttggcacatgctgcgcttgcaaatccttttgaatgcaaccctattaagttcttatgtacaatggtagaaacagcaaagagggagcgttctgagcttcctgactaaagtaactaaaatttcaattgaaaatgtgtaaatcaaaagtgtaacgattgcgtctactgcattttagtgcgataagtgttgat

SEQ ID NO: 51375 - protein, 448 aa, Glycine max
  peptide (1)..(448): Ceres Seq. ID no. 15177337
  misc_feature (185)..(349): Pfam Name: ATPase family associated with various cellular Pfam Description: ATPase family associated with various cellular
  misc_feature (12)..(418): Homolog of NCBI NO: 11321607 NR Description: thyroid hormone receptor interactor 13
  misc_feature (12)..(418): Homolog of NCBI NO: 20908701 NR Description: thyroid hormone receptor interactor 13 [Mus
  misc_feature (12)..(418): Homolog of NCBI NO: 12845703 NR Description: unnamed protein product [Mus musculus]
  misc_feature (17)..(445): Homolog of NCBI NO: 34784059 NR Description: Unknown (protein for MGC:65952) [Danio rerio]
  misc_feature (12)..(423): Homolog of NCBI NO: 38969923 NR Description: Unknown (protein for MGC:76197) [Silurana
  misc_feature (402)..(448): Homolog of NCBI NO: 7485976 NR Description: hypothetical protein F22K18.90 - Arabidopsis
  misc_feature (26)..(101): Homolog of NCBI NO: 7485976 NR Description: hypothetical protein F22K18.90 - Arabidopsis
  misc_feature (126)..(362): Homolog of NCBI NO: 7485976 NR Description: hypothetical protein F22K18.90 - Arabidopsis
  misc_feature (26)..(445): Homolog of NCBI NO: 38605777 NR Description: OSJNBa0044K18.20 [Oryza sativa (japonica
  misc_feature (26)..(448): Homolog of NCBI NO: 30686626 NR Description: protein -related binding protein [Arabidopsis
MSVPMETELSTDQNGASSQHSLSVPEDKVLVPVEVTLKLSSTAKIDDVRSAVEGMLEKRSLSYNDGPIPVPLDDAFLADNVQRICVCGCDTDEGMHNDNVLLFWQVKPVVHVFQLSEEGPCEDISSDGQSSSFNEWILPAKEFDGMWESLIYESGLKQRLLRYAASALLFTEKGVDPFLVSWNRIILLHGPPGTGKTSLCKALAQKLSIRFNSRYPQAQLVEVNAHSLFSKWFSESGKLVAKLFQKIQEMVEEESNLVFVLIDEVESLAAARKAALSGSEPSDSIRVVNALLTQMDKLKSSPNVIILTTSNITAAIDIAFVDRADIKAYVGPPTLQARYEILRSCLQEMMRTGILTSLQDCKNAMLPHYASAKDRLNTLDFHEDATFMQLCKQLLETAEACEGMSGRSLRKLPFLAHAALANPFECNPIKFLCTMVETAKRERSELPD

SEQ ID NO: 51376 - protein, 444 aa, Glycine max
  peptide (1)..(444): Ceres Seq. ID no. 15177338
  misc_feature (181)..(345): Pfam Name: ATPase family associated with various cellular Pfam Description: ATPase family associated with various cellular
  misc_feature (8)..(414): Homolog of NCBI NO: 11321607 NR Description: thyroid hormone receptor interactor 13
  misc_feature (8)..(414): Homolog of NCBI NO: 20908701 NR Description: thyroid hormone receptor interactor 13 [Mus
  misc_feature (8)..(414): Homolog of NCBI NO: 12845703 NR Description: unnamed protein product [Mus musculus]
  misc_feature (13)..(441): Homolog of NCBI NO: 34784059 NR Description: Unknown (protein for MGC:65952) [Danio rerio]
  misc_feature (8)..(419): Homolog of NCBI NO: 38969923 NR Description: Unknown (protein for MGC:76197) [Silurana
  misc_feature (398)..(444): Homolog of NCBI NO: 7485976 NR Description: hypothetical protein F22K18.90 - Arabidopsis
  misc_feature (22)..(97): Homolog of NCBI NO: 7485976 NR Description: hypothetical protein F22K18.90 - Arabidopsis
  misc_feature (122)..(358): Homolog of NCBI NO: 7485976 NR Description: hypothetical protein F22K18.90 - Arabidopsis
  misc_feature (22)..(441): Homolog of NCBI NO: 38605777 NR Description: OSJNBa0044K18.20 [Oryza sativa (japonica
  misc_feature (22)..(444): Homolog of NCBI NO: 30686626 NR Description: protein -related binding protein [Arabidopsis
METELSTDQNGASSQHSLSVPEDKVLVPVEVTLKLSSTAKIDDVRSAVEGMLEKRSLSYNDGPIPVPLDDAFLADNVQRICVCGCDTDEGMHNDNVLLFWQVKPVVHVFQLSEEGPCEDISSDGQSSSFNEWILPAKEFDGMWESLIYESGLKQRLLRYAASALLFTEKGVDPFLVSWNRIILLHGPPGTGKTSLCKALAQKLSIRFNSRYPQAQLVEVNAHSLFSKWFSESGKLVAKLFQKIQEMVEEESNLVFVLIDEVESLAAARKAALSGSEPSDSIRVVNALLTQMDKLKSSPNVIILTTSNITAAIDIAFVDRADIKAYVGPPTLQARYEILRSCLQEMMRTGILTSLQDCKNAMLPHYASAKDRLNTLDFHEDATFMQLCKQLLETAEACEGMSGRSLRKLPFLAHAALANPFECNPIKFLCTMVETAKRERSELPD

SEQ ID NO: 51377 - protein, 394 aa, Glycine max
  peptide (1)..(394): Ceres Seq. ID no. 15177339
  misc_feature (131)..(295): Pfam Name: ATPase family associated with various cellular Pfam Description: ATPase family associated with various cellular
  misc_feature (1)..(364): Homolog of NCBI NO: 11321607 NR Description: thyroid hormone receptor interactor 13
  misc_feature (1)..(364): Homolog of NCBI NO: 20908701 NR Description: thyroid hormone receptor interactor 13 [Mus
  misc_feature (1)..(364): Homolog of NCBI NO: 12845703 NR Description: unnamed protein product [Mus musculus]
  misc_feature (1)..(391): Homolog of NCBI NO: 34784059 NR Description: Unknown (protein for MGC:65952) [Danio rerio]
  misc_feature (1)..(369): Homolog of NCBI NO: 38969923 NR Description: Unknown (protein for MGC:76197) [Silurana
  misc_feature (348)..(394): Homolog of NCBI NO: 7485976 NR Description: hypothetical protein F22K18.90 - Arabidopsis
  misc_feature (1)..(47): Homolog of NCBI NO: 7485976 NR Description: hypothetical protein F22K18.90 - Arabidopsis
  misc_feature (72)..(308): Homolog of NCBI NO: 7485976 NR Description: hypothetical protein F22K18.90 - Arabidopsis
  misc_feature (1)..(391): Homolog of NCBI NO: 38605777 NR Description: OSJNBa0044K18.20 [Oryza sativa (japonica
  misc_feature (1)..(394): Homolog of NCBI NO: 30686626 NR Description: protein -related binding protein [Arabidopsis
MLEKRSLSYNDGPIPVPLDDAFLADNVQRICVCGCDTDEGMHNDNVLLFWQVKPVVHVFQLSEEGPCEDISSDGQSSSFNEWILPAKEFDGMWESLIYESGLKQRLLRYAASALLFTEKGVDPFLVSWNRIILLHGPPGTGKTSLCKALAQKLSIRFNSRYPQAQLVEVNAHSLFSKWFSESGKLVAKLFQKIQEMVEEESNLVFVLIDEVESLAAARKAALSGSEPSDSIRVVNALLTQMDKLKSSPNVIILTTSNITAAIDIAFVDRADIKAYVGPPTLQARYEILRSCLQEMMRTGILTSLQDCKNAMLPHYASAKDRLNTLDFHEDATFMQLCKQLLETAEACEGMSGRSLRKLPFLAHAALANPFECNPIKFLCTMVETAKRERSELPD

SEQ ID NO: 51378 - DNA, 1300 bp, Glycine max
  misc_feature (1)..(1300): Ceres Seq. ID no. 15171279
ataggagttgtgttaagatttggcataatacattgatttgtttcttaaaaacaacactgcaatgtctgccatatttctgcttgttggaatgctatcgtccattacagttgcacaatccataggagtttgctatggagtgattggtgataatctaccatcaaggcaagaagttgtggacttatataaaacaaatggcattggtagaatgcgtatatactacccagatgaagaagcactccaagcccttagaggttcaggcattgagttgattatggacgtggctaaggaaacccttcaatcattgacagactccaatgctgctacagattgggtcaataaatatgttacaccttactcgcaagacgtcaatttcaagtacatcgctgttggaaatgaaattcatcccaataccaatgaggcacaatatattctatctgccatgaccaacattcagaatgcaatttcatcagcaaatttacaaattaaggtgtcaacagctatagactctactttgattactaactcttaccctcccaatgatggcgttttcactagcgatgcggagccatacataaaacccataatcaacttcctagtgagcaatggggccccacttcttgccaacgtgtacccttactttgcttatgcaaatgatcaaagcattcctcttgcctatgctctttttacccaacaaggaaacaacgacgttgggtaccaaaacctctttgatgctatgttggattcaatatatgctgctttggagaaagtgggagcgtccaatttgcagatagtggtttctgagagtgggtggccatctgaaggtggagctggagcctcaattgataatgcaggcacttactatgctaatttgattcgtcatgcctcgagtgggaatggaactccaaagaggcctggtgagtctatagagacttacttgttcgccatgtttgacgaaaaccagaagcaaggtgctgatactgagcgtcattttggtctcttcaatcctgataaatcacctaaataccaacttagtttcaactaattgaaactaacagaaatatatatatatatatatatgctcctatatctatttactttgaataagtgtgtcaagtatatatgcacatctgtaaaacgcttatttatgccctaaatgacaaatatataagaagtgtcataatttagtttgtgatatttttttttacttactttgtttaaataaatacaaaccaaatttctgttggatgattgttatcataaggagaaaagaataagaatcactgtttaatatcattagtac

SEQ ID NO: 51379 - protein, 326 aa, Glycine max
  peptide (1)..(326): Ceres Seq. ID no. 15171280
  misc_feature (67)..(302): Pfam Name: Glycosyl hydrolases family 17 Pfam Description: Glycosyl hydrolases family 17
MSAIFLLVGMLSSITVAQSIGVCYGVIGDNLPSRQEVVDLYKTNGIGRMRIYYPDEEALQALRGSGIELIMDVAKETLQSLTDSNAATDWVNKYVTPYSQDVNFKYIAVGNEIHPNTNEAQYILSAMTNIQNAISSANLQIKVSTAIDSTLITNSYPPNDGVFTSDAEPYIKPIINFLVSNGAPLLANVYPYFAYANDQSIPLAYALFTQQGNNDVGYQNLFDAMLDSIYAALEKVGASNLQIVVSESGWPSEGGAGASIDNAGTYYANLIRHASSGNGTPKRPGESIETYLFAMFDENQKQGADTERHFGLFNPDKSPKYQLSFN

SEQ ID NO: 51380 - protein, 317 aa, Glycine max
  peptide (1)..(317): Ceres Seq. ID no. 15171281
  misc_feature (58)..(293): Pfam Name: Glycosyl hydrolases family 17 Pfam Description: Glycosyl hydrolases family 17
MLSSITVAQSIGVCYGVIGDNLPSRQEVVDLYKTNGIGRMRIYYPDEEALQALRGSGIELIMDVAKETLQSLTDSNAATDWVNKYVTPYSQDVNFKYIAVGNEIHPNTNEAQYILSAMTNIQNAISSANLQIKVSTAIDSTLITNSYPPNDGVFTSDAEPYIKPIINFLVSNGAPLLANVYPYFAYANDQSIPLAYALFTQQGNNDVGYQNLFDAMLDSIYAALEKVGASNLQIVVSESGWPSEGGAGASIDNAGTYYANLIRHASSGNGTPKRPGESIETYLFAMFDENQKQGADTERHFGLFNPDKSPKYQLSFN

SEQ ID NO: 51381 - protein, 278 aa, Glycine max
  peptide (1)..(278): Ceres Seq. ID no. 15171282
  misc_feature (19)..(254): Pfam Name: Glycosyl hydrolases family 17 Pfam Description: Glycosyl hydrolases family 17
MRIYYPDEEALQALRGSGIELIMDVAKETLQSLTDSNAATDWVNKYVTPYSQDVNFKYIAVGNEIHPNTNEAQYILSAMTNIQNAISSANLQIKVSTAIDSTLITNSYPPNDGVFTSDAEPYIKPIINFLVSNGAPLLANVYPYFAYANDQSIPLAYALFTQQGNNDVGYQNLFDAMLDSIYAALEKVGASNLQIVVSESGWPSEGGAGASIDNAGTYYANLIRHASSGNGTPKRPGESIETYLFAMFDENQKQGADTERHFGLFNPDKSPKYQLSFN

SEQ ID NO: 51382 - DNA, 1814 bp, Glycine max
  misc_feature (1)..(1814): Ceres Seq. ID no. 13594536
atcagggcgagaagaagagagtgagtgaagaagcattatttccacttgacttgggtgtctccgcctttctcttctcaaatcaaatcaatgagcatggcttctctccccaattcccccgctctttcattctcctcatctctctccaccaccgccaatctcctcccatgtcgccgcttcaccgcattcccccgccgccgcgcctcttcattctccgtgcaagctaagatccgcgaaatcttcatgcccgcactcagctccaccatgaccgagggcaaaatcgtctcctggatcaaatccgagggcgacatgctctccaagggcgacagcgttgtcgtcgtcgaatccgacaaggccgacatggacgtcgagaccttctacgatggcatcctcgctgccatcgtcgtcgccgacggcgaaactgcccccgtcggagcccccatcggtttgctcgccgattctcccgaagaagtcgccgaagccaaagccaaagccgccaaatccgttccctctggctctcccgcccccgcctctccctccgacccttctccggcgactcctccgccacctcctccgccggccaagtctgtttcagaaggtccggcgaagatcgtggccacgcctcaggctaagaagctcgcaaagcagcacaaggtcgacattgcaacggtcgccgggaccggtccgttcggtaggattactccggcggacgtggaggccgccgccggaatcgcgccgtcaaagagaaatgtggctccggcggcgattcctgctccggcgactccagctcctccatcgaaagctgcttctggttctgctgcaccggctccgattccgggttctagtgttgttcccttcactactatgcaatctgcggtggcgaagaacatgatggagagtctatctgtgcctacgttcagggtggggtaccctgtgactactgatgcgttggatgccctgtatgagaaggtgaaaccaaagggtgtgacaatgacggctattttggctaaggctgctgcaatggcacttgttcagcacccggttgtcaatgccacctgcaaagacggcaagaatttcgtgtataacggtaacatcaatgttgctgttgctgtggcaattaatggtggtttgatcacccctgttcttcaggatgcggataagttggacttgtatctattgtcccaaaaatggaaggagctagtggaaaaagctcgtgcaaagcagttgcaacctcatgagtataattcaggaactttcacgctttccaatttgggtatgtttggagttgacaggtttgatgccatacttccaccaggccagggtgctatcatggctgttggcgcatcaaagcctactgttctggctgataaagatggattcttcagcgtgaagaataaaatgctggtgaatgtaacagctgatcatcgaattatttatggggctgacttggccgctttcctccagacattctcgaaaatcattgaaaacccagaaagcctgacattgtagtcattctgtacttccaacataaaattatctccaccactggatcacgactcgataatgtttgtttagaagctatttgactcaatgccgaacattttgtgatttttttccctcaactttcattgttttatcttttaggagctatcctgaggaccaatgatagattttttgacagggagaaacagctttaaaattgtttacagtgagggatgttctaaacggcaattattttgagaatctacatgtaagcaataagcggttttaacttttaaatgttggatttttcagtaaaaaattactttttactcctt

SEQ ID NO: 51383 - protein, 472 aa, Glycine max
  peptide (1)..(472): Ceres Seq. ID no. 15221381
  misc_feature (248)..(472): Pfam Name: 2-oxoacid dehydrogenases acyltransferase Pfam Description: 2-oxoacid dehydrogenases acyltransferase
  misc_feature (47)..(472): Homolog of NCBI NO: 17231098 NR Description: dihydrolipoamide S-acetyltransferase [Nostoc sp.
  misc_feature (47)..(472): Homolog of NCBI NO: 23123757 NR Description: hypothetical protein [Nostoc punctiforme]
  misc_feature (47)..(472): Homolog of NCBI NO: 16331208 NR Description: dihydrolipoamide acetyltransferase component (E2)
  misc_feature (47)..(472): Homolog of NCBI NO: 22298842 NR Description: dihydrolipoamide S-acetyltransferase
  misc_feature (3)..(471): Homolog of NCBI NO: 25286434 NR Description: protein F12K21.24 [imported] - Arabidopsis
  misc_feature (3)..(471): Homolog of NCBI NO: 15218630 NR Description: dihydrolipoamide S-acetyltransferase -related
  misc_feature (3)..(471): Homolog of NCBI NO: 21536525 NR Description: dihydrolipoamide S-acetyltransferase, putative
  misc_feature (104)..(472): Homolog of NCBI NO: 21954074 NR Description: putative dihydrolipoamide S-acetyltransferase
  misc_feature (42)..(472): Homolog of NCBI NO: 9279589 NR Description: dihydrolipoamide S-acetyltransferase [Arabidopsis
  misc_feature (1)..(472): Homolog of NCBI NO: 15230922 NR Description: dihydrolipoamide S-acetyltransferase [Arabidopsis
MSMASLPNSPALSFSSSLSTTANLLPCRRFTAFPRRRASSFSVQAKIREIFMPALSSTMTEGKIVSWIKSEGDMLSKGDSVVVVESDKADMDVETFYDGILAAIVVADGETAPVGAPIGLLADSPEEVAEAKAKAAKSVPSGSPAPASPSDPSPATPPPPPPPAKSVSEGPAKIVATPQAKKLAKQHKVDIATVAGTGPFGRITPADVEAAAGIAPSKRNVAPAAIPAPATPAPPSKAASGSAAPAPIPGSSVVPFTTMQSAVAKNMMESLSVPTFRVGYPVTTDALDALYEKVKPKGVTMTAILAKAAAMALVQHPVVNATCKDGKNFVYNGNINVAVAVAINGGLITPVLQDADKLDLYLLSQKWKELVEKARAKQLQPHEYNSGTFTLSNLGMFGVDRFDAILPPGQGAIMAVGASKPTVLADKDGFFSVKNKMLVNVTADHRIIYGADLAAFLQTFSKIIENPESLTL

SEQ ID NO: 51384 - protein, 470 aa, Glycine max
  peptide (1)..(470): Ceres Seq. ID no. 15221382
  misc_feature (246)..(470): Pfam Name: 2-oxoacid dehydrogenases acyltransferase Pfam Description: 2-oxoacid dehydrogenases acyltransferase
  misc_feature (45)..(470): Homolog of NCBI NO: 17231098 NR Description: dihydrolipoamide S-acetyltransferase [Nostoc sp.
  misc_feature (45)..(470): Homolog of NCBI NO: 23123757 NR Description: hypothetical protein [Nostoc punctiforme]
  misc_feature (45)..(470): Homolog of NCBI NO: 16331208 NR Description: dihydrolipoamide acetyltransferase component (E2)
  misc_feature (45)..(470): Homolog of NCBI NO: 22298842 NR Description: dihydrolipoamide S-acetyltransferase
  misc_feature (1)..(469): Homolog of NCBI NO: 25286434 NR Description: protein F12K21.24 [imported] - Arabidopsis
  misc_feature (1)..(469): Homolog of NCBI NO: 15218630 NR Description: dihydrolipoamide S-acetyltransferase -related
  misc_feature (1)..(469): Homolog of NCBI NO: 21536525 NR Description: dihydrolipoamide S-acetyltransferase, putative
  misc_feature (102)..(470): Homolog of NCBI NO: 21954074 NR Description: putative dihydrolipoamide S-acetyltransferase
  misc_feature (40)..(470): Homolog of NCBI NO: 9279589 NR Description: dihydrolipoamide S-acetyltransferase [Arabidopsis
  misc_feature (1)..(470): Homolog of NCBI NO: 15230922 NR Description: dihydrolipoamide S-acetyltransferase [Arabidopsis
MASLPNSPALSFSSSLSTTANLLPCRRFTAFPRRRASSFSVQAKIREIFMPALSSTMTEGKIVSWIKSEGDMLSKGDSVVVVESDKADMDVETFYDGILAAIVVADGETAPVGAPIGLLADSPEEVAEAKAKAAKSVPSGSPAPASPSDPSPATPPPPPPPAKSVSEGPAKIVATPQAKKLAKQHKVDIATVAGTGPFGRITPADVEAAAGIAPSKRNVAPAAIPAPATPAPPSKAASGSAAPAPIPGSSVVPFTTMQSAVAKNMMESLSVPTFRVGYPVTTDALDALYEKVKPKGVTMTAILAKAAAMALVQHPVVNATCKDGKNFVYNGNINVAVAVAINGGLITPVLQDADKLDLYLLSQKWKELVEKARAKQLQPHEYNSGTFTLSNLGMFGVDRFDAILPPGQGAIMAVGASKPTVLADKDGFFSVKNKMLVNVTADHRIIYGADLAAFLQTFSKIIENPESLTL

SEQ ID NO: 51385 - protein, 421 aa, Glycine max
  peptide (1)..(421): Ceres Seq. ID no. 15221383
  misc_feature (197)..(421): Pfam Name: 2-oxoacid dehydrogenases acyltransferase Pfam Description: 2-oxoacid dehydrogenases acyltransferase
  misc_feature (1)..(421): Homolog of NCBI NO: 17231098 NR Description: dihydrolipoamide S-acetyltransferase [Nostoc sp.
  misc_feature (1)..(421): Homolog of NCBI NO: 23123757 NR Description: hypothetical protein [Nostoc punctiforme]
  misc_feature (1)..(421): Homolog of NCBI NO: 16331208 NR Description: dihydrolipoamide acetyltransferase component (E2)
  misc_feature (1)..(421): Homolog of NCBI NO: 22298842 NR Description: dihydrolipoamide S-acetyltransferase
  misc_feature (1)..(420): Homolog of NCBI NO: 25286434 NR Description: protein F12K21.24 [imported] - Arabidopsis
  misc_feature (1)..(420): Homolog of NCBI NO: 15218630 NR Description: dihydrolipoamide S-acetyltransferase -related
  misc_feature (1)..(420): Homolog of NCBI NO: 21536525 NR Description: dihydrolipoamide S-acetyltransferase, putative
  misc_feature (53)..(421): Homolog of NCBI NO: 21954074 NR Description: putative dihydrolipoamide S-acetyltransferase
  misc_feature (1)..(421): Homolog of NCBI NO: 9279589 NR Description: dihydrolipoamide S-acetyltransferase [Arabidopsis
  misc_feature (1)..(421): Homolog of NCBI NO: 15230922 NR Description: dihydrolipoamide S-acetyltransferase [Arabidopsis
MPALSSTMTEGKIVSWIKSEGDMLSKGDSVVVVESDKADMDVETFYDGILAAIVVADGETAPVGAPIGLLADSPEEVAEAKAKAAKSVPSGSPAPASPSDPSPATPPPPPPPAKSVSEGPAKIVATPQAKKLAKQHKVDIATVAGTGPFGRITPADVEAAAGIAPSKRNVAPAAIPAPATPAPPSKAASGSAAPAPIPGSSVVPFTTMQSAVAKNMMESLSVPTFRVGYPVTTDALDALYEKVKPKGVTMTAILAKAAAMALVQHPVVNATCKDGKNFVYNGNINVAVAVAINGGLITPVLQDADKLDLYLLSQKWKELVEKARAKQLQPHEYNSGTFTLSNLGMFGVDRFDAILPPGQGAIMAVGASKPTVLADKDGFFSVKNKMLVNVTADHRIIYGADLAAFLQTFSKIIENPESLTL

SEQ ID NO: 51386 - DNA, 1790 bp, Glycine max
  misc_feature (1)..(1790): Ceres Seq. ID no. 15177258
actctgcttcctctctccaaagcctgaaagaaaaaaaaaatcatctttctctttctcatattttctctgtgtgtgaatttgttgttctttcacaatggaacaacctccttcctcgtctcttcaggtggagacagcacaacaaccgggacctagtcctctccgaaaaatgttcgctgtctcgtcaatcgccgcgggaattcaattcgggtgggccctacagctctctcttctgacaccgtacgtccagaccctcggcgtccctcacgcatgggcgtcgttcatttggctctgcggcccaatctctgggctgcttgtgcagcccattgtagggtacagcagcgatcgatgcagatcccgcttcggtcgccgccgtcccttcatcttcgtcggagccatcgccgtcgcaattgctgtgttcctcatcggttatgcagccgatataggacacgcggcgggcgatgacctcacgaagaagacccgtccacgcgcggtggtggtctttgtggtcggcttctggatcctggacgtggccaacaacatgctccagggtccatgccgcgccttcctcggtgacctcgccgccggggaccaccgcaagacgaggaccgccaacgccttcttctcgttcttcatggccatcggaaacgtcctcggctacgcagccggctcctacgacaaactccaccgcgccttcaaattcacacaaaccgaagcgtgtgacgtgttctgtgcaaacctcaagagctgcttcttcttctcaattgtcctcctcctggttctttgtttcgttgtgctcatttgcgtcgacgacccacaattcacgccacgtggcgatgacaacaatggcgaaaacgacggcgtttcggggtcgtgctttggtgaactctgggctgcgtttaaaggtctaaagaggccaatgtggttgttgatggtagtgaccgctataaactgggtggcgtggtttccgtacatgctgttcgatactgattggatggggcgtgaggtgtacggtggtaaggtgggggagaaagcatacgattcgggagtgcataagggggcgttggggcttatgctgaactctgtcgttttggcattgatgtcgttgacggtggaaccgttgggtcgtttcgttgggggagttaagtggctatggggaatcgttaacgtaattctcgccgtttgcatggcaatgacggtggttatcacaagggctgcagaacatgaacggaaaaacggcgtttctgctgttgggcatccctcagttggtgtgcaagtggctgcattgactttcttctccgcccttggtgttcctcttgctattactttcagcgtcccctttgcactggcatctatatactcctccacttcaggagcaggccaaggtttatccttgggcgtcctcaatgttgcaattgtcgtgccacagatgatagtatcggctataagtggacagtgggataagtggtttggtggtggcaacttgccggcgtttgtgttgggtgccgtggcggccgccgtgagtgccgtgttagcggttgttctgctgccaacaccaaagccagcagatgtggccaaggttacttccgtcactgctgggagtttccattagtatatattatagagttttacatgcatgggacaatattagatggagacttttaatttaaatttggtgagtgtgtatcatttaggtattagacccatcaaataactctttagggtgggcttaagttttatccttgttttgtctaataaatatatgtacaacaacattaaaaaattaaaaatcc

SEQ ID NO: 51387 - protein, 504 aa, Glycine max
  peptide (1)..(504): Ceres Seq. ID no. 15177259
  misc_feature (25)..(461): Pfam Name: Sugar (and other) transporter Pfam Description: Sugar (and other) transporter
  misc_feature (7)..(504): Homolog of NCBI NO: 7488866 NR Description: sucrose transport protein - fava bean
MEQPPSSSLQVETAQQPGPSPLRKMFAVSSIAAGIQFGWALQLSLLTPYVQTLGVPHAWASFIWLCGPISGLLVQPIVGYSSDRCRSRFGRRRPFIFVGAIAVAIAVFLIGYAADIGHAAGDDLTKKTRPRAVVVFVVGFWILDVANNMLQGPCRAFLGDLAAGDHRKTRTANAFFSFFMAIGNVLGYAAGSYDKLHRAFKFTQTEACDVFCANLKSCFFFSIVLLLVLCFVVLICVDDPQFTPRGDDNNGENDGVSGSCFGELWAAFKGLKRPMWLLMVVTAINWVAWFPYMLFDTDWMGREVYGGKVGEKAYDSGVHKGALGLMLNSVVLALMSLTVEPLGRFVGGVKWLWGIVNVILAVCMAMTVVITRAAEHERKNGVSAVGHPSVGVQVAALTFFSALGVPLAITFSVPFALASIYSSTSGAGQGLSLGVLNVAIVVPQMIVSAISGQWDKWFGGGNLPAFVLGAVAAAVSAVLAVVLLPTPKPADVAKVTSVTAGSFH

SEQ ID NO: 51388 - protein, 480 aa, Glycine max
  peptide (1)..(480): Ceres Seq. ID no. 15177260
  misc_feature (1)..(437): Pfam Name: Sugar (and other) transporter Pfam Description: Sugar (and other) transporter
  misc_feature (1)..(480): Homolog of NCBI NO: 7488866 NR Description: sucrose transport protein - fava bean
MFAVSSIAAGIQFGWALQLSLLTPYVQTLGVPHAWASFIWLCGPISGLLVQPIVGYSSDRCRSRFGRRRPFIFVGAIAVAIAVFLIGYAADIGHAAGDDLTKKTRPRAVVVFVVGFWILDVANNMLQGPCRAFLGDLAAGDHRKTRTANAFFSFFMAIGNVLGYAAGSYDKLHRAFKFTQTEACDVFCANLKSCFFFSIVLLLVLCFVVLICVDDPQFTPRGDDNNGENDGVSGSCFGELWAAFKGLKRPMWLLMVVTAINWVAWFPYMLFDTDWMGREVYGGKVGEKAYDSGVHKGALGLMLNSVVLALMSLTVEPLGRFVGGVKWLWGIVNVILAVCMAMTVVITRAAEHERKNGVSAVGHPSVGVQVAALTFFSALGVPLAITFSVPFALASIYSSTSGAGQGLSLGVLNVAIVVPQMIVSAISGQWDKWFGGGNLPAFVLGAVAAAVSAVLAVVLLPTPKPADVAKVTSVTAGSFH

SEQ ID NO: 51389 - protein, 356 aa, Glycine max
  peptide (1)..(356): Ceres Seq. ID no. 15177261
  misc_feature (1)..(313): Pfam Name: Sugar (and other) transporter Pfam Description: Sugar (and other) transporter
  misc_feature (1)..(356): Homolog of NCBI NO: 7488866 NR Description: sucrose transport protein - fava bean
MLQGPCRAFLGDLAAGDHRKTRTANAFFSFFMAIGNVLGYAAGSYDKLHRAFKFTQTEACDVFCANLKSCFFFSIVLLLVLCFVVLICVDDPQFTPRGDDNNGENDGVSGSCFGELWAAFKGLKRPMWLLMVVTAINWVAWFPYMLFDTDWMGREVYGGKVGEKAYDSGVHKGALGLMLNSVVLALMSLTVEPLGRFVGGVKWLWGIVNVILAVCMAMTVVITRAAEHERKNGVSAVGHPSVGVQVAALTFFSALGVPLAITFSVPFALASIYSSTSGAGQGLSLGVLNVAIVVPQMIVSAISGQWDKWFGGGNLPAFVLGAVAAAVSAVLAVVLLPTPKPADVAKVTSVTAGSFH

SEQ ID NO: 51390 - DNA, 1322 bp, Glycine max
  misc_feature (1)..(1322): Ceres Seq. ID no. 14311477
aactcacacacccttctcttctctctttcaattccttcccagctcttcattgaagaagctatggactttctaaacttcttgcttaacttgttggtccctccaggcagtatgatcaccttggctttctcatggcctgcactttgcttcctcaatttttgtgagtggctttataatagtatatatggtgaggatatggataataaagtggtcataatcaccggcgcatcttcaggcattggagagcaaattgcatatgagtatgctttgaggagagcaaatttaacgttggtggcccgcagagagcacaggctaagagggatcgctgagaatgcaaagagattgggtgcaagacatgtgatgattatggcagcagatgttgtgaaggaagatgattgtaggagatttgttaacgaaaccataaatgtctttggccgtgtagatcatcttgtaaatacagtgagtttgggacatacattctgctttgaagaagctacagacacatcagttttccctgttctcctggatattaatttttgggggaatgtttatccaacatttgtggctcttccttaccttcatcaaagcaatggtcgtattattatcaatgcatcagttgaaagttggttgcctatgccaaggatgagtttatatgctgctgcaaaggcagcattagtgaacttttatgagacactgagatttgagttgaaagatgaggttggaataacaatagccacacatggttggattggaagcgaaatgacgaggggcaagttcatgctggaggagggtgctgagatgcaatggaaggaagaaagagaagtgcaggtgacgggtggaccagtagaggagttcgcaaggttgatagtatcaggggcatgtagaggagatgcatatgtgaagtttcctagctggtatgatgtattcctactatacagggtgtttgctccaagagttcttaactgggcattcaggcttcttatttcgccacaagggacaagaagagcttcttcttatgtagggactggcaaacacatcgaagctgtgggtatggtgagacctatggctatgctggagggaacctcacctacacacaatgccattggtcctcttaccttctctggccagctgatcagccagcacaagctcgattaattccaacatcatatcctccagaaaattatgaagccatctactttttctatacatatatatgcttttatcatttattgcattcttgctatcaccatgcttcgtgaaactatgtcatgttgttggactttgttgtcaaaaatgaaaataaacttgtcttgattgccaaatcc

SEQ ID NO: 51391 - protein, 383 aa, Glycine max
  peptide (1)..(383): Ceres Seq. ID no. 14311478
  misc_feature (21)..(326): Homolog of NCBI NO: 15232779 NR Description: short-chain dehydrogenase/reductase family
  misc_feature (21)..(321): Homolog of NCBI NO: 15232777 NR Description: short-chain dehydrogenase/reductase family
  misc_feature (21)..(319): Homolog of NCBI NO: 15241203 NR Description: short-chain dehydrogenase/reductase family
  misc_feature (21)..(319): Homolog of NCBI NO: 8777392 NR Description: 11-beta-hydroxysteroid dehydrogenase-like
  misc_feature (21)..(327): Homolog of NCBI NO: 15241261 NR Description: short-chain dehydrogenase/reductase family
  misc_feature (20)..(361): Homolog of NCBI NO: 21742781 NR Description: OSJNBa0055C08.3 [Oryza sativa (japonica
  misc_feature (21)..(329): Homolog of NCBI NO: 15824408 NR Description: steroleosin [Sesamum indicum]
  misc_feature (21)..(326): Homolog of NCBI NO: 18423187 NR Description: short-chain dehydrogenase/reductase family
  misc_feature (21)..(369): Homolog of NCBI NO: 15234888 NR Description: short-chain dehydrogenase/reductase family
  misc_feature (21)..(373): Homolog of NCBI NO: 21311775 NR Description: steroleosin-B [Sesamum indicum]
NSHTLLFSLSIPSQLFIEEAMDFLNFLLNLLVPPGSMITLAFSWPALCFLNFCEWLYNSIYGEDMDNKVVIITGASSGIGEQIAYEYALRRANLTLVARREHRLRGIAENAKRLGARHVMIMAADVVKEDDCRRFVNETINVFGRVDHLVNTVSLGHTFCFEEATDTSVFPVLLDINFWGNVYPTFVALPYLHQSNGRIIINASVESWLPMPRMSLYAAAKAALVNFYETLRFELKDEVGITIATHGWIGSEMTRGKFMLEEGAEMQWKEEREVQVTGGPVEEFARLIVSGACRGDAYVKFPSWYDVFLLYRVFAPRVLNWAFRLLISPQGTRRASSYVGTGKHIEAVGMVRPMAMLEGTSPTHNAIGPLTFSGQLISQHKLD

SEQ ID NO: 51392 - protein, 363 aa, Glycine max
  peptide (1)..(363): Ceres Seq. ID no. 14311479
  misc_feature (1)..(306): Homolog of NCBI NO: 15232779 NR Description: short-chain dehydrogenase/reductase family
  misc_feature (1)..(301): Homolog of NCBI NO: 15232777 NR Description: short-chain dehydrogenase/reductase family
  misc_feature (1)..(299): Homolog of NCBI NO: 15241203 NR Description: short-chain dehydrogenase/reductase family
  misc_feature (1)..(299): Homolog of NCBI NO: 8777392 NR Description: 11-beta-hydroxysteroid dehydrogenase-like
  misc_feature (1)..(307): Homolog of NCBI NO: 15241261 NR Description: short-chain dehydrogenase/reductase family
  misc_feature (1)..(341): Homolog of NCBI NO: 21742781 NR Description: OSJNBa0055C08.3 [Oryza sativa (japonica
  misc_feature (1)..(309): Homolog of NCBI NO: 15824408 NR Description: steroleosin [Sesamum indicum]
  misc_feature (1)..(306): Homolog of NCBI NO: 18423187 NR Description: short-chain dehydrogenase/reductase family
  misc_feature (1)..(349): Homolog of NCBI NO: 15234888 NR Description: short-chain dehydrogenase/reductase family
  misc_feature (1)..(353): Homolog of NCBI NO: 21311775 NR Description: steroleosin-B [Sesamum indicum]
MDFLNFLLNLLVPPGSMITLAFSWPALCFLNFCEWLYNSIYGEDMDNKVVIITGASSGIGEQIAYEYALRRANLTLVARREHRLRGIAENAKRLGARHVMIMAADVVKEDDCRRFVNETINVFGRVDHLVNTVSLGHTFCFEEATDTSVFPVLLDINFWGNVYPTFVALPYLHQSNGRIIINASVESWLPMPRMSLYAAAKAALVNFYETLRFELKDEVGITIATHGWIGSEMTRGKFMLEEGAEMQWKEEREVQVTGGPVEEFARLIVSGACRGDAYVKFPSWYDVFLLYRVFAPRVLNWAFRLLISPQGTRRASSYVGTGKHIEAVGMVRPMAMLEGTSPTHNAIGPLTFSGQLISQHKLD

SEQ ID NO: 51393 - protein, 347 aa, Glycine max
  peptide (1)..(347): Ceres Seq. ID no. 14311480
  misc_feature (1)..(290): Homolog of NCBI NO: 15232779 NR Description: short-chain dehydrogenase/reductase family
  misc_feature (1)..(285): Homolog of NCBI NO: 15232777 NR Description: short-chain dehydrogenase/reductase family
  misc_feature (1)..(283): Homolog of NCBI NO: 15241203 NR Description: short-chain dehydrogenase/reductase family
  misc_feature (1)..(283): Homolog of NCBI NO: 8777392 NR Description: 11-beta-hydroxysteroid dehydrogenase-like
  misc_feature (1)..(291): Homolog of NCBI NO: 15241261 NR Description: short-chain dehydrogenase/reductase family
  misc_feature (1)..(325): Homolog of NCBI NO: 21742781 NR Description: OSJNBa0055C08.3 [Oryza sativa (japonica
  misc_feature (1)..(293): Homolog of NCBI NO: 15824408 NR Description: steroleosin [Sesamum indicum]
  misc_feature (1)..(290): Homolog of NCBI NO: 18423187 NR Description: short-chain dehydrogenase/reductase family
  misc_feature (1)..(333): Homolog of NCBI NO: 15234888 NR Description: short-chain dehydrogenase/reductase family
  misc_feature (1)..(337): Homolog of NCBI NO: 21311775 NR Description: steroleosin-B [Sesamum indicum]
MITLAFSWPALCFLNFCEWLYNSIYGEDMDNKVVIITGASSGIGEQIAYEYALRRANLTLVARREHRLRGIAENAKRLGARHVMIMAADVVKEDDCRRFVNETINVFGRVDHLVNTVSLGHTFCFEEATDTSVFPVLLDINFWGNVYPTFVALPYLHQSNGRIIINASVESWLPMPRMSLYAAAKAALVNFYETLRFELKDEVGITIATHGWIGSEMTRGKFMLEEGAEMQWKEEREVQVTGGPVEEFARLIVSGACRGDAYVKFPSWYDVFLLYRVFAPRVLNWAFRLLISPQGTRRASSYVGTGKHIEAVGMVRPMAMLEGTSPTHNAIGPLTFSGQLISQHKLD

SEQ ID NO: 51394 - DNA, 1637 bp, Glycine max
  misc_feature (1)..(1637): Ceres Seq. ID no. 14311459
ggctttccttccttcctttgtcaggcatccatgttgtgaagagcagaggatggataacataccagagcacatagtatgggagatattgagtaggataaagaaaacaagtgatagaaatgctgtttctcttgtttgtaaacggctttattatttggacaatgcagaaaggaattgtataagggttgggtgtggaatggatcctgcagatgaagctttgagctgtctatgcataaggtttgagaacttgtccaaagtggagattacatactctggatggatgtccaaattgggaaaacaattggatgacaagggccttctcattcttgcgaatcactgccctctactctgtgatctctccttgagctactgcacattcatcactgatgttggtctccgttacttggcttcttcttccaagctctcatctttaaggttgaatttcacaccaaggatcactggctgtggcattctgtctcttgttgtgggctgcaagaacctctccagccttcaccttatcagatgccttaatgtcagcagtgtggagtggcttgaatatcttggcaagctcggaacgcttgaggatctctccatcaacaattgcagggccattggtgaaggggacttgattaagcttggccctggttggcagaaactcacaaggttgcagtttgaagtggatgctaattaccgatacatgaaggtttatgaccggttgtctgtggataggtggcaaaagcagtatgtcccttgtgggaacatgcttgaacttagcctggtcaattgcatcatcagtcccgggagagggcttgcttgcgtgttgagtaagtgcaagaacttgcagaaaattcacctagacatgtgtgttggggtgagggactttgacattatttgtttgtcccaaagatcaagtgaacttaaatcggtttcacttagagttccatccgatttttcactcccctccttggtgaataatccgttgagattgacggatgagagtctcaaggccttggctcaaaactgctccaaacttgaatcagtgaggatatctttttctgatggggagttcccttcatcctcctcattcacattaagtggaatactttgtttgattcaaaggtgcctggttcgacagcttgctcttgatcatgtttattccttcaatgatgttggaatggaagctctttgctccgctgagtatcttgaatcacttgaacttgtgaaatgccaagagattagcgatgaagggctacagcttgtgagtcagtttcccagattgtgcattttacggttaagcaagtgtttggggatctctgatgatggattaaagccgcttgttggatcattgaagttagatttcttggccattgaagattgtcctcaaatttctgaaagaggtgtccaaggagctgcaaagtctgtgtctttcaggcaagacttatcttggatgtactgaacctgttgggttttagggacatgaagtccgttgtttttttttatggccatcttcaatgcttctatatatctatagtgtatcacacacacgtaagattattctgttgtattttttatttttatgtcaaattctgttcttgtatttgttttgtaaatcttttaataaaataaatggcttctctggc

SEQ ID NO: 51395 - protein, 483 aa, Glycine max
  peptide (1)..(483): Ceres Seq. ID no. 14311460
  misc_feature (17)..(62): Pfam Name: F-box domain Pfam Description: F-box domain
  misc_feature (88)..(471): Homolog of NCBI NO: 18414458 NR Description: F-box protein family (FBL4) [Arabidopsis
  misc_feature (16)..(87): Homolog of NCBI NO: 18414458 NR Description: F-box protein family (FBL4) [Arabidopsis
  misc_feature (100)..(425): Homolog of NCBI NO: 18414458 NR Description: F-box protein family (FBL4) [Arabidopsis
  misc_feature (95)..(475): Homolog of NCBI NO: 38344677 NR Description: OSJNBb0042I07.12 [Oryza sativa (japonica
  misc_feature (17)..(442): Homolog of NCBI NO: 38344677 NR Description: OSJNBb0042I07.12 [Oryza sativa (japonica
  misc_feature (48)..(310): Homolog of NCBI NO: 38605924 NR Description: OSJNBb0076A22.3 [Oryza sativa (japonica
  misc_feature (71)..(344): Homolog of NCBI NO: 38605933 NR Description: OSJNBb0076A22.12 [Oryza sativa (japonica
  misc_feature (17)..(475): Homolog of NCBI NO: 38344679 NR Description: OSJNBb0042I07.14 [Oryza sativa (japonica
  misc_feature (17)..(475): Homolog of NCBI NO: 21742575 NR Description: OSJNBb0076A22.1 [Oryza sativa (japonica
  misc_feature (17)..(483): Homolog of NCBI NO: 18412871 NR Description: F-box protein family (FBL14) [Arabidopsis
AFLPSFVRHPCCEEQRMDNIPEHIVWEILSRIKKTSDRNAVSLVCKRLYYLDNAERNCIRVGCGMDPADEALSCLCIRFENLSKVEITYSGWMSKLGKQLDDKGLLILANHCPLLCDLSLSYCTFITDVGLRYLASSSKLSSLRLNFTPRITGCGILSLVVGCKNLSSLHLIRCLNVSSVEWLEYLGKLGTLEDLSINNCRAIGEGDLIKLGPGWQKLTRLQFEVDANYRYMKVYDRLSVDRWQKQYVPCGNMLELSLVNCIISPGRGLACVLSKCKNLQKIHLDMCVGVRDFDIICLSQRSSELKSVSLRVPSDFSLPSLVNNPLRLTDESLKALAQNCSKLESVRISFSDGEFPSSSSFTLSGILCLIQRCLVRQLALDHVYSFNDVGMEALCSAEYLESLELVKCQEISDEGLQLVSQFPRLCILRLSKCLGISDDGLKPLVGSLKLDFLAIEDCPQISERGVQGAAKSVSFRQDLSWMY

SEQ ID NO: 51396 - protein, 467 aa, Glycine max
  peptide (1)..(467): Ceres Seq. ID no. 14311461
  misc_feature (1)..(46): Pfam Name: F-box domain Pfam Description: F-box domain
  misc_feature (72)..(455): Homolog of NCBI NO: 18414458 NR Description: F-box protein family (FBL4) [Arabidopsis
  misc_feature (1)..(71): Homolog of NCBI NO: 18414458 NR Description: F-box protein family (FBL4) [Arabidopsis
  misc_feature (84)..(409): Homolog of NCBI NO: 18414458 NR Description: F-box protein family (FBL4) [Arabidopsis
  misc_feature (79)..(459): Homolog of NCBI NO: 38344677 NR Description: OSJNBb0042I07.12 [Oryza sativa (japonica
  misc_feature (1)..(426): Homolog of NCBI NO: 38344677 NR Description: OSJNBb0042I07.12 [Oryza sativa (japonica
  misc_feature (32)..(294): Homolog of NCBI NO: 38605924 NR Description: OSJNBb0076A22.3 [Oryza sativa (japonica
  misc_feature (55)..(328): Homolog of NCBI NO: 38605933 NR Description: OSJNBb0076A22.12 [Oryza sativa (japonica
  misc_feature (1)..(459): Homolog of NCBI NO: 38344679 NR Description: OSJNBb0042I07.14 [Oryza sativa (japonica
  misc_feature (1)..(459): Homolog of NCBI NO: 21742575 NR Description: OSJNBb0076A22.1 [Oryza sativa (japonica
  misc_feature (1)..(467): Homolog of NCBI NO: 18412871 NR Description: F-box protein family (FBL14) [Arabidopsis
MDNIPEHIVWEILSRIKKTSDRNAVSLVCKRLYYLDNAERNCIRVGCGMDPADEALSCLCIRFENLSKVEITYSGWMSKLGKQLDDKGLLILANHCPLLCDLSLSYCTFITDVGLRYLASSSKLSSLRLNFTPRITGCGILSLVVGCKNLSSLHLIRCLNVSSVEWLEYLGKLGTLEDLSINNCRAIGEGDLIKLGPGWQKLTRLQFEVDANYRYMKVYDRLSVDRWQKQYVPCGNMLELSLVNCIISPGRGLACVLSKCKNLQKIHLDMCVGVRDFDIICLSQRSSELKSVSLRVPSDFSLPSLVNNPLRLTDESLKALAQNCSKLESVRISFSDGEFPSSSSFTLSGILCLIQRCLVRQLALDHVYSFNDVGMEALCSAEYLESLELVKCQEISDEGLQLVSQFPRLCILRLSKCLGISDDGLKPLVGSLKLDFLAIEDCPQISERGVQGAAKSVSFRQDLSWMY

SEQ ID NO: 51397 - protein, 419 aa, Glycine max
  peptide (1)..(419): Ceres Seq. ID no. 14311462
  misc_feature (24)..(407): Homolog of NCBI NO: 18414458 NR Description: F-box protein family (FBL4) [Arabidopsis
  misc_feature (1)..(23): Homolog of NCBI NO: 18414458 NR Description: F-box protein family (FBL4) [Arabidopsis
  misc_feature (36)..(361): Homolog of NCBI NO: 18414458 NR Description: F-box protein family (FBL4) [Arabidopsis
  misc_feature (31)..(411): Homolog of NCBI NO: 38344677 NR Description: OSJNBb0042I07.12 [Oryza sativa (japonica
  misc_feature (1)..(378): Homolog of NCBI NO: 38344677 NR Description: OSJNBb0042I07.12 [Oryza sativa (japonica
  misc_feature (1)..(246): Homolog of NCBI NO: 38605924 NR Description: OSJNBb0076A22.3 [Oryza sativa (japonica
  misc_feature (7)..(280): Homolog of NCBI NO: 38605933 NR Description: OSJNBb0076A22.12 [Oryza sativa (japonica
  misc_feature (1)..(411): Homolog of NCBI NO: 38344679 NR Description: OSJNBb0042I07.14 [Oryza sativa (japonica
  misc_feature (1)..(411): Homolog of NCBI NO: 21742575 NR Description: OSJNBb0076A22.1 [Oryza sativa (japonica
  misc_feature (1)..(419): Homolog of NCBI NO: 18412871 NR Description: F-box protein family (FBL14) [Arabidopsis
MDPADEALSCLCIRFENLSKVEITYSGWMSKLGKQLDDKGLLILANHCPLLCDLSLSYCTFITDVGLRYLASSSKLSSLRLNFTPRITGCGILSLVVGCKNLSSLHLIRCLNVSSVEWLEYLGKLGTLEDLSINNCRAIGEGDLIKLGPGWQKLTRLQFEVDANYRYMKVYDRLSVDRWQKQYVPCGNMLELSLVNCIISPGRGLACVLSKCKNLQKIHLDMCVGVRDFDIICLSQRSSELKSVSLRVPSDFSLPSLVNNPLRLTDESLKALAQNCSKLESVRISFSDGEFPSSSSFTLSGILCLIQRCLVRQLALDHVYSFNDVGMEALCSAEYLESLELVKCQEISDEGLQLVSQFPRLCILRLSKCLGISDDGLKPLVGSLKLDFLAIEDCPQISERGVQGAAKSVSFRQDLSWMY

SEQ ID NO: 51398 - DNA, 1401 bp, Glycine max
  misc_feature (1)..(1401): Ceres Seq. ID no. 14311509
atcggttataccctttgccccctctctctctctctctctccttctcagtgcaaacagtttagaaaaccaaattaatctagttcaatcatacatagagaatacagtgtaaagaatagattttctcccctaccaaaaacaagagggagctgagatattgtaaggtggtgtgaaaggaattaacaaggatctgttttgggatatatgggcataagagaaagagatgacatggtgcaatgactcagatgaggagaggggaattgatcaactggttgcaccaacaattactcctacttcaactaataacactactgttcttactgatcatcgcacaaaagcaagcgaaattcgcaccttaacttgcccctcatgtggccaaaacattgaattccaagaccagactggaatcaatgacttgccggggttaccagctggggtgaagtttgatccgaatgaccaagagatattagagcatttggaagcaaaggtactgtctgacgtgccaaagcttcatccacttattgatgagttcataccaacgcttgaaggagagaatgggatctgttatacgcatccagaaaagcttccaggtgtaagaaaagatgggcaaatccgccacttctttcacaggccatctaaagcatacacaacaggaacaaggaaaagaagaaaggttcacaccgacgaagaaggaagcgagacaaggtggcacaaaacaggaaaaactagacccgtttttgttggtggtgctgtgaaggggttcaagaaaatcctagtcctctacaccaactatggaaggcaaaagaagcctgagaagaccaattgggtgatgcatcaataccaccttggcactagcgaagaagagaaagatggagaattggtggtttcaaaggttttctaccaaacacaacctcgacaatgtggtaattccattataaagcaggatctttatgatgaagaaagattgatgactaaccaaagtgtccataatgatgatgacaacaatataatacctagaaataataatgcaagtgctcttatggactactacaatccttctttcataaattatgaccaattgggtggtcgtagtaatagggaaaattcacctcaacttattccaaatttggtcatgcaaggtgatagctcttctttcattcgattagcaatggatgcaaccaaagccaagatggacagaaaatagctccttactggaagaactttcttggtagaacatatagtagtgacaatgaccatatattgatgttgatgttttttttttatattactattatatatataacatgtatttattctatatatgggacgataagttggaagaaagacaaggcttccattattattattatatatatatgtgtgtcgaggattacccatttgacg

SEQ ID NO: 51399 - protein, 326 aa, Glycine max
  peptide (1)..(326): Ceres Seq. ID no. 14311510
  misc_feature (68)..(209): Pfam Name: No apical meristem (NAM) protein Pfam Description: No apical meristem (NAM) protein
  misc_feature (47)..(232): Homolog of NCBI NO: 25518116 NR Description: hypothetical protein F2J7.1 - Arabidopsis
  misc_feature (47)..(232): Homolog of NCBI NO: 12320749 NR Description: unknown protein [Arabidopsis thaliana]
  misc_feature (71)..(233): Homolog of NCBI NO: 34906416 NR Description: P0710E05.22 [Oryza sativa (japonica
  misc_feature (47)..(233): Homolog of NCBI NO: 15241889 NR Description: No apical meristem (NAM) protein family
  misc_feature (47)..(233): Homolog of NCBI NO: 15233497 NR Description: No apical meristem (NAM) protein family
  misc_feature (58)..(235): Homolog of NCBI NO: 6560767 NR Description: F3M18.9 [Arabidopsis thaliana]
  misc_feature (1)..(235): Homolog of NCBI NO: 21554371 NR Description: NAM protein, putative [Arabidopsis thaliana]
  misc_feature (1)..(235): Homolog of NCBI NO: 18396807 NR Description: No apical meristem (NAM) protein family
  misc_feature (1)..(279): Homolog of NCBI NO: 34911014 NR Description: OJ1125_C04.12 [Oryza sativa (japonica
  misc_feature (1)..(300): Homolog of NCBI NO: 15235314 NR Description: No apical meristem (NAM) protein family
MTWCNDSDEERGIDQLVAPTITPTSTNNTTVLTDHRTKASEIRTLTCPSCGQNIEFQDQTGINDLPGLPAGVKFDPNDQEILEHLEAKVLSDVPKLHPLIDEFIPTLEGENGICYTHPEKLPGVRKDGQIRHFFHRPSKAYTTGTRKRRKVHTDEEGSETRWHKTGKTRPVFVGGAVKGFKKILVLYTNYGRQKKPEKTNWVMHQYHLGTSEEEKDGELVVSKVFYQTQPRQCGNSIIKQDLYDEERLMTNQSVHNDDDNNIIPRNNNASALMDYYNPSFINYDQLGGRSNRENSPQLIPNLVMQGDSSSFIRLAMDATKAKMDRK

SEQ ID NO: 51400 - DNA, 1161 bp, Glycine max
  misc_feature (1)..(1161): Ceres Seq. ID no. 14311463
atcccactttgttaaaaatttcacgaaaaaaaataaaataaaaattggaaaaattccaattccgctctcgattttcgatttcggagtttgatagcaacgttggaaggaaaggtgagagcaaaatcgttggaagaatctggtttttgggtcgtggttgttgttttcgccatcaaaacaatgtcttcgccggacattgtctcgatattggagaactcgaaggagttcgatcgggtgaggaaagaacaagaggatattctgtcggagatcaacaaacttcacaagaagcttcaagcaactcctgaagtagttgagaagcctggggataactcattggctaggctgaaatttttgtacactcaagcaaaagatctttcagaaagtgaagcaagtatttccaacttactgataaaccaaattgatgccctactgcctacgggtccacaagggcaaacacgaagaagaatagaaggtaatgagcagaaaaggaaacgagtgaagactgagtcagacatttcaaggctaactcctaatatgcgaagtcaacttgaggcttgtgccagtcttaaaggcgaacaggtagcggctagggtcacaccacgaaatgctgataaggacgagtggtttgtcgtaaaagtgattcattttgataaggaatcaaaggaatttgaagtactggatgaggaaccaggcgatgatgaagaaagcagtggccaaagacaatacaagcttcccatggcaaatatcattcctttccccaagagtaatgatccttctagcgctcttgatttccctcctggaaaacatgttttggcggtctatccaggaactactgcactttataaagcaacagttgttcaaggccctcgcagaaggaagaccgaggattatgtgttggaatttgatgatgatgaggaagatggatctttacctcaaaggacagtgccattccgcaaagtggttcctcttccagaaggacatcgccaatgagtttgagtataagctatttattatagttgtgtataaagcagaaactagaccattgcatatgtgccacttgtgtaatatgctccgtgtgatgtggtttgtaagaatgacattgcaacccaatttcgaacatgtaagaatgacacgaagttcaatttcacgttacctagaaatgat

SEQ ID NO: 51401 - protein, 269 aa, Glycine max
  peptide (1)..(269): Ceres Seq. ID no. 14311464
  misc_feature (131)..(265): Homolog of NCBI NO: 34859208 NR Description: similar to hypothetical protein BC011981 [Rattus
  misc_feature (131)..(265): Homolog of NCBI NO: 12839307 NR Description: unnamed protein product [Mus musculus]
  misc_feature (131)..(265): Homolog of NCBI NO: 31981320 NR Description: RIKEN cDNA 1700023O11 [Mus musculus]
  misc_feature (131)..(265): Homolog of NCBI NO: 19923935 NR Description: hypothetical protein BC011981 [Homo sapiens]
  misc_feature (131)..(266): Homolog of NCBI NO: 28828907 NR Description: similar to Plasmodium falciparum. Hypothetical
  misc_feature (2)..(269): Homolog of NCBI NO: 7939518 NR Description: gene_id:K1G2.17~unknown protein [Arabidopsis
  misc_feature (237)..(269): Homolog of NCBI NO: 9758081 NR Description: dbj|BAA95721.1~gene_id:MNF13.7~strong similarity
  misc_feature (1)..(231): Homolog of NCBI NO: 9758081 NR Description: dbj|BAA95721.1~gene_id:MNF13.7~strong similarity
  misc_feature (2)..(269): Homolog of NCBI NO: 22331369 NR Description: expressed protein [Arabidopsis thaliana]
  misc_feature (1)..(269): Homolog of NCBI NO: 30693623 NR Description: expressed protein [Arabidopsis thaliana]
MSSPDIVSILENSKEFDRVRKEQEDILSEINKLHKKLQATPEVVEKPGDNSLARLKFLYTQAKDLSESEASISNLLINQIDALLPTGPQGQTRRRIEGNEQKRKRVKTESDISRLTPNMRSQLEACASLKGEQVAARVTPRNADKDEWFVVKVIHFDKESKEFEVLDEEPGDDEESSGQRQYKLPMANIIPFPKSNDPSSALDFPPGKHVLAVYPGTTALYKATVVQGPRRRKTEDYVLEFDDDEEDGSLPQRTVPFRKVVPLPEGHRQ

SEQ ID NO: 51402 - protein, 161 aa, Glycine max
  peptide (1)..(161): Ceres Seq. ID no. 14311465
MRNQAMMKKAVAKDNTSFPWQISFLSPRVMILLALLISLLENMFWRSIQELLHFIKQQLFKALAEGRPRIMCWNLMMMRKMDLYLKGQCHSAKWFLFQKDIANEFEYKLFIIVVYKAETRPLHMCHLCNMLRVMWFVRMTLQPNFEHVRMTRSSISRYLEM

SEQ ID NO: 51403 - protein, 156 aa, Glycine max
  peptide (1)..(156): Ceres Seq. ID no. 14311466
MMKKAVAKDNTSFPWQISFLSPRVMILLALLISLLENMFWRSIQELLHFIKQQLFKALAEGRPRIMCWNLMMMRKMDLYLKGQCHSAKWFLFQKDIANEFEYKLFIIVVYKAETRPLHMCHLCNMLRVMWFVRMTLQPNFEHVRMTRSSISRYLEM

SEQ ID NO: 51404 - DNA, 1375 bp, Glycine max
  misc_feature (1)..(1375): Ceres Seq. ID no. 14311489
gagtatcttccattctatttcacttatagttcaaagaaacaaaatgacgaagcagttaacatgagttcctatccagcgatgtcggggtaaaatgtacaaaatcgaaagaggaacaaggtgcttcgctgctattgctttctgcaatgcaccttttttcatttccataactctttacagttacaccacgcctcctcctcctcctttagccattcccctatccacaacagctattccaattagatctagggtttcctcttcctcactattcaccatccctcgccggagaacaacaccgattttccggcgccggcttcacggatctcgcatcagcgtctgatacattggcaaaatgcacaccaaatcggcgcagtcatcgtttcgggatcggacgcacgaattccagagcattgcggagaggttgaagaaaacagggccagcgccgaatggacaaagcagcagttcatccagatcggaggaacagcgatccgcgattgcaaatcaatcggagttcaatagaagagcttccaagatcggcttcgggattcaccaaacctctcagaaactcgccaagctcgccaagttggctaagaggacttcggttttcgatgaccctaccatggaaattcaagagcttacgggggttattaagcaagacatcactgctctaaactctgcggttgtggatcttcagttactcagcaactctcggaacgagagtgggaacgcttctaccgacacgactagccattcgaccacggtggttgatgacctgaagacacggttgatgagcgccaccaaagagtttaaagatgttctcaccatgcgaactgagaacttgaaagtgcatgagaataggaggcagctgttttcggccactgcttctaaggactctgcgaatccttttgtccggcaacggccgttggctacgaggtcggctgctagtacttctaatgcccccgctgcaccttgggctactgggtcatcttcatctcagttgtttcctaagaagcaggtggatggggagagtcaaccattgctgcaacagcagcagcagcagcaagaggtagttccattgcaagacagttacatgcaaaacagagctgaagctcttcagaatgttgagtccactattcatgagctcagcaacatctttaatcaactagcaactcttgtttctcaacaaggagagattgccatcaggattgatgaaaacatggatgatacattggcaaatgtagagggggcgcaaggggctttgttgaagtatctgaacaacatatcttctaataggtggctgatgatcaagattttctttatattaatattttttcttatggttttcttattttttgtggcatagtcattctaatgacag

SEQ ID NO: 51405 - protein, 336 aa, Glycine max
  peptide (1)..(336): Ceres Seq. ID no. 14311490
  misc_feature (52)..(156): Pfam Name: Syntaxin Pfam Description: Syntaxin
  misc_feature (9)..(329): Homolog of NCBI NO: 32490453 NR Description: syntaxin homologue [Aspergillus oryzae]
  misc_feature (40)..(336): Homolog of NCBI NO: 24584581 NR Description: Syntaxin 5 CG4214-PA [Drosophila melanogaster]
  misc_feature (40)..(336): Homolog of NCBI NO: 542593 NR Description: SED5 protein - fruit fly (Drosophila
  misc_feature (37)..(336): Homolog of NCBI NO: 20148780 NR Description: syntaxin 5 [Phytophthora sojae]
  misc_feature (9)..(329): Homolog of NCBI NO: 40747582 NR Description: hypothetical protein AN9526.2 [Aspergillus
  misc_feature (10)..(336): Homolog of NCBI NO: 28829569 NR Description: similar to syntaxin 5
  misc_feature (8)..(336): Homolog of NCBI NO: 2981439 NR Description: syntaxin of plants 31 [Arabidopsis thaliana]
  misc_feature (8)..(336): Homolog of NCBI NO: 15239228 NR Description: syntaxin of plants SYP31 [Arabidopsis thaliana]
  misc_feature (1)..(336): Homolog of NCBI NO: 30687459 NR Description: syntaxin of plants SYP32 [Arabidopsis thaliana]
  misc_feature (4)..(336): Homolog of NCBI NO: 34906154 NR Description: putative t-SNARE SED5 [Oryza sativa (japonica
MHTKSAQSSFRDRTHEFQSIAERLKKTGPAPNGQSSSSSRSEEQRSAIANQSEFNRRASKIGFGIHQTSQKLAKLAKLAKRTSVFDDPTMEIQELTGVIKQDITALNSAVVDLQLLSNSRNESGNASTDTTSHSTTVVDDLKTRLMSATKEFKDVLTMRTENLKVHENRRQLFSATASKDSANPFVRQRPLATRSAASTSNAPAAPWATGSSSSQLFPKKQVDGESQPLLQQQQQQQEVVPLQDSYMQNRAEALQNVESTIHELSNIFNQLATLVSQQGEIAIRIDENMDDTLANVEGAQGALLKYLNNISSNRWLMIKIFFILIFFLMVFLFFVA

SEQ ID NO: 51406 - protein, 247 aa, Glycine max
  peptide (1)..(247): Ceres Seq. ID no. 14311491
  misc_feature (1)..(67): Pfam Name: Syntaxin Pfam Description: Syntaxin
  misc_feature (1)..(240): Homolog of NCBI NO: 32490453 NR Description: syntaxin homologue [Aspergillus oryzae]
  misc_feature (1)..(247): Homolog of NCBI NO: 24584581 NR Description: Syntaxin 5 CG4214-PA [Drosophila melanogaster]
  misc_feature (1)..(247): Homolog of NCBI NO: 542593 NR Description: SED5 protein - fruit fly (Drosophila
  misc_feature (1)..(247): Homolog of NCBI NO: 20148780 NR Description: syntaxin 5 [Phytophthora sojae]
  misc_feature (1)..(240): Homolog of NCBI NO: 40747582 NR Description: hypothetical protein AN9526.2 [Aspergillus
  misc_feature (1)..(247): Homolog of NCBI NO: 28829569 NR Description: similar to syntaxin 5
  misc_feature (1)..(247): Homolog of NCBI NO: 2981439 NR Description: syntaxin of plants 31 [Arabidopsis thaliana]
  misc_feature (1)..(247): Homolog of NCBI NO: 15239228 NR Description: syntaxin of plants SYP31 [Arabidopsis thaliana]
  misc_feature (1)..(247): Homolog of NCBI NO: 30687459 NR Description: syntaxin of plants SYP32 [Arabidopsis thaliana]
  misc_feature (1)..(247): Homolog of NCBI NO: 34906154 NR Description: putative t-SNARE SED5 [Oryza sativa (japonica
MEIQELTGVIKQDITALNSAVVDLQLLSNSRNESGNASTDTTSHSTTVVDDLKTRLMSATKEFKDVLTMRTENLKVHENRRQLFSATASKDSANPFVRQRPLATRSAASTSNAPAAPWATGSSSSQLFPKKQVDGESQPLLQQQQQQQEVVPLQDSYMQNRAEALQNVESTIHELSNIFNQLATLVSQQGEIAIRIDENMDDTLANVEGAQGALLKYLNNISSNRWLMIKIFFILIFFLMVFLFFVA

SEQ ID NO: 51407 - protein, 191 aa, Glycine max
  peptide (1)..(191): Ceres Seq. ID no. 14311492
  misc_feature (104)..(166): Pfam Name: SNARE domain Pfam Description: SNARE domain
  misc_feature (1)..(184): Homolog of NCBI NO: 32490453 NR Description: syntaxin homologue [Aspergillus oryzae]
  misc_feature (1)..(191): Homolog of NCBI NO: 24584581 NR Description: Syntaxin 5 CG4214-PA [Drosophila melanogaster]
  misc_feature (1)..(191): Homolog of NCBI NO: 542593 NR Description: SED5 protein - fruit fly (Drosophila
  misc_feature (1)..(191): Homolog of NCBI NO: 20148780 NR Description: syntaxin 5 [Phytophthora sojae]
  misc_feature (1)..(184): Homolog of NCBI NO: 40747582 NR Description: hypothetical protein AN9526.2 [Aspergillus
  misc_feature (1)..(191): Homolog of NCBI NO: 28829569 NR Description: similar to syntaxin 5
  misc_feature (1)..(191): Homolog of NCBI NO: 2981439 NR Description: syntaxin of plants 31 [Arabidopsis thaliana]
  misc_feature (1)..(191): Homolog of NCBI NO: 15239228 NR Description: syntaxin of plants SYP31 [Arabidopsis thaliana]
  misc_feature (1)..(191): Homolog of NCBI NO: 30687459 NR Description: syntaxin of plants SYP32 [Arabidopsis thaliana]
  misc_feature (1)..(191): Homolog of NCBI NO: 34906154 NR Description: putative t-SNARE SED5 [Oryza sativa (japonica
MSATKEFKDVLTMRTENLKVHENRRQLFSATASKDSANPFVRQRPLATRSAASTSNAPAAPWATGSSSSQLFPKKQVDGESQPLLQQQQQQQEVVPLQDSYMQNRAEALQNVESTIHELSNIFNQLATLVSQQGEIAIRIDENMDDTLANVEGAQGALLKYLNNISSNRWLMIKIFFILIFFLMVFLFFVA

SEQ ID NO: 51408 - DNA, 1379 bp, Glycine max
  misc_feature (1)..(1379): Ceres Seq. ID no. 14315098
taatcgaaaaacaatcagagatcattttcatcaaattgttcaaaactcaaagcatcgatttgatgccatttgcgctcctgcttgtcgtagacattccccaatcgatcaccgtcctcccgatccaccagtctgaatggaagaaggtaagaggaagttggcgatgaagagaaagagagagagcacaggtggtggaaaagacagactgagtgagttgcctgactctgtattggtccacataatggaattgatggagacaagaaatgcagttcagacttgtgtactctctcagcgttggaagaacctttggagacgtatgactcgtctctctttcaaccaccctagaacattttccagatatcacaattttgtgtctcatgttctttctggacgagaccattctgtttccctaattgatcttctttttgtggtccttcattcaacttcggccacactcttgcatgacgtcatcagttatgctgtgtcgcacaatgtgcagcagttgacaatctatatagatacattagattgcattaacggtgccacaccctcctttcagctttccaaaactccttttgtccctctcctttttccctctccatctttgacttctcttaagctttccagtgtgttcattggatattctttggaacttccaaaatctctactactaccatctttgaaaaccttgcatctcacaaatgttcactttactgctagtgaccacaacaacaactttgttgagcccttttctacttgtcacatgttgaatactttggtcattcaatattgctttatgcacacttctgcacaagtcctctccatatccaattctaacctttcttctttgacccttgacacctttcaagaacacattgtgctttctactccgaatctcacttctcttacaatcagggatggtttccattttactcttctccaactctcctccacttgtgatctttcacttcttaaagaggcggatattgagacccgtgttgatatacattattcagtcatcattacctggctgcgacttatgactaatgttaagatgctcacaatctcttctgctacccttaaggcaatactaaatgacctatcagatcctgctgcagcgactgttcaacctccatgctttggtagattggagtcattgaaagtgaaaatgcatccacatgtaaacatatctaaggaagaagtaagtaggacattggagcacttacttgtgaactctcctccaccgaccagagtttatctcataaatgtatccctatcccatcaagaactagttaggtatgcttgaaggaaatgaaacattggggaagatgaagagaaagatggaagagttacagaggacaaggacaggatcaatgataagt

SEQ ID NO: 51409 - protein, 389 aa, Glycine max
  peptide (1)..(389): Ceres Seq. ID no. 14315099
  misc_feature (24)..(67): Pfam Name: F-box domain Pfam Description: F-box domain
  misc_feature (15)..(318): Homolog of NCBI NO: 15219075 NR Description: F-box protein family [Arabidopsis thaliana]
  misc_feature (22)..(261): Homolog of NCBI NO: 30678601 NR Description: F-box protein family [Arabidopsis thaliana]
  misc_feature (22)..(285): Homolog of NCBI NO: 28207108 NR Description: hypothetical protein [Arabidopsis thaliana]
  misc_feature (22)..(303): Homolog of NCBI NO: 30693275 NR Description: F-box protein family [Arabidopsis thaliana]
  misc_feature (22)..(285): Homolog of NCBI NO: 15225804 NR Description: F-box protein family [Arabidopsis thaliana]
  misc_feature (22)..(285): Homolog of NCBI NO: 28207106 NR Description: hypothetical protein [Arabidopsis thaliana]
  misc_feature (21)..(317): Homolog of NCBI NO: 15241211 NR Description: F-box protein family [Arabidopsis thaliana]
  misc_feature (22)..(261): Homolog of NCBI NO: 15235074 NR Description: F-box protein family [Arabidopsis thaliana]
  misc_feature (22)..(310): Homolog of NCBI NO: 22328640 NR Description: F-box protein family [Arabidopsis thaliana]
  misc_feature (10)..(284): Homolog of NCBI NO: 22328603 NR Description: F-box protein family [Arabidopsis thaliana]
MEEGKRKLAMKRKRESTGGGKDRLSELPDSVLVHIMELMETRNAVQTCVLSQRWKNLWRRMTRLSFNHPRTFSRYHNFVSHVLSGRDHSVSLIDLLFVVLHSTSATLLHDVISYAVSHNVQQLTIYIDTLDCINGATPSFQLSKTPFVPLLFPSPSLTSLKLSSVFIGYSLELPKSLLLPSLKTLHLTNVHFTASDHNNNFVEPFSTCHMLNTLVIQYCFMHTSAQVLSISNSNLSSLTLDTFQEHIVLSTPNLTSLTIRDGFHFTLLQLSSTCDLSLLKEADIETRVDIHYSVIITWLRLMTNVKMLTISSATLKAILNDLSDPAAATVQPPCFGRLESLKVKMHPHVNISKEEVSRTLEHLLVNSPPPTRVYLINVSLSHQELVRYA

SEQ ID NO: 51410 - protein, 380 aa, Glycine max
  peptide (1)..(380): Ceres Seq. ID no. 14315100
  misc_feature (15)..(58): Pfam Name: F-box domain Pfam Description: F-box domain
  misc_feature (6)..(309): Homolog of NCBI NO: 15219075 NR Description: F-box protein family [Arabidopsis thaliana]
  misc_feature (13)..(252): Homolog of NCBI NO: 30678601 NR Description: F-box protein family [Arabidopsis thaliana]
  misc_feature (13)..(276): Homolog of NCBI NO: 28207108 NR Description: hypothetical protein [Arabidopsis thaliana]
  misc_feature (13)..(294): Homolog of NCBI NO: 30693275 NR Description: F-box protein family [Arabidopsis thaliana]
  misc_feature (13)..(276): Homolog of NCBI NO: 15225804 NR Description: F-box protein family [Arabidopsis thaliana]
  misc_feature (13)..(276): Homolog of NCBI NO: 28207106 NR Description: hypothetical protein [Arabidopsis thaliana]
  misc_feature (12)..(308): Homolog of NCBI NO: 15241211 NR Description: F-box protein family [Arabidopsis thaliana]
  misc_feature (13)..(252): Homolog of NCBI NO: 15235074 NR Description: F-box protein family [Arabidopsis thaliana]
  misc_feature (13)..(301): Homolog of NCBI NO: 22328640 NR Description: F-box protein family [Arabidopsis thaliana]
  misc_feature (1)..(275): Homolog of NCBI NO: 22328603 NR Description: F-box protein family [Arabidopsis thaliana]
MKRKRESTGGGKDRLSELPDSVLVHIMELMETRNAVQTCVLSQRWKNLWRRMTRLSFNHPRTFSRYHNFVSHVLSGRDHSVSLIDLLFVVLHSTSATLLHDVISYAVSHNVQQLTIYIDTLDCINGATPSFQLSKTPFVPLLFPSPSLTSLKLSSVFIGYSLELPKSLLLPSLKTLHLTNVHFTASDHNNNFVEPFSTCHMLNTLVIQYCFMHTSAQVLSISNSNLSSLTLDTFQEHIVLSTPNLTSLTIRDGFHFTLLQLSSTCDLSLLKEADIETRVDIHYSVIITWLRLMTNVKMLTISSATLKAILNDLSDPAAATVQPPCFGRLESLKVKMHPHVNISKEEVSRTLEHLLVNSPPPTRVYLINVSLSHQELVRYA

SEQ ID NO: 51411 - protein, 354 aa, Glycine max
  peptide (1)..(354): Ceres Seq. ID no. 14315101
  misc_feature (1)..(283): Homolog of NCBI NO: 15219075 NR Description: F-box protein family [Arabidopsis thaliana]
  misc_feature (1)..(226): Homolog of NCBI NO: 30678601 NR Description: F-box protein family [Arabidopsis thaliana]
  misc_feature (1)..(250): Homolog of NCBI NO: 28207108 NR Description: hypothetical protein [Arabidopsis thaliana]
  misc_feature (1)..(268): Homolog of NCBI NO: 30693275 NR Description: F-box protein family [Arabidopsis thaliana]
  misc_feature (1)..(250): Homolog of NCBI NO: 15225804 NR Description: F-box protein family [Arabidopsis thaliana]
  misc_feature (1)..(250): Homolog of NCBI NO: 28207106 NR Description: hypothetical protein [Arabidopsis thaliana]
  misc_feature (1)..(282): Homolog of NCBI NO: 15241211 NR Description: F-box protein family [Arabidopsis thaliana]
  misc_feature (1)..(226): Homolog of NCBI NO: 15235074 NR Description: F-box protein family [Arabidopsis thaliana]
  misc_feature (1)..(275): Homolog of NCBI NO: 22328640 NR Description: F-box protein family [Arabidopsis thaliana]
  misc_feature (1)..(249): Homolog of NCBI NO: 22328603 NR Description: F-box protein family [Arabidopsis thaliana]
MELMETRNAVQTCVLSQRWKNLWRRMTRLSFNHPRTFSRYHNFVSHVLSGRDHSVSLIDLLFVVLHSTSATLLHDVISYAVSHNVQQLTIYIDTLDCINGATPSFQLSKTPFVPLLFPSPSLTSLKLSSVFIGYSLELPKSLLLPSLKTLHLTNVHFTASDHNNNFVEPFSTCHMLNTLVIQYCFMHTSAQVLSISNSNLSSLTLDTFQEHIVLSTPNLTSLTIRDGFHFTLLQLSSTCDLSLLKEADIETRVDIHYSVIITWLRLMTNVKMLTISSATLKAILNDLSDPAAATVQPPCFGRLESLKVKMHPHVNISKEEVSRTLEHLLVNSPPPTRVYLINVSLSHQELVRYA

SEQ ID NO: 51412 - DNA, 1319 bp, Glycine max
  misc_feature (1)..(1319): Ceres Seq. ID no. 14311505
actctcctcgtaagtcctgcgtttccagacccagtggaagtagcgaaatgtatcgaacggcggcgaagcggttgttgtgcggtgcaagatactactataatggcaacgttggactccgattccggcctcctcagatatttataccctcttctcgcttttccacatccgagactcaacctttacccattccacacgctacggatcgtaccattccagtcgtcgtcaccaccgaaaccgaaaaccctaactcttcagattcgtccgcttcttcttcaccttcatcttcctcaacagctgatgatgccacaaaacccagggccaagtatgaggaccaacacactcgcgtgcttcaggcctcgctctcttacgtcttaaagttggggtggacagaagctgcgctagttgcaggagccagggatgtcggtctttcgccatctattgttggatcttttcccaggaaggaagcagcactggtcgagtatttcatggatggctgcttacaaagacttgctgataaaattgactcagatgagagtttacaaaatttgacaccaagtgactgcatctctaagcttatcagatttcgtttagaaatgcaagctccatatatatcaacatggcctcaagctcttagcatccaggcacaacctgttaatgttcctacaagttttaagcagagggcagtgcttgtggatgagatctggcatgctgctggtgataatgcctctgacattgattggtatgccaagcgcactatccttggaggaatatactcaacaactgagatttatatgctgacagatacctctcctgatttccgtgatacatgggctttcttggatgctcgagttaaagatgcctttgatttaaagaaaaccattcaagaggcacagtatttggcagaagctgtcagtaccgggctgggaaactcctttcaagggtttgtcgggaaagttttccagagatgagtcgtggtgggaatttatgctgacaatgtttctccgagacattgattgttaccttgaaggagatgctatattatacacgcctagtaattactagttatctttcatttatttcaaatttgctgtcttcggcccttcactcaaatttgctctttcatttaataataattttaagcttgtaaataattctattgccattttattatgatacaaaaaactagctcttttttcccttcccccaaatagcttttgtttattcatgtctcttactccttggtatattgtaatttctctcttttcaaaagcgacgtgtttgctgaattaaatatttttttatagaaaattgttgactat

SEQ ID NO: 51413 - protein, 321 aa, Glycine max
  peptide (1)..(321): Ceres Seq. ID no. 14311506
  misc_feature (16)..(213): Homolog of NCBI NO: 14532534 NR Description: T29M8.1/T29M8.1 [Arabidopsis thaliana]
  misc_feature (76)..(307): Homolog of NCBI NO: 6841302 NR Description: HSPC326 [Homo sapiens]
  misc_feature (43)..(297): Homolog of NCBI NO: 34851240 NR Description: similar to Polymerase (RNA) II (DNA directed)
  misc_feature (76)..(307): Homolog of NCBI NO: 40789233 NR Description: hypothetical protein DKFZp434K046 [Homo sapiens]
  misc_feature (76)..(307): Homolog of NCBI NO: 32449799 NR Description: Unknown (protein for IMAGE:6514554) [Homo sapiens]
  misc_feature (39)..(307): Homolog of NCBI NO: 33859690 NR Description: RIKEN cDNA 2310005O14 [Mus musculus]
  misc_feature (16)..(269): Homolog of NCBI NO: 8778288 NR Description: F14D16.30 [Arabidopsis thaliana]
  misc_feature (52)..(321): Homolog of NCBI NO: 31415917 NR Description: unknown protein [Oryza sativa (japonica
  misc_feature (16)..(320): Homolog of NCBI NO: 21593282 NR Description: unknown [Arabidopsis thaliana]
  misc_feature (16)..(320): Homolog of NCBI NO: 18394701 NR Description: expressed protein [Arabidopsis thaliana]
SPRKSCVSRPSGSSEMYRTAAKRLLCGARYYYNGNVGLRFRPPQIFIPSSRFSTSETQPLPIPHATDRTIPVVVTTETENPNSSDSSASSSPSSSSTADDATKPRAKYEDQHTRVLQASLSYVLKLGWTEAALVAGARDVGLSPSIVGSFPRKEAALVEYFMDGCLQRLADKIDSDESLQNLTPSDCISKLIRFRLEMQAPYISTWPQALSIQAQPVNVPTSFKQRAVLVDEIWHAAGDNASDIDWYAKRTILGGIYSTTEIYMLTDTSPDFRDTWAFLDARVKDAFDLKKTIQEAQYLAEAVSTGLGNSFQGFVGKVFQR

SEQ ID NO: 51414 - protein, 306 aa, Glycine max
  peptide (1)..(306): Ceres Seq. ID no. 14311507
  misc_feature (1)..(198): Homolog of NCBI NO: 14532534 NR Description: T29M8.1/T29M8.1 [Arabidopsis thaliana]
  misc_feature (61)..(292): Homolog of NCBI NO: 6841302 NR Description: HSPC326 [Homo sapiens]
  misc_feature (28)..(282): Homolog of NCBI NO: 34851240 NR Description: similar to Polymerase (RNA) II (DNA directed)
  misc_feature (61)..(292): Homolog of NCBI NO: 40789233 NR Description: hypothetical protein DKFZp434K046 [Homo sapiens]
  misc_feature (61)..(292): Homolog of NCBI NO: 32449799 NR Description: Unknown (protein for IMAGE:6514554) [Homo sapiens]
  misc_feature (24)..(292): Homolog of NCBI NO: 33859690 NR Description: RIKEN cDNA 2310005O14 [Mus musculus]
  misc_feature (1)..(254): Homolog of NCBI NO: 8778288 NR Description: F14D16.30 [Arabidopsis thaliana]
  misc_feature (37)..(306): Homolog of NCBI NO: 31415917 NR Description: unknown protein [Oryza sativa (japonica
  misc_feature (1)..(305): Homolog of NCBI NO: 21593282 NR Description: unknown [Arabidopsis thaliana]
  misc_feature (1)..(305): Homolog of NCBI NO: 18394701 NR Description: expressed protein [Arabidopsis thaliana]
MYRTAAKRLLCGARYYYNGNVGLRFRPPQIFIPSSRFSTSETQPLPIPHATDRTIPVVVTTETENPNSSDSSASSSPSSSSTADDATKPRAKYEDQHTRVLQASLSYVLKLGWTEAALVAGARDVGLSPSIVGSFPRKEAALVEYFMDGCLQRLADKIDSDESLQNLTPSDCISKLIRFRLEMQAPYISTWPQALSIQAQPVNVPTSFKQRAVLVDEIWHAAGDNASDIDWYAKRTILGGIYSTTEIYMLTDTSPDFRDTWAFLDARVKDAFDLKKTIQEAQYLAEAVSTGLGNSFQGFVGKVFQR

SEQ ID NO: 51415 - protein, 160 aa, Glycine max
  peptide (1)..(160): Ceres Seq. ID no. 14311508
  misc_feature (1)..(52): Homolog of NCBI NO: 14532534 NR Description: T29M8.1/T29M8.1 [Arabidopsis thaliana]
  misc_feature (1)..(146): Homolog of NCBI NO: 6841302 NR Description: HSPC326 [Homo sapiens]
  misc_feature (1)..(136): Homolog of NCBI NO: 34851240 NR Description: similar to Polymerase (RNA) II (DNA directed)
  misc_feature (1)..(146): Homolog of NCBI NO: 40789233 NR Description: hypothetical protein DKFZp434K046 [Homo sapiens]
  misc_feature (1)..(146): Homolog of NCBI NO: 32449799 NR Description: Unknown (protein for IMAGE:6514554) [Homo sapiens]
  misc_feature (1)..(146): Homolog of NCBI NO: 33859690 NR Description: RIKEN cDNA 2310005O14 [Mus musculus]
  misc_feature (1)..(108): Homolog of NCBI NO: 8778288 NR Description: F14D16.30 [Arabidopsis thaliana]
  misc_feature (1)..(160): Homolog of NCBI NO: 31415917 NR Description: unknown protein [Oryza sativa (japonica
  misc_feature (1)..(159): Homolog of NCBI NO: 21593282 NR Description: unknown [Arabidopsis thaliana]
  misc_feature (1)..(159): Homolog of NCBI NO: 18394701 NR Description: expressed protein [Arabidopsis thaliana]
MDGCLQRLADKIDSDESLQNLTPSDCISKLIRFRLEMQAPYISTWPQALSIQAQPVNVPTSFKQRAVLVDEIWHAAGDNASDIDWYAKRTILGGIYSTTEIYMLTDTSPDFRDTWAFLDARVKDAFDLKKTIQEAQYLAEAVSTGLGNSFQGFVGKVFQR

SEQ ID NO: 51416 - DNA, 1248 bp, Glycine max
  misc_feature (1)..(1248): Ceres Seq. ID no. 14311497
agagacattctccctccaaaagaatcacattctttgttttcttcttcttggccatggcttattcccgttggtgctggttcccactctacttagcagcctcaattgccctcggaatcatcgccatctcctcagcgatacgttccacttccaacaagaacccaccccaagatccacccataccccacgacatctcactcaacgcctccaacgctctccgcaaagcaggcttcatagtaatggcagatcttctccaccactctccctcattcttcaaaccgccgcaaaactcaaccatcttcgccatcaaagactccgccatcaaaaacacctcccaccctctctggttcctcaaaaccctcctcctctaccacaccaccacctccaacgcctattccttcaacgacctcgtcaaaattccccaaggaacgtgcctccccaccctccttcgtgataaaaatgtttctctcactaagcttgaccttgaccatgcaccaaactccgtggagattaatcacgtcttgatatcaaaccctaatatcttcctcggagagcaacttgccgtgcatggcgttcttgcgccgttctctccccttcagccgcaagaccttcttcaacggggttttggttttgctattcgcacacccacttgccgctccaacgacgtcaacgtctccgtttccaagaacggggttgagtggaaccgcgtcgttcacttgctccgtgcaaaagggtatgcttcgttctcgattgcgttgcattctgttcttgatgggataaagagagacttttctgggagtttgggttatgtcacaatcttcgctcctcgcgatttgactttacttggataccctttgactattcttgatagagctgtgaggcttcatattctgcctcaaaggtttgtttacaaagaaatctcttctctgccggttaggagtttgttaaagacgctcatgcctgatgagcatcttgagattgatggggttctggattttgtgccgggcatggttgttaatggtgttgtgattgtggcgcctgacatgatcatttcggagaaatttgtggttcatgggatttctagagcttttaagatggctgaggttactagttgaagatattattgaaggtcaatggagtccatacattatgatagggtcagggaaatttgtagcaattttgcttttgggtgcataagtttgtatcatttttagtttcattggataatgtacaaaacatgtatgttctcgt

SEQ ID NO: 51417 - protein, 369 aa, Glycine max
  peptide (1)..(369): Ceres Seq. ID no. 14311498
  misc_feature (28)..(367): Homolog of NCBI NO: 15240213 NR Description: hypothetical protein [Arabidopsis thaliana]
RHSPSKRITFFVFFFLAMAYSRWCWFPLYLAASIALGIIAISSAIRSTSNKNPPQDPPIPHDISLNASNALRKAGFIVMADLLHHSPSFFKPPQNSTIFAIKDSAIKNTSHPLWFLKTLLLYHTTTSNAYSFNDLVKIPQGTCLPTLLRDKNVSLTKLDLDHAPNSVEINHVLISNPNIFLGEQLAVHGVLAPFSPLQPQDLLQRGFGFAIRTPTCRSNDVNVSVSKNGVEWNRVVHLLRAKGYASFSIALHSVLDGIKRDFSGSLGYVTIFAPRDLTLLGYPLTILDRAVRLHILPQRFVYKEISSLPVRSLLKTLMPDEHLEIDGVLDFVPGMVVNGVVIVAPDMIISEKFVVHGISRAFKMAEVTS

SEQ ID NO: 51418 - protein, 352 aa, Glycine max
  peptide (1)..(352): Ceres Seq. ID no. 14311499
  misc_feature (11)..(350): Homolog of NCBI NO: 15240213 NR Description: hypothetical protein [Arabidopsis thaliana]
MAYSRWCWFPLYLAASIALGIIAISSAIRSTSNKNPPQDPPIPHDISLNASNALRKAGFIVMADLLHHSPSFFKPPQNSTIFAIKDSAIKNTSHPLWFLKTLLLYHTTTSNAYSFNDLVKIPQGTCLPTLLRDKNVSLTKLDLDHAPNSVEINHVLISNPNIFLGEQLAVHGVLAPFSPLQPQDLLQRGFGFAIRTPTCRSNDVNVSVSKNGVEWNRVVHLLRAKGYASFSIALHSVLDGIKRDFSGSLGYVTIFAPRDLTLLGYPLTILDRAVRLHILPQRFVYKEISSLPVRSLLKTLMPDEHLEIDGVLDFVPGMVVNGVVIVAPDMIISEKFVVHGISRAFKMAEVTS

SEQ ID NO: 51419 - protein, 291 aa, Glycine max
  peptide (1)..(291): Ceres Seq. ID no. 14311500
  misc_feature (1)..(289): Homolog of NCBI NO: 15240213 NR Description: hypothetical protein [Arabidopsis thaliana]
MADLLHHSPSFFKPPQNSTIFAIKDSAIKNTSHPLWFLKTLLLYHTTTSNAYSFNDLVKIPQGTCLPTLLRDKNVSLTKLDLDHAPNSVEINHVLISNPNIFLGEQLAVHGVLAPFSPLQPQDLLQRGFGFAIRTPTCRSNDVNVSVSKNGVEWNRVVHLLRAKGYASFSIALHSVLDGIKRDFSGSLGYVTIFAPRDLTLLGYPLTILDRAVRLHILPQRFVYKEISSLPVRSLLKTLMPDEHLEIDGVLDFVPGMVVNGVVIVAPDMIISEKFVVHGISRAFKMAEVTS

SEQ ID NO: 51420 - DNA, 1607 bp, Glycine max
  misc_feature (1)..(1607): Ceres Seq. ID no. 12612314
acttcattaacaacacacacacactcatgccatgatttctcaaattagcatgctttcccttttcttcttcctcttctcctcttttctaatcgttttcttcttccgcaaaacctctgcacttcacatcctcaaccaatggttcctttccttcgaaaaccgtctccaccttcaccagtccttcaaaatccctcgctataatcttcactctctggacaatagcctctaccggaaaatcctcacttacctcgattctcttccctccgttgaagattccgattacaccaacctcttctccggccccaatccctccgacatcttcctccacctcgaccctaaccacaccgttcatgacaccttcctcggcgccaggctctcctggaccaacgcctccggcgacgcgctcgtccttcgactaaagaagaaagacaagcgcagagtcttccggcagtacttccagcacattctctccgtcgcggacgagatcgagcaacgaagaanaaaggacgtcaagctgtacgtgaactccgactccggcgagtggcgctcggcgccgttcacgcatccggcgagctttgagacggtggcgatggacgcggagctgaagaacaaggtgaagtccgatctggaccagttcctgaagtcgaagcagtactaccaccggctaggccgcgtttggaagcggagctacctcctctacggcgcgcctggcaccggaaaatcctccttcgtcgccgcgatggcgaagttcctctgctacgacgtctacgacgtggacgtttcgaagttcaccgatggcgccgattggaaggtgatgctgatgcagacgacggcgaagtctctgatcgtgatcgaagacctagatcgcttgctgacggagaagtcaaagtcaaacacaacgagcttatcgagcgtgttgaacttcatggacggaatcgtatcgtgctgcggagaagagcgcgtgatggtgttcacgatgaacgaaactaaagaggaggttgatcaagcggttctgaggcctgggaggattgacgtgcacatacacttccccttatgtgatttctccacctttaagattctcgcgagtagttacttagggttgaaggagcacaagcttttccctcaggttgaggaggtttttcagaccggggcccggctcagcccggccgagcttggtgagattatgatatcgaaccggaattcgcccacgcgggccttgaaaaccgttatttcggccctgcaggtgcaatccaacggcccgagagagggacagaggttgagccatagcgggtcgggtcggaatagcgatgataacgaaccgggtgcggttatatgtagggagagtgttcacacggtgagggagttccggaagctgtatgggcttttgcgtttgggaagtaggaggaaggaggagtcttattcggggcccatagagaaagagcctccacgtattgagagtcgggtcggatataactaatcgggttttctttccttttattatttttttaaatgtaaagttgcttgcccgagttttattttttgtttttccgttagaaattatattattgtaactacacagaaagataatggtaggtcggtaaggtcgatgc

SEQ ID NO: 51421 - protein, 480 aa, Glycine max
  peptide (1)..(480): Ceres Seq. ID no. 12612315
  misc_feature (218)..(396): Pfam Name: ATPase family associated with various cellular Pfam Description: ATPase family associated with various cellular
  misc_feature (287)..(403): Homolog of NCBI NO: 7485479 NR Description: hypothetical protein F14M19.110 - Arabidopsis
  misc_feature (126)..(289): Homolog of NCBI NO: 7485479 NR Description: hypothetical protein F14M19.110 - Arabidopsis
  misc_feature (287)..(403): Homolog of NCBI NO: 18416629 NR Description: putative mitochondrial protein
  misc_feature (126)..(289): Homolog of NCBI NO: 18416629 NR Description: putative mitochondrial protein
  misc_feature (282)..(420): Homolog of NCBI NO: 15242143 NR Description: putative protein; protein id: At5g57480.1
  misc_feature (126)..(299): Homolog of NCBI NO: 15242143 NR Description: putative protein; protein id: At5g57480.1
  misc_feature (28)..(431): Homolog of NCBI NO: 34902172 NR Description: Hypothetical protein [Oryza sativa (japonica
  misc_feature (28)..(420): Homolog of NCBI NO: 37536122 NR Description: hypothetical protein [Oryza sativa (japonica
  misc_feature (36)..(462): Homolog of NCBI NO: 25354579 NR Description: hypothetical protein At2g46620 [imported] -
  misc_feature (6)..(462): Homolog of NCBI NO: 30690453 NR Description: AAA-type ATPase family [Arabidopsis thaliana]
  misc_feature (156)..(156): Xaa is any aa, unknown or other
MISQISMLSLFFFLFSSFLIVFFFRKTSALHILNQWFLSFENRLHLHQSFKIPRYNLHSLDNSLYRKILTYLDSLPSVEDSDYTNLFSGPNPSDIFLHLDPNHTVHDTFLGARLSWTNASGDALVLRLKKKDKRRVFRQYFQHILSVADEIEQRRXKDVKLYVNSDSGEWRSAPFTHPASFETVAMDAELKNKVKSDLDQFLKSKQYYHRLGRVWKRSYLLYGAPGTGKSSFVAAMAKFLCYDVYDVDVSKFTDGADWKVMLMQTTAKSLIVIEDLDRLLTEKSKSNTTSLSSVLNFMDGIVSCCGEERVMVFTMNETKEEVDQAVLRPGRIDVHIHFPLCDFSTFKILASSYLGLKEHKLFPQVEEVFQTGARLSPAELGEIMISNRNSPTRALKTVISALQVQSNGPREGQRLSHSGSGRNSDDNEPGAVICRESVHTVREFRKLYGLLRLGSRRKEESYSGPIEKEPPRIESRVGYN

SEQ ID NO: 51422 - protein, 474 aa, Glycine max
  peptide (1)..(474): Ceres Seq. ID no. 12612316
  misc_feature (212)..(390): Pfam Name: ATPase family associated with various cellular Pfam Description: ATPase family associated with various cellular
  misc_feature (281)..(397): Homolog of NCBI NO: 7485479 NR Description: hypothetical protein F14M19.110 - Arabidopsis
  misc_feature (120)..(283): Homolog of NCBI NO: 7485479 NR Description: hypothetical protein F14M19.110 - Arabidopsis
  misc_feature (281)..(397): Homolog of NCBI NO: 18416629 NR Description: putative mitochondrial protein
  misc_feature (120)..(283): Homolog of NCBI NO: 18416629 NR Description: putative mitochondrial protein
  misc_feature (276)..(414): Homolog of NCBI NO: 15242143 NR Description: putative protein; protein id: At5g57480.1
  misc_feature (120)..(293): Homolog of NCBI NO: 15242143 NR Description: putative protein; protein id: At5g57480.1
  misc_feature (22)..(425): Homolog of NCBI NO: 34902172 NR Description: Hypothetical protein [Oryza sativa (japonica
  misc_feature (22)..(414): Homolog of NCBI NO: 37536122 NR Description: hypothetical protein [Oryza sativa (japonica
  misc_feature (30)..(456): Homolog of NCBI NO: 25354579 NR Description: hypothetical protein At2g46620 [imported] -
  misc_feature (1)..(456): Homolog of NCBI NO: 30690453 NR Description: AAA-type ATPase family [Arabidopsis thaliana]
  misc_feature (150)..(150): Xaa is any aa, unknown or other
MLSLFFFLFSSFLIVFFFRKTSALHILNQWFLSFENRLHLHQSFKIPRYNLHSLDNSLYRKILTYLDSLPSVEDSDYTNLFSGPNPSDIFLHLDPNHTVHDTFLGARLSWTNASGDALVLRLKKKDKRRVFRQYFQHILSVADEIEQRRXKDVKLYVNSDSGEWRSAPFTHPASFETVAMDAELKNKVKSDLDQFLKSKQYYHRLGRVWKRSYLLYGAPGTGKSSFVAAMAKFLCYDVYDVDVSKFTDGADWKVMLMQTTAKSLIVIEDLDRLLTEKSKSNTTSLSSVLNFMDGIVSCCGEERVMVFTMNETKEEVDQAVLRPGRIDVHIHFPLCDFSTFKILASSYLGLKEHKLFPQVEEVFQTGARLSPAELGEIMISNRNSPTRALKTVISALQVQSNGPREGQRLSHSGSGRNSDDNEPGAVICRESVHTVREFRKLYGLLRLGSRRKEESYSGPIEKEPPRIESRVGYN

SEQ ID NO: 51423 - protein, 295 aa, Glycine max
  peptide (1)..(295): Ceres Seq. ID no. 12612317
  misc_feature (33)..(211): Pfam Name: ATPase family associated with various cellular Pfam Description: ATPase family associated with various cellular
  misc_feature (102)..(218): Homolog of NCBI NO: 7485479 NR Description: hypothetical protein F14M19.110 - Arabidopsis
  misc_feature (1)..(104): Homolog of NCBI NO: 7485479 NR Description: hypothetical protein F14M19.110 - Arabidopsis
  misc_feature (102)..(218): Homolog of NCBI NO: 18416629 NR Description: putative mitochondrial protein
  misc_feature (1)..(104): Homolog of NCBI NO: 18416629 NR Description: putative mitochondrial protein
  misc_feature (97)..(235): Homolog of NCBI NO: 15242143 NR Description: putative protein; protein id: At5g57480.1
  misc_feature (1)..(114): Homolog of NCBI NO: 15242143 NR Description: putative protein; protein id: At5g57480.1
  misc_feature (1)..(246): Homolog of NCBI NO: 34902172 NR Description: Hypothetical protein [Oryza sativa (japonica
  misc_feature (1)..(235): Homolog of NCBI NO: 37536122 NR Description: hypothetical protein [Oryza sativa (japonica
  misc_feature (1)..(277): Homolog of NCBI NO: 25354579 NR Description: hypothetical protein At2g46620 [imported] -
  misc_feature (1)..(277): Homolog of NCBI NO: 30690453 NR Description: AAA-type ATPase family [Arabidopsis thaliana]
MDAELKNKVKSDLDQFLKSKQYYHRLGRVWKRSYLLYGAPGTGKSSFVAAMAKFLCYDVYDVDVSKFTDGADWKVMLMQTTAKSLIVIEDLDRLLTEKSKSNTTSLSSVLNFMDGIVSCCGEERVMVFTMNETKEEVDQAVLRPGRIDVHIHFPLCDFSTFKILASSYLGLKEHKLFPQVEEVFQTGARLSPAELGEIMISNRNSPTRALKTVISALQVQSNGPREGQRLSHSGSGRNSDDNEPGAVICRESVHTVREFRKLYGLLRLGSRRKEESYSGPIEKEPPRIESRVGYN

SEQ ID NO: 51424 - DNA, 1352 bp, Glycine max
  misc_feature (1)..(1352): Ceres Seq. ID no. 13581804
agttcacaccctagagggagtggatggattttgttgtttttcatataagggcaaagaaagatagaggagctagctagctagcgagcttcaaaactcaaaagcactgacacatacaaacaaaaagatctggctttcataaaattgagataaaagtgcaccgtctccgaatcatgtttataatattatcttcattagatcttgatctcatttttcatctgaaactaaaagaatatatatgtgcctttaccctatttagctatatgcacacacaacttgtcacatatcatattttgttcatcaagtttataattccttatctttgaacttacttacatccaagtaaggtctaagctagctggagttgattagatctagctagctagttttcgatctgcttaatttgttttccatgatctcttatatatagtaattttatttccctttaattaattaagaaagagttgaagaagaatgggaagggggaagatcgaaatcaaaaggattgagaacacaacaaatcggcaagtgaccttctgcaagagaagaaatgggcttctgaagaaagcttatgagctgtcagtgctgtgtgatgcagaagttgccctcatcgtcttctccagccgtggccgtctctatgagtattccaacaacaacataagatcaacaatagagaggtacaaaaaggcatgttctgatcactcaagcgcgagcactaccacagaaatcaatgctcagtattatcaacaagaatctgcaaagctgcgacagcaaatacagatgctgcaaaattctaacaggcacctgatgggtgatgccttaagcacactgactgtgaaggaacttaagcagttggagaatagacttgaaagaggaatcactagaatcagatctaagaaacatgagatgctactggctgaaattgaatacttccagaaaagggagattgaactggaaaatgaaaatctttgcctccgaactaagataactgacgtggagaggattcagcaagtaaacatggtttctgggccagaactgaatgccattcaggcattagcttcccgtaacttcttcaatccaaatatgttggaaggtggaactgtttaccctcactcagataagaagattcttcatcttgggtgatcaataatatatgatcttggctagcctatggcatgtctatccaattagccggtggctaaatgcattattattactactcttttggttgctcattaactagaccatgtgatctatatactacttatggattatggatacttatgtatgatgattgtatgatatcataacaatcagttagaaataataattaaaaaatagagttgtgtttgaag

SEQ ID NO: 51425 - protein, 222 aa, Glycine max
  peptide (1)..(222): Ceres Seq. ID no. 13581805
  misc_feature (74)..(173): Pfam Name: K-box region Pfam Description: K-box region
  misc_feature (1)..(221): Homolog of NCBI NO: 1067169 NR Description: floral binding protein number 7 [Petunia x
  misc_feature (1)..(221): Homolog of NCBI NO: 1568513 NR Description: fbp11 [Petunia x hybrida]
  misc_feature (1)..(222): Homolog of NCBI NO: 21955182 NR Description: transcription factor MADS1 [Hyacinthus orientalis]
  misc_feature (1)..(222): Homolog of NCBI NO: 29467048 NR Description: MADS-box transcription factor AG [Agapanthus
  misc_feature (1)..(222): Homolog of NCBI NO: 15234874 NR Description: MADS-box protein [Arabidopsis thaliana]
  misc_feature (1)..(222): Homolog of NCBI NO: 20385590 NR Description: MADS-box protein 5 [Vitis vinifera]
  misc_feature (1)..(222): Homolog of NCBI NO: 7446521 NR Description: MADS-box protein - cucumber
  misc_feature (1)..(222): Homolog of NCBI NO: 4103342 NR Description: agamous-like putative transcription factor
  misc_feature (1)..(222): Homolog of NCBI NO: 27763670 NR Description: mads-box transcription factor [Momordica
  misc_feature (1)..(222): Homolog of NCBI NO: 23194453 NR Description: MADS box protein GHMADS-2 [Gossypium hirsutum]
MGRGKIEIKRIENTTNRQVTFCKRRNGLLKKAYELSVLCDAEVALIVFSSRGRLYEYSNNNIRSTIERYKKACSDHSSASTTTEINAQYYQQESAKLRQQIQMLQNSNRHLMGDALSTLTVKELKQLENRLERGITRIRSKKHEMLLAEIEYFQKREIELENENLCLRTKITDVERIQQVNMVSGPELNAIQALASRNFFNPNMLEGGTVYPHSDKKILHLG

SEQ ID NO: 51426 - protein, 120 aa, Glycine max
  peptide (1)..(120): Ceres Seq. ID no. 13581806
  misc_feature (1)..(71): Pfam Name: K-box region Pfam Description: K-box region
  misc_feature (1)..(119): Homolog of NCBI NO: 1067169 NR Description: floral binding protein number 7 [Petunia x
  misc_feature (1)..(119): Homolog of NCBI NO: 1568513 NR Description: fbp11 [Petunia x hybrida]
  misc_feature (1)..(120): Homolog of NCBI NO: 21955182 NR Description: transcription factor MADS1 [Hyacinthus orientalis]
  misc_feature (1)..(120): Homolog of NCBI NO: 29467048 NR Description: MADS-box transcription factor AG [Agapanthus
  misc_feature (1)..(120): Homolog of NCBI NO: 15234874 NR Description: MADS-box protein [Arabidopsis thaliana]
  misc_feature (1)..(120): Homolog of NCBI NO: 20385590 NR Description: MADS-box protein 5 [Vitis vinifera]
  misc_feature (1)..(120): Homolog of NCBI NO: 7446521 NR Description: MADS-box protein - cucumber
  misc_feature (1)..(120): Homolog of NCBI NO: 4103342 NR Description: agamous-like putative transcription factor
  misc_feature (1)..(120): Homolog of NCBI NO: 27763670 NR Description: mads-box transcription factor [Momordica
  misc_feature (1)..(120): Homolog of NCBI NO: 23194453 NR Description: MADS box protein GHMADS-2 [Gossypium hirsutum]
MLQNSNRHLMGDALSTLTVKELKQLENRLERGITRIRSKKHEMLLAEIEYFQKREIELENENLCLRTKITDVERIQQVNMVSGPELNAIQALASRNFFNPNMLEGGTVYPHSDKKILHLG

SEQ ID NO: 51427 - protein, 111 aa, Glycine max
  peptide (1)..(111): Ceres Seq. ID no. 13581807
  misc_feature (1)..(62): Pfam Name: K-box region Pfam Description: K-box region
  misc_feature (1)..(110): Homolog of NCBI NO: 1067169 NR Description: floral binding protein number 7 [Petunia x
  misc_feature (1)..(110): Homolog of NCBI NO: 1568513 NR Description: fbp11 [Petunia x hybrida]
  misc_feature (1)..(111): Homolog of NCBI NO: 21955182 NR Description: transcription factor MADS1 [Hyacinthus orientalis]
  misc_feature (1)..(111): Homolog of NCBI NO: 29467048 NR Description: MADS-box transcription factor AG [Agapanthus
  misc_feature (1)..(111): Homolog of NCBI NO: 15234874 NR Description: MADS-box protein [Arabidopsis thaliana]
  misc_feature (1)..(111): Homolog of NCBI NO: 20385590 NR Description: MADS-box protein 5 [Vitis vinifera]
  misc_feature (1)..(111): Homolog of NCBI NO: 7446521 NR Description: MADS-box protein - cucumber
  misc_feature (1)..(111): Homolog of NCBI NO: 4103342 NR Description: agamous-like putative transcription factor
  misc_feature (1)..(111): Homolog of NCBI NO: 27763670 NR Description: mads-box transcription factor [Momordica
  misc_feature (1)..(111): Homolog of NCBI NO: 23194453 NR Description: MADS box protein GHMADS-2 [Gossypium hirsutum]
MGDALSTLTVKELKQLENRLERGITRIRSKKHEMLLAEIEYFQKREIELENENLCLRTKITDVERIQQVNMVSGPELNAIQALASRNFFNPNMLEGGTVYPHSDKKILHLG

SEQ ID NO: 51428 - DNA, 1577 bp, Glycine max
  misc_feature (1)..(1577): Ceres Seq. ID no. 15171275
aactactgtacagagttcatatcaatctcatcatattatatagagcaccaacttatcttcaaaactcattcataactaaaatccttccattccttccttccacaaaccctatcctattaccagacaaacctcattttcaggctttttctgttactctgcaccataccacttcactcatcacaattcacaaacccatagagaaaggaaaagctttttttttatttttttatctgggtcaccctacacaaccttgctgaatggaaaactgtgtcttccaccaccaccaccatcaccttaggagcatgatcactcttccacaaccatcttcactgaaaccgaacttgagagtgtgccccaaagttatgagggtgagagcgagcgcgggaaggaggcactgcgagttcagcagccagaacgcgccccttgagccacggtccctggcggggaagtttctgagcggcgtgttgcagaaccgccgccagctgttccacgtgcttgccaaggaagagttgaagatgctgagtgatgacagagactctgctattgctcgcatgcgtctcagtcaccactctgatgaagccttgcttcacaggaggattgcacaagtgaaagagaatgagtctatgattgctatagaagatgttatgtatttgctgattttatacaagttttccgagatcagggttcatttggttccaaagctttctagttgcatatacaatggaaggctagaaatattgccctctaaggactgggatctagagtctattcacagcatggaggttttggatatcataaggaaacacgtcagtaccgtgacaggtttgagatcaaatcctagtgtaagggagagttgggaaacgactcctattcgacaattctggcttgcccgagtctatgtcgcctccatattatatggctactttttgaagtcagtttcattgaggtacaacctagagcgaagtctgtctttgtctgaccatgatcttcatcatggtcacaagaccggcccttcatttcaggacatgtatcgttccgggccaaaagacgtgatgcttggcaacaagagtgacatacgatctgtgtggcatggtttaatcgggcaggaagaggaaatcgaggatttaacatgttatgttacgggctttcaccctggatcatttgagagatgtgccaaactgagatccaaggaagctgtgcatttggtagagagtcatagtaatgcactttttggagatgggaaatctggtttgtctcagcatgatgatgttattgtaacttcattttctagtctgaggaggctagtcttggaagctgttgcttttggatctttcctgtgggagacagaagattacattgacaatgtatataagcttaaagatcaagtggttgagtgaaggaacatgttggtaaatgaatttccacactgttgggctaattctcattgtatataaagttagttagatttaggctaattttattttgtataggatgcattacctctaaataatgtaggttggttagctaagaaagaatggagatagagattttacatagtgacaaagaatgtccttatg

SEQ ID NO: 51429 - protein, 379 aa, Glycine max
  peptide (1)..(379): Ceres Seq. ID no. 15171276
  misc_feature (36)..(274): Pfam Name: Protein of unknown function (DUF760) Pfam Description: Protein of unknown function (DUF760)
  misc_feature (54)..(371): Homolog of NCBI NO: 32489097 NR Description: OSJNBa0093F12.3 [Oryza sativa (japonica
  misc_feature (19)..(371): Homolog of NCBI NO: 18398302 NR Description: expressed protein [Arabidopsis thaliana]
  misc_feature (50)..(371): Homolog of NCBI NO: 28301943 NR Description: unknown protein [Oryza sativa (japonica
  misc_feature (19)..(371): Homolog of NCBI NO: 15221185 NR Description: expressed protein [Arabidopsis thaliana]
  misc_feature (38)..(371): Homolog of NCBI NO: 18401645 NR Description: expressed protein [Arabidopsis thaliana]
  misc_feature (38)..(371): Homolog of NCBI NO: 17064820 NR Description: Unknown protein [Arabidopsis thaliana]
  misc_feature (288)..(375): Homolog of NCBI NO: 15239021 NR Description: expressed protein [Arabidopsis thaliana]
  misc_feature (51)..(250): Homolog of NCBI NO: 15239021 NR Description: expressed protein [Arabidopsis thaliana]
  misc_feature (288)..(375): Homolog of NCBI NO: 18397912 NR Description: expressed protein [Arabidopsis thaliana]
  misc_feature (36)..(274): Homolog of NCBI NO: 18397912 NR Description: expressed protein [Arabidopsis thaliana]
MENCVFHHHHHHLRSMITLPQPSSLKPNLRVCPKVMRVRASAGRRHCEFSSQNAPLEPRSLAGKFLSGVLQNRRQLFHVLAKEELKMLSDDRDSAIARMRLSHHSDEALLHRRIAQVKENESMIAIEDVMYLLILYKFSEIRVHLVPKLSSCIYNGRLEILPSKDWDLESIHSMEVLDIIRKHVSTVTGLRSNPSVRESWETTPIRQFWLARVYVASILYGYFLKSVSLRYNLERSLSLSDHDLHHGHKTGPSFQDMYRSGPKDVMLGNKSDIRSVWHGLIGQEEEIEDLTCYVTGFHPGSFERCAKLRSKEAVHLVESHSNALFGDGKSGLSQHDDVIVTSFSSLRRLVLEAVAFGSFLWETEDYIDNVYKLKDQVVE

SEQ ID NO: 51430 - protein, 364 aa, Glycine max
  peptide (1)..(364): Ceres Seq. ID no. 15171277
  misc_feature (21)..(259): Pfam Name: Protein of unknown function (DUF760) Pfam Description: Protein of unknown function (DUF760)
  misc_feature (39)..(356): Homolog of NCBI NO: 32489097 NR Description: OSJNBa0093F12.3 [Oryza sativa (japonica
  misc_feature (4)..(356): Homolog of NCBI NO: 18398302 NR Description: expressed protein [Arabidopsis thaliana]
  misc_feature (35)..(356): Homolog of NCBI NO: 28301943 NR Description: unknown protein [Oryza sativa (japonica
  misc_feature (4)..(356): Homolog of NCBI NO: 15221185 NR Description: expressed protein [Arabidopsis thaliana]
  misc_feature (23)..(356): Homolog of NCBI NO: 18401645 NR Description: expressed protein [Arabidopsis thaliana]
  misc_feature (23)..(356): Homolog of NCBI NO: 17064820 NR Description: Unknown protein [Arabidopsis thaliana]
  misc_feature (273)..(360): Homolog of NCBI NO: 15239021 NR Description: expressed protein [Arabidopsis thaliana]
  misc_feature (36)..(235): Homolog of NCBI NO: 15239021 NR Description: expressed protein [Arabidopsis thaliana]
  misc_feature (273)..(360): Homolog of NCBI NO: 18397912 NR Description: expressed protein [Arabidopsis thaliana]
  misc_feature (21)..(259): Homolog of NCBI NO: 18397912 NR Description: expressed protein [Arabidopsis thaliana]
MITLPQPSSLKPNLRVCPKVMRVRASAGRRHCEFSSQNAPLEPRSLAGKFLSGVLQNRRQLFHVLAKEELKMLSDDRDSAIARMRLSHHSDEALLHRRIAQVKENESMIAIEDVMYLLILYKFSEIRVHLVPKLSSCIYNGRLEILPSKDWDLESIHSMEVLDIIRKHVSTVTGLRSNPSVRESWETTPIRQFWLARVYVASILYGYFLKSVSLRYNLERSLSLSDHDLHHGHKTGPSFQDMYRSGPKDVMLGNKSDIRSVWHGLIGQEEEIEDLTCYVTGFHPGSFERCAKLRSKEAVHLVESHSNALFGDGKSGLSQHDDVIVTSFSSLRRLVLEAVAFGSFLWETEDYIDNVYKLKDQVVE

SEQ ID NO: 51431 - protein, 344 aa, Glycine max
  peptide (1)..(344): Ceres Seq. ID no. 15171278
  misc_feature (1)..(239): Pfam Name: Protein of unknown function (DUF760) Pfam Description: Protein of unknown function (DUF760)
  misc_feature (19)..(336): Homolog of NCBI NO: 32489097 NR Description: OSJNBa0093F12.3 [Oryza sativa (japonica
  misc_feature (1)..(336): Homolog of NCBI NO: 18398302 NR Description: expressed protein [Arabidopsis thaliana]
  misc_feature (15)..(336): Homolog of NCBI NO: 28301943 NR Description: unknown protein [Oryza sativa (japonica
  misc_feature (1)..(336): Homolog of NCBI NO: 15221185 NR Description: expressed protein [Arabidopsis thaliana]
  misc_feature (3)..(336): Homolog of NCBI NO: 18401645 NR Description: expressed protein [Arabidopsis thaliana]
  misc_feature (3)..(336): Homolog of NCBI NO: 17064820 NR Description: Unknown protein [Arabidopsis thaliana]
  misc_feature (253)..(340): Homolog of NCBI NO: 15239021 NR Description: expressed protein [Arabidopsis thaliana]
  misc_feature (16)..(215): Homolog of NCBI NO: 15239021 NR Description: expressed protein [Arabidopsis thaliana]
  misc_feature (253)..(340): Homolog of NCBI NO: 18397912 NR Description: expressed protein [Arabidopsis thaliana]
  misc_feature (1)..(239): Homolog of NCBI NO: 18397912 NR Description: expressed protein [Arabidopsis thaliana]
MRVRASAGRRHCEFSSQNAPLEPRSLAGKFLSGVLQNRRQLFHVLAKEELKMLSDDRDSAIARMRLSHHSDEALLHRRIAQVKENESMIAIEDVMYLLILYKFSEIRVHLVPKLSSCIYNGRLEILPSKDWDLESIHSMEVLDIIRKHVSTVTGLRSNPSVRESWETTPIRQFWLARVYVASILYGYFLKSVSLRYNLERSLSLSDHDLHHGHKTGPSFQDMYRSGPKDVMLGNKSDIRSVWHGLIGQEEEIEDLTCYVTGFHPGSFERCAKLRSKEAVHLVESHSNALFGDGKSGLSQHDDVIVTSFSSLRRLVLEAVAFGSFLWETEDYIDNVYKLKDQVVE

SEQ ID NO: 51432 - DNA, 1556 bp, Glycine max
  misc_feature (1)..(1556): Ceres Seq. ID no. 14311557
aaaataaaacacaagaacgagctcaccaaagcgatttacaccgcagaaagacacgaaatattactaataatttaatagagttagttgcgacgaggattagtattgaagtggagtgttgagtaacagtaattttacagactcagcgatgcaaatgaaatggcaacaagtcgcaaagatgagtgatatcttctgctgcagataggaccaacaattcttttgttcttttctttctgttttccccaaattaagcataagattgcgtgccatagttatttccagcatcatcatcatcatcatcatggcattgggaagagtaatatacgttgctcacaccgtatgtatcagatcagagcttcaacccatggcacctgaccgcattggttcttcctcttcttctcgccaaagggacctcgttttcgtcgtcaaccctctaggtgctaatgggaggacaggtaaagaatggaggaagttagttccatatctacggtctcgtcttggtaaagagtgcaatatatgtgaatccataacgtcgggtccttgtcatgctattgacataacaagagaggctataagggagggggctgatgctgtcattgctgttggaggagatggaactcttcatgaggttgttaatgggtttttctgggctggaaaacctgttgttagtcaagtgaaagagtctacacactcaactgctcttagtctcatccccttgggaactggttctgattttgcaagaacatttgggtggaaaaatgatccccatgaggccattgaacgtgttgctagagggttgagatcaatgatagatgtcggtgttatcactggagagagttgcgaccatcattacttcataaatgtcgctgacattcatttgagtgcaaaggcgggtttttatgcttctagatacaagagatttggcaacctgtgctatgtcattggtgcattgcaagccttcattgggcatcaaaaccaggacatgagaatcaggttcaatgatggtccatgggagacatgtcctcaagtgacagccctttgcattggaaatgcaaaatactttggtggtggcatgaaaattacaccaaatgctgatcctttcagtagaaatttagaggttgtaactcttcagaacttcaagtggtatgattttgtcttcaaattacataagctatacagtgggacacatctctcagtaaaaaatgtatctgatagaagtgtactttctattgaggtggaggacatatcaggcatgggtggtggtatttatattcaatctgatggggagcatttggggttccttccaaaaaagattagtgttgtgcctgctgctattgagatgatattgtgatttaactggagaaggacagaatctgtgaaatagagatgatgctgttcatgccttgtaatttgccagatttagtagaagaaataattttttgttttaaagtgtgtaggcatcggagtaggcttcttactatcttttgctgtggcctgagggagagtaattgtaattttgaatcaccaatgtgttgtcatataatttattttccaactgt

SEQ ID NO: 51433 - protein, 349 aa, Glycine max
  peptide (1)..(349): Ceres Seq. ID no. 14311558
  misc_feature (37)..(178): Pfam Name: Diacylglycerol kinase catalytic domain (presumed) Pfam Description: Diacylglycerol kinase catalytic domain
  misc_feature (40)..(348): Homolog of NCBI NO: 27365613 NR Description: Conserved hypothetical protein [Vibrio vulnificus
  misc_feature (40)..(348): Homolog of NCBI NO: 21674385 NR Description: BmrU protein [Chlorobium tepidum TLS]
  misc_feature (134)..(349): Homolog of NCBI NO: 17230373 NR Description: hypothetical protein [Nostoc sp. PCC 7120]
  misc_feature (41)..(348): Homolog of NCBI NO: 15609389 NR Description: hypothetical protein Rv2252 [Mycobacterium
  misc_feature (41)..(348): Homolog of NCBI NO: 15614516 NR Description: BH1953~unknown conserved protein [Bacillus
  misc_feature (38)..(349): Homolog of NCBI NO: 15643126 NR Description: conserved hypothetical protein [Thermotoga
  misc_feature (27)..(349): Homolog of NCBI NO: 33413155 NR Description: hypothetical protein [Thermotoga sp. RQ2]
  misc_feature (41)..(347): Homolog of NCBI NO: 13472344 NR Description: hypothetical protein [Mesorhizobium loti]
  misc_feature (31)..(195): Homolog of NCBI NO: 14423554 NR Description: Unknown protein [Arabidopsis thaliana]
  misc_feature (31)..(348): Homolog of NCBI NO: 18406971 NR Description: expressed protein [Arabidopsis thaliana]
MALGRVIYVAHTVCIRSELQPMAPDRIGSSSSSRQRDLVFVVNPLGANGRTGKEWRKLVPYLRSRLGKECNICESITSGPCHAIDITREAIREGADAVIAVGGDGTLHEVVNGFFWAGKPVVSQVKESTHSTALSLIPLGTGSDFARTFGWKNDPHEAIERVARGLRSMIDVGVITGESCDHHYFINVADIHLSAKAGFYASRYKRFGNLCYVIGALQAFIGHQNQDMRIRFNDGPWETCPQVTALCIGNAKYFGGGMKITPNADPFSRNLEVVTLQNFKWYDFVFKLHKLYSGTHLSVKNVSDRSVLSIEVEDISGMGGGIYIQSDGEHLGFLPKKISVVPAAIEMIL

SEQ ID NO: 51434 - protein, 328 aa, Glycine max
  peptide (1)..(328): Ceres Seq. ID no. 14311559
  misc_feature (16)..(157): Pfam Name: Diacylglycerol kinase catalytic domain (presumed) Pfam Description: Diacylglycerol kinase catalytic domain
  misc_feature (19)..(327): Homolog of NCBI NO: 27365613 NR Description: Conserved hypothetical protein [Vibrio vulnificus
  misc_feature (19)..(327): Homolog of NCBI NO: 21674385 NR Description: BmrU protein [Chlorobium tepidum TLS]
  misc_feature (113)..(328): Homolog of NCBI NO: 17230373 NR Description: hypothetical protein [Nostoc sp. PCC 7120]
  misc_feature (20)..(327): Homolog of NCBI NO: 15609389 NR Description: hypothetical protein Rv2252 [Mycobacterium
  misc_feature (20)..(327): Homolog of NCBI NO: 15614516 NR Description: BH1953~unknown conserved protein [Bacillus
  misc_feature (17)..(328): Homolog of NCBI NO: 15643126 NR Description: conserved hypothetical protein [Thermotoga
  misc_feature (6)..(328): Homolog of NCBI NO: 33413155 NR Description: hypothetical protein [Thermotoga sp. RQ2]
  misc_feature (20)..(326): Homolog of NCBI NO: 13472344 NR Description: hypothetical protein [Mesorhizobium loti]
  misc_feature (10)..(174): Homolog of NCBI NO: 14423554 NR Description: Unknown protein [Arabidopsis thaliana]
  misc_feature (10)..(327): Homolog of NCBI NO: 18406971 NR Description: expressed protein [Arabidopsis thaliana]
MAPDRIGSSSSSRQRDLVFVVNPLGANGRTGKEWRKLVPYLRSRLGKECNICESITSGPCHAIDITREAIREGADAVIAVGGDGTLHEVVNGFFWAGKPVVSQVKESTHSTALSLIPLGTGSDFARTFGWKNDPHEAIERVARGLRSMIDVGVITGESCDHHYFINVADIHLSAKAGFYASRYKRFGNLCYVIGALQAFIGHQNQDMRIRFNDGPWETCPQVTALCIGNAKYFGGGMKITPNADPFSRNLEVVTLQNFKWYDFVFKLHKLYSGTHLSVKNVSDRSVLSIEVEDISGMGGGIYIQSDGEHLGFLPKKISVVPAAIEMIL

SEQ ID NO: 51435 - protein, 181 aa, Glycine max
  peptide (1)..(181): Ceres Seq. ID no. 14311560
  misc_feature (1)..(180): Homolog of NCBI NO: 27365613 NR Description: Conserved hypothetical protein [Vibrio vulnificus
  misc_feature (1)..(180): Homolog of NCBI NO: 21674385 NR Description: BmrU protein [Chlorobium tepidum TLS]
  misc_feature (1)..(181): Homolog of NCBI NO: 17230373 NR Description: hypothetical protein [Nostoc sp. PCC 7120]
  misc_feature (1)..(180): Homolog of NCBI NO: 15609389 NR Description: hypothetical protein Rv2252 [Mycobacterium
  misc_feature (1)..(180): Homolog of NCBI NO: 15614516 NR Description: BH1953~unknown conserved protein [Bacillus
  misc_feature (1)..(181): Homolog of NCBI NO: 15643126 NR Description: conserved hypothetical protein [Thermotoga
  misc_feature (1)..(181): Homolog of NCBI NO: 33413155 NR Description: hypothetical protein [Thermotoga sp. RQ2]
  misc_feature (1)..(179): Homolog of NCBI NO: 13472344 NR Description: hypothetical protein [Mesorhizobium loti]
  misc_feature (1)..(27): Homolog of NCBI NO: 14423554 NR Description: Unknown protein [Arabidopsis thaliana]
  misc_feature (1)..(180): Homolog of NCBI NO: 18406971 NR Description: expressed protein [Arabidopsis thaliana]
MIDVGVITGESCDHHYFINVADIHLSAKAGFYASRYKRFGNLCYVIGALQAFIGHQNQDMRIRFNDGPWETCPQVTALCIGNAKYFGGGMKITPNADPFSRNLEVVTLQNFKWYDFVFKLHKLYSGTHLSVKNVSDRSVLSIEVEDISGMGGGIYIQSDGEHLGFLPKKISVVPAAIEMIL

SEQ ID NO: 51436 - DNA, 1106 bp, Glycine max
  misc_feature (1)..(1106): Ceres Seq. ID no. 13638510
acatcctaatcgaaaaaaaaatcagaaggcatcatggcagccaaagcaaaaggaaggggttggcttacaataaagaatgggagaaaaggaaagaagcacgttgccaaccccatcttagtagattcacatacttcagcagcaaaagcctcttcttcttcttcttcttcttcttcactctcttcacaaatgaaaatactttgctctcttcctccaactctctcatactttcacttttctttgttcatgcaagatccaaagaacgattcaaacacaaggaagccatggtaccaaagagcaattgaggtgactagcctatggaaaagtgtatcaaaatccacagaaattccaacacctaattcttcaactttatggaagagatcatcatcaatgccaaaatcccctcaagtccctactacaccaagtcctaacaacaagaacaagctaagaaaatgtgcctctctaaaggttgcatcatccttcacaagggtttgtctttgtgctccaatctattcctacaacgagattttaagagctgaggtgccacctagaagaagcaatagttatccaagatcaaagccattgcatgcttcacatgagagaactcctagtgctagacttagcactgagggaaggagggtatttaggggcaaatcattgactgatgatgttctaataaggaggtttgtgattgaggaagaggcaatgatgcaaattagaagaagaaatcaaatggaagttattaggaagaggagtatgatgaggagaaaaaagcttgggcctagtcctcttagtagaatggttatggcaaatgatattggacaattttaatttgattggtccaatttggttagtgtccagtcccattggtgaattttgattctccatattaatgcctcacctttcccttttttttttctttggccttaatttcattcactgaactttttcacctcgtgtgacaagtttctactactgggattatcttataattgcaacatatctttagttttagaagacccaattttaagtgggtttgatttaatgatattgctatgtatagctccgatcagaatcacaacttttaatttcatttctatattcattcc

SEQ ID NO: 51437 - protein, 264 aa, Glycine max
  peptide (1)..(264): Ceres Seq. ID no. 13638511
  misc_feature (78)..(258): Homolog of NCBI NO: 21740779 NR Description: OSJNBa0067K08.20 [Oryza sativa (japonica
  misc_feature (175)..(258): Homolog of NCBI NO: 34905624 NR Description: hypothetical protein [Oryza sativa (japonica
  misc_feature (78)..(186): Homolog of NCBI NO: 34905624 NR Description: hypothetical protein [Oryza sativa (japonica
  misc_feature (73)..(260): Homolog of NCBI NO: 11288883 NR Description: hypothetical protein T16L24.230 - Arabidopsis
  misc_feature (61)..(260): Homolog of NCBI NO: 30695040 NR Description: expressed protein [Arabidopsis thaliana]
MAAKAKGRGWLTIKNGRKGKKHVANPILVDSHTSAAKASSSSSSSSSLSSQMKILCSLPPTLSYFHFSLFMQDPKNDSNTRKPWYQRAIEVTSLWKSVSKSTEIPTPNSSTLWKRSSSMPKSPQVPTTPSPNNKNKLRKCASLKVASSFTRVCLCAPIYSYNEILRAEVPPRRSNSYPRSKPLHASHERTPSARLSTEGRRVFRGKSLTDDVLIRRFVIEEEAMMQIRRRNQMEVIRKRSMMRRKKLGPSPLSRMVMANDIGQF

SEQ ID NO: 51438 - protein, 213 aa, Glycine max
  peptide (1)..(213): Ceres Seq. ID no. 13638512
  misc_feature (27)..(207): Homolog of NCBI NO: 21740779 NR Description: OSJNBa0067K08.20 [Oryza sativa (japonica
  misc_feature (124)..(207): Homolog of NCBI NO: 34905624 NR Description: hypothetical protein [Oryza sativa (japonica
  misc_feature (27)..(135): Homolog of NCBI NO: 34905624 NR Description: hypothetical protein [Oryza sativa (japonica
  misc_feature (22)..(209): Homolog of NCBI NO: 11288883 NR Description: hypothetical protein T16L24.230 - Arabidopsis
  misc_feature (10)..(209): Homolog of NCBI NO: 30695040 NR Description: expressed protein [Arabidopsis thaliana]
MKILCSLPPTLSYFHFSLFMQDPKNDSNTRKPWYQRAIEVTSLWKSVSKSTEIPTPNSSTLWKRSSSMPKSPQVPTTPSPNNKNKLRKCASLKVASSFTRVCLCAPIYSYNEILRAEVPPRRSNSYPRSKPLHASHERTPSARLSTEGRRVFRGKSLTDDVLIRRFVIEEEAMMQIRRRNQMEVIRKRSMMRRKKLGPSPLSRMVMANDIGQF

SEQ ID NO: 51439 - protein, 194 aa, Glycine max
  peptide (1)..(194): Ceres Seq. ID no. 13638513
  misc_feature (8)..(188): Homolog of NCBI NO: 21740779 NR Description: OSJNBa0067K08.20 [Oryza sativa (japonica
  misc_feature (105)..(188): Homolog of NCBI NO: 34905624 NR Description: hypothetical protein [Oryza sativa (japonica
  misc_feature (8)..(116): Homolog of NCBI NO: 34905624 NR Description: hypothetical protein [Oryza sativa (japonica
  misc_feature (3)..(190): Homolog of NCBI NO: 11288883 NR Description: hypothetical protein T16L24.230 - Arabidopsis
  misc_feature (1)..(190): Homolog of NCBI NO: 30695040 NR Description: expressed protein [Arabidopsis thaliana]
MQDPKNDSNTRKPWYQRAIEVTSLWKSVSKSTEIPTPNSSTLWKRSSSMPKSPQVPTTPSPNNKNKLRKCASLKVASSFTRVCLCAPIYSYNEILRAEVPPRRSNSYPRSKPLHASHERTPSARLSTEGRRVFRGKSLTDDVLIRRFVIEEEAMMQIRRRNQMEVIRKRSMMRRKKLGPSPLSRMVMANDIGQF

SEQ ID NO: 51440 - DNA, 1189 bp, Glycine max
  misc_feature (1)..(1189): Ceres Seq. ID no. 14311493
attcttttcactttttgggtcctcttcttctctctctcaatttaaatatcactctcctctcccctccaccacgactagtaaataaatggatccctcgtccgtgaacggcttctactcgttcctgacgctgggaatcgacgatctagagagagtgttcctgagcacaaacttcatgtcaatccaattcctccaaagagtggtctctgttctaagatcgttccacacccaattgaccctcctggtccagaaactccagctcccagtgggcgacaagtggctggacgagtacatggacgaaagctccaaactctgggacgcctgccacctcatcaagtccggcatttcggccatggatagctactactctgccgccctcaacatcacctcctccctcgactcccatcgccacatcaccccccaagtctctcgccaggtaataagggccattgccgggtgccgtcgggaggcggtggggctggaggaggagaacagggcgctgatggaggcgcggattgaggccttgtcgcttcggttccaagagaggctgtccatcgagtccaagctgaacggcttcaacggcttcagaggggtgctgtacgcaatgaggaacgtgagttcgttgctgctcatggtacttctgtacggactcgtgtactgctatggggactcctcggacttcgtgttgggcggttgcgggtacgaggggtgcctgttcctgggatcggcgttcatgatgtcgacggccaggttgcagcagcgggtggcggcggagatcgggcacatgggcggctcgccggggatgcttctgcacgagtttcggaggtcgaaggtggccatggaggagctgagaggggagttagagagaagagggtcagggtctcagggagtggagtgggagagtgaggttgctattagagagagagtggagaatctcagaacgtgttttggggttctcagatctggggcagacaacattgttgctcagcttgatgatttctttgacgagattgtggaagggaggaagaggcttttggacttttgcagtcataggtgactcagccaattcaaaatgaaataggtgtcttggctgcctacaaaaaatagaaacaaagacaaggtagaagaatagttgatggggttgttgtaccttttattaaccctttctttaattattattattgttattatc

SEQ ID NO: 51441 - protein, 322 aa, Glycine max
  peptide (1)..(322): Ceres Seq. ID no. 14311494
  misc_feature (4)..(163): Homolog of NCBI NO: 6573780 NR Description: F28K19.7 [Arabidopsis thaliana]
  misc_feature (116)..(322): Homolog of NCBI NO: 6573780 NR Description: F28K19.7 [Arabidopsis thaliana]
  misc_feature (6)..(321): Homolog of NCBI NO: 34907302 NR Description: hypothetical protein~similar to Arabidopsis
  misc_feature (4)..(322): Homolog of NCBI NO: 22330710 NR Description: hypothetical protein [Arabidopsis thaliana]
  misc_feature (1)..(322): Homolog of NCBI NO: 21593454 NR Description: unknown [Arabidopsis thaliana]
  misc_feature (1)..(322): Homolog of NCBI NO: 18395063 NR Description: expressed protein [Arabidopsis thaliana]
MDPSSVNGFYSFLTLGIDDLERVFLSTNFMSIQFLQRVVSVLRSFHTQLTLLVQKLQLPVGDKWLDEYMDESSKLWDACHLIKSGISAMDSYYSAALNITSSLDSHRHITPQVSRQVIRAIAGCRREAVGLEEENRALMEARIEALSLRFQERLSIESKLNGFNGFRGVLYAMRNVSSLLLMVLLYGLVYCYGDSSDFVLGGCGYEGCLFLGSAFMMSTARLQQRVAAEIGHMGGSPGMLLHEFRRSKVAMEELRGELERRGSGSQGVEWESEVAIRERVENLRTCFGVLRSGADNIVAQLDDFFDEIVEGRKRLLDFCSHR

SEQ ID NO: 51442 - protein, 293 aa, Glycine max
  peptide (1)..(293): Ceres Seq. ID no. 14311495
  misc_feature (1)..(134): Homolog of NCBI NO: 6573780 NR Description: F28K19.7 [Arabidopsis thaliana]
  misc_feature (87)..(293): Homolog of NCBI NO: 6573780 NR Description: F28K19.7 [Arabidopsis thaliana]
  misc_feature (1)..(292): Homolog of NCBI NO: 34907302 NR Description: hypothetical protein~similar to Arabidopsis
  misc_feature (1)..(293): Homolog of NCBI NO: 22330710 NR Description: hypothetical protein [Arabidopsis thaliana]
  misc_feature (1)..(293): Homolog of NCBI NO: 21593454 NR Description: unknown [Arabidopsis thaliana]
  misc_feature (1)..(293): Homolog of NCBI NO: 18395063 NR Description: expressed protein [Arabidopsis thaliana]
MSIQFLQRVVSVLRSFHTQLTLLVQKLQLPVGDKWLDEYMDESSKLWDACHLIKSGISAMDSYYSAALNITSSLDSHRHITPQVSRQVIRAIAGCRREAVGLEEENRALMEARIEALSLRFQERLSIESKLNGFNGFRGVLYAMRNVSSLLLMVLLYGLVYCYGDSSDFVLGGCGYEGCLFLGSAFMMSTARLQQRVAAEIGHMGGSPGMLLHEFRRSKVAMEELRGELERRGSGSQGVEWESEVAIRERVENLRTCFGVLRSGADNIVAQLDDFFDEIVEGRKRLLDFCSHR

SEQ ID NO: 51443 - protein, 254 aa, Glycine max
  peptide (1)..(254): Ceres Seq. ID no. 14311496
  misc_feature (1)..(95): Homolog of NCBI NO: 6573780 NR Description: F28K19.7 [Arabidopsis thaliana]
  misc_feature (48)..(254): Homolog of NCBI NO: 6573780 NR Description: F28K19.7 [Arabidopsis thaliana]
  misc_feature (1)..(253): Homolog of NCBI NO: 34907302 NR Description: hypothetical protein~similar to Arabidopsis
  misc_feature (1)..(254): Homolog of NCBI NO: 22330710 NR Description: hypothetical protein [Arabidopsis thaliana]
  misc_feature (1)..(254): Homolog of NCBI NO: 21593454 NR Description: unknown [Arabidopsis thaliana]
  misc_feature (1)..(254): Homolog of NCBI NO: 18395063 NR Description: expressed protein [Arabidopsis thaliana]
MDESSKLWDACHLIKSGISAMDSYYSAALNITSSLDSHRHITPQVSRQVIRAIAGCRREAVGLEEENRALMEARIEALSLRFQERLSIESKLNGFNGFRGVLYAMRNVSSLLLMVLLYGLVYCYGDSSDFVLGGCGYEGCLFLGSAFMMSTARLQQRVAAEIGHMGGSPGMLLHEFRRSKVAMEELRGELERRGSGSQGVEWESEVAIRERVENLRTCFGVLRSGADNIVAQLDDFFDEIVEGRKRLLDFCSHR

SEQ ID NO: 51444 - DNA, 1178 bp, Glycine max
  misc_feature (1)..(1178): Ceres Seq. ID no. 14311511
actctacttttactcggggcatagcagatgctgatacatgaaagcgaaacctagctatcatcatcatcacagaagaacaacaacagaggaaaaaagaaaaagaaaaatgttagaggtgaagagaatcggtgtggtggggagtggccaaatgggatcgggaatagcccaagtcgctgccatgcacggcatcgacgtttggcttcacgacctcgaccctcaagctctctccaaagcctcctcttccatctcttcctccatcaaccgtttcgtttccaaaaaccacatctctcaggttgcgggtgctgatgctttgaaacgactgcgtctcacgacggatttggaggatttacagctagcggatttgatcattgaggcgattgtggaatccgaagatgtgaaaaagagtttgtttgcgcaactcgataggattgccaagagttctgcgattttggcgtccaacaccagttccatttccgtcacgcgtctagccacctctaccagcaggccacgtcaggtgataggaatgcattttatgaacccacctcctgtgatgaaattgattgagattgtacgaggtgcagacacttctgaggagacattcgttgctacgaaagcattgtcagagaggcttggcaaggtagtgataacctcccatgattattcaggcttcatagtgaatcgaatccttatgcctatgataaatgaagcattttttgctctctacactggtgttgcaaccaaagaggatattgacacaggaatgaagctgggtactaaccatccaatgggtcctttagagcttgcagacttcattggattggatgtgtgcttgtcaataatgagagttcttcatgctggccttggtgacaacaaatatgcaccttgccctctacttgtgcagtatgttgatgctggaagacttggaagaaaacgaggtattggtgtgtatgaatatagtaaagatccaaggtctacaaaatcatcttcccgtctctaaaatgtttgtttcacttggaagaacaagttttcaacacccccattttaattaccttgtgtctgaccgtgggggtggtgcacacggctgaagttgaatacttgaatgtgtcttctatttcttttatgcatacaagcaaaaagaaaattgcaggaactaatagtaaaacatgcatagttaaaac

SEQ ID NO: 51445 - protein, 319 aa, Glycine max
  peptide (1)..(319): Ceres Seq. ID no. 14311512
  misc_feature (24)..(208): Pfam Name: 3-hydroxyacyl-CoA dehydrogenase, NAD binding domain Pfam Description: 3-hydroxyacyl-CoA dehydrogenase, NAD binding
  misc_feature (25)..(314): Homolog of NCBI NO: 12003356 NR Description: S(+)-beta-hydroxybutyryl CoA dehydrogenase
  misc_feature (27)..(306): Homolog of NCBI NO: 27376490 NR Description: 3-hydroxybutyryl-CoA dehydrogenase
  misc_feature (28)..(314): Homolog of NCBI NO: 15891343 NR Description: AGR_L_2460p [Agrobacterium tumefaciens]
  misc_feature (27)..(314): Homolog of NCBI NO: 22961911 NR Description: hypothetical protein [Rhodopseudomonas palustris]
  misc_feature (25)..(314): Homolog of NCBI NO: 23502817 NR Description: 3-hydroxybutyryl-CoA dehydrogenase [Brucella suis
  misc_feature (25)..(314): Homolog of NCBI NO: 17986383 NR Description: 3-HYDROXYBUTYRYL-COA DEHYDROGENASE [Brucella
  misc_feature (24)..(314): Homolog of NCBI NO: 23013719 NR Description: hypothetical protein [Magnetospirillum
  misc_feature (27)..(306): Homolog of NCBI NO: 23053816 NR Description: hypothetical protein [Geobacter metallireducens]
  misc_feature (26)..(319): Homolog of NCBI NO: 34908888 NR Description: putative 3-hydroxybutyryl-CoA dehydrogenase
  misc_feature (24)..(319): Homolog of NCBI NO: 15232545 NR Description: 3-hydroxybutyryl-CoA dehydrogenase, putative
MKAKPSYHHHHRRTTTEEKRKRKMLEVKRIGVVGSGQMGSGIAQVAAMHGIDVWLHDLDPQALSKASSSISSSINRFVSKNHISQVAGADALKRLRLTTDLEDLQLADLIIEAIVESEDVKKSLFAQLDRIAKSSAILASNTSSISVTRLATSTSRPRQVIGMHFMNPPPVMKLIEIVRGADTSEETFVATKALSERLGKVVITSHDYSGFIVNRILMPMINEAFFALYTGVATKEDIDTGMKLGTNHPMGPLELADFIGLDVCLSIMRVLHAGLGDNKYAPCPLLVQYVDAGRLGRKRGIGVYEYSKDPRSTKSSSRL

SEQ ID NO: 51446 - protein, 296 aa, Glycine max
  peptide (1)..(296): Ceres Seq. ID no. 14311513
  misc_feature (1)..(185): Pfam Name: 3-hydroxyacyl-CoA dehydrogenase, NAD binding domain Pfam Description: 3-hydroxyacyl-CoA dehydrogenase, NAD binding
  misc_feature (2)..(291): Homolog of NCBI NO: 12003356 NR Description: S(+)-beta-hydroxybutyryl CoA dehydrogenase
  misc_feature (4)..(283): Homolog of NCBI NO: 27376490 NR Description: 3-hydroxybutyryl-CoA dehydrogenase
  misc_feature (5)..(291): Homolog of NCBI NO: 15891343 NR Description: AGR_L_2460p [Agrobacterium tumefaciens]
  misc_feature (4)..(291): Homolog of NCBI NO: 22961911 NR Description: hypothetical protein [Rhodopseudomonas palustris]
  misc_feature (2)..(291): Homolog of NCBI NO: 23502817 NR Description: 3-hydroxybutyryl-CoA dehydrogenase [Brucella suis
  misc_feature (2)..(291): Homolog of NCBI NO: 17986383 NR Description: 3-HYDROXYBUTYRYL-COA DEHYDROGENASE [Brucella
  misc_feature (1)..(291): Homolog of NCBI NO: 23013719 NR Description: hypothetical protein [Magnetospirillum
  misc_feature (4)..(283): Homolog of NCBI NO: 23053816 NR Description: hypothetical protein [Geobacter metallireducens]
  misc_feature (3)..(296): Homolog of NCBI NO: 34908888 NR Description: putative 3-hydroxybutyryl-CoA dehydrogenase
  misc_feature (1)..(296): Homolog of NCBI NO: 15232545 NR Description: 3-hydroxybutyryl-CoA dehydrogenase, putative
MLEVKRIGVVGSGQMGSGIAQVAAMHGIDVWLHDLDPQALSKASSSISSSINRFVSKNHISQVAGADALKRLRLTTDLEDLQLADLIIEAIVESEDVKKSLFAQLDRIAKSSAILASNTSSISVTRLATSTSRPRQVIGMHFMNPPPVMKLIEIVRGADTSEETFVATKALSERLGKVVITSHDYSGFIVNRILMPMINEAFFALYTGVATKEDIDTGMKLGTNHPMGPLELADFIGLDVCLSIMRVLHAGLGDNKYAPCPLLVQYVDAGRLGRKRGIGVYEYSKDPRSTKSSSRL

SEQ ID NO: 51447 - protein, 282 aa, Glycine max
  peptide (1)..(282): Ceres Seq. ID no. 14311514
  misc_feature (1)..(171): Pfam Name: 3-hydroxyacyl-CoA dehydrogenase, NAD binding domain Pfam Description: 3-hydroxyacyl-CoA dehydrogenase, NAD binding
  misc_feature (1)..(277): Homolog of NCBI NO: 12003356 NR Description: S(+)-beta-hydroxybutyryl CoA dehydrogenase
  misc_feature (1)..(269): Homolog of NCBI NO: 27376490 NR Description: 3-hydroxybutyryl-CoA dehydrogenase
  misc_feature (1)..(277): Homolog of NCBI NO: 15891343 NR Description: AGR_L_2460p [Agrobacterium tumefaciens]
  misc_feature (1)..(277): Homolog of NCBI NO: 22961911 NR Description: hypothetical protein [Rhodopseudomonas palustris]
  misc_feature (1)..(277): Homolog of NCBI NO: 23502817 NR Description: 3-hydroxybutyryl-CoA dehydrogenase [Brucella suis
  misc_feature (1)..(277): Homolog of NCBI NO: 17986383 NR Description: 3-HYDROXYBUTYRYL-COA DEHYDROGENASE [Brucella
  misc_feature (1)..(277): Homolog of NCBI NO: 23013719 NR Description: hypothetical protein [Magnetospirillum
  misc_feature (1)..(269): Homolog of NCBI NO: 23053816 NR Description: hypothetical protein [Geobacter metallireducens]
  misc_feature (1)..(282): Homolog of NCBI NO: 34908888 NR Description: putative 3-hydroxybutyryl-CoA dehydrogenase
  misc_feature (1)..(282): Homolog of NCBI NO: 15232545 NR Description: 3-hydroxybutyryl-CoA dehydrogenase, putative
MGSGIAQVAAMHGIDVWLHDLDPQALSKASSSISSSINRFVSKNHISQVAGADALKRLRLTTDLEDLQLADLIIEAIVESEDVKKSLFAQLDRIAKSSAILASNTSSISVTRLATSTSRPRQVIGMHFMNPPPVMKLIEIVRGADTSEETFVATKALSERLGKVVITSHDYSGFIVNRILMPMINEAFFALYTGVATKEDIDTGMKLGTNHPMGPLELADFIGLDVCLSIMRVLHAGLGDNKYAPCPLLVQYVDAGRLGRKRGIGVYEYSKDPRSTKSSSRL

SEQ ID NO: 51448 - DNA, 1292 bp, Glycine max
  misc_feature (1)..(1292): Ceres Seq. ID no. 15176227
aacggagtttgcgtgtgggtgaaaccagcaccagcgcagtgcgtaaaggcagagagagagagagagtgaaatgagtgagttacaaaatgaagagtgacgaagccatttcgccattatcactcctctcgcaccaaaagcgatgaaagtctaggtttttacatttctggagtagctgaatcagatgaggcggatggtcttttgttaattacttcaacttaggtagacgaatctgccttggtgaatctgtcaagattgaagaatagactgcagattacttgtctggcagaaaggattcaaaatgagttggaacccacacatggagctccattacaataccattagctatccctataatacagcaggaagctttatcgaatattttgaaggtctcacctatgaacatgtcaacttcattttttctggtgcatcacatgctcaggagagttcatacccttcaaattcaagcttttacaagtttggaatttctgaaccagtgaatacttcatactatcgttacggtcatggttatgaggtaaatcatcacgaacctctggtggatgagtataggagaccttcagagaactcattgacaatcaatgaacagtcagcagctgtaagcacagaatgggttgaaggtggaaacactggcacacgagacaattctattgaatgtcctcgaagacatcatagtaattcaaatgattatcaggttatttggcaagacaatattgatcccgacaacatgacctatgaggaactacttgaattgggtgaagctgttggaactcaaagccgtggtctcacccaagaacagatctcctcacttccggtgtcaaagtacaaatgtgggttcttctcgaggaagaagtcacgggatgagagatgtgtgatttgccagatggaatataaaagaggggacaagcgcatcaccttgccatgtaaacatgtttatcatgctagttgtgggaacaaatggcttagcatcaataaggcctgccctatatgttacacggaagtgtttgccgacaagtcaaaacacaaataatctcaagcggataagtaacctgcatatgtttctgtttctccttgagtgtgggggtctttcatagaaatacatttttatttgatttttcccttttcgtagtgaggtcagccctgggtttagtaaaaatacagagaatctaaagttttataaaaggatatggacatgtatcaattgtcattgttgtactggagaggttggattacggtttgttttcataatagctaatacggtgtgctatgatttcacg

SEQ ID NO: 51449 - protein, 248 aa, Glycine max
  peptide (1)..(248): Ceres Seq. ID no. 15176228
  misc_feature (196)..(236): Pfam Name: Zinc finger, C3HC4 type (RING finger) Pfam Description: Zinc finger, C3HC4 type (RING finger)
  misc_feature (144)..(245): Homolog of NCBI NO: 22326712 NR Description: Pspzf zinc finger protein - like [Arabidopsis
  misc_feature (144)..(245): Homolog of NCBI NO: 20466428 NR Description: Pspzf zinc finger protein-like [Arabidopsis
  misc_feature (144)..(245): Homolog of NCBI NO: 10129643 NR Description: Pspzf zinc finger protein-like [Arabidopsis
  misc_feature (93)..(239): Homolog of NCBI NO: 15232746 NR Description: zinc-finger protein-related protein [Arabidopsis
  misc_feature (13)..(241): Homolog of NCBI NO: 34898016 NR Description: ESTs C26000(C11448),AU082130(C11448) correspond a region of the predicted gene.~Similar to mRNA for zinc-finger
  misc_feature (141)..(245): Homolog of NCBI NO: 21536693 NR Description: unknown [Arabidopsis thaliana]
  misc_feature (133)..(245): Homolog of NCBI NO: 18402411 NR Description: zinc finger (C3HC4-type RING finger) protein
  misc_feature (129)..(247): Homolog of NCBI NO: 10334499 NR Description: hypothetical protein [Cicer arietinum]
  misc_feature (47)..(241): Homolog of NCBI NO: 38567912 NR Description: OSJNBa0088I22.8 [Oryza sativa (japonica
  misc_feature (5)..(247): Homolog of NCBI NO: 22331928 NR Description: zinc finger (C3HC4-type RING finger) protein
MSWNPHMELHYNTISYPYNTAGSFIEYFEGLTYEHVNFIFSGASHAQESSYPSNSSFYKFGISEPVNTSYYRYGHGYEVNHHEPLVDEYRRPSENSLTINEQSAAVSTEWVEGGNTGTRDNSIECPRRHHSNSNDYQVIWQDNIDPDNMTYEELLELGEAVGTQSRGLTQEQISSLPVSKYKCGFFSRKKSRDERCVICQMEYKRGDKRITLPCKHVYHASCGNKWLSINKACPICYTEVFADKSKHK

SEQ ID NO: 51450 - protein, 242 aa, Glycine max
  peptide (1)..(242): Ceres Seq. ID no. 15176229
  misc_feature (190)..(230): Pfam Name: Zinc finger, C3HC4 type (RING finger) Pfam Description: Zinc finger, C3HC4 type (RING finger)
  misc_feature (138)..(239): Homolog of NCBI NO: 22326712 NR Description: Pspzf zinc finger protein - like [Arabidopsis
  misc_feature (138)..(239): Homolog of NCBI NO: 20466428 NR Description: Pspzf zinc finger protein-like [Arabidopsis
  misc_feature (138)..(239): Homolog of NCBI NO: 10129643 NR Description: Pspzf zinc finger protein-like [Arabidopsis
  misc_feature (87)..(233): Homolog of NCBI NO: 15232746 NR Description: zinc-finger protein-related protein [Arabidopsis
  misc_feature (7)..(235): Homolog of NCBI NO: 34898016 NR Description: ESTs C26000(C11448),AU082130(C11448) correspond a region of the predicted gene.~Similar to mRNA for zinc-finger
  misc_feature (135)..(239): Homolog of NCBI NO: 21536693 NR Description: unknown [Arabidopsis thaliana]
  misc_feature (127)..(239): Homolog of NCBI NO: 18402411 NR Description: zinc finger (C3HC4-type RING finger) protein
  misc_feature (123)..(241): Homolog of NCBI NO: 10334499 NR Description: hypothetical protein [Cicer arietinum]
  misc_feature (41)..(235): Homolog of NCBI NO: 38567912 NR Description: OSJNBa0088I22.8 [Oryza sativa (japonica
  misc_feature (1)..(241): Homolog of NCBI NO: 22331928 NR Description: zinc finger (C3HC4-type RING finger) protein
MELHYNTISYPYNTAGSFIEYFEGLTYEHVNFIFSGASHAQESSYPSNSSFYKFGISEPVNTSYYRYGHGYEVNHHEPLVDEYRRPSENSLTINEQSAAVSTEWVEGGNTGTRDNSIECPRRHHSNSNDYQVIWQDNIDPDNMTYEELLELGEAVGTQSRGLTQEQISSLPVSKYKCGFFSRKKSRDERCVICQMEYKRGDKRITLPCKHVYHASCGNKWLSINKACPICYTEVFADKSKHK

SEQ ID NO: 51451 - DNA, 919 bp, Glycine max
  misc_feature (1)..(919): Ceres Seq. ID no. 14311545
gcattagtattttaagtagtacatattcacttgaaaaaaaaatattatcgtgcaaagaacaagcttggaaaagaaaaatcttttaaaacgagttattcattttccaaaatcttttaactagtactttattaaaactcaattatctaattttgtttttgttgggttgcggtgtttctccgagttgcttcaattgaatggctcttcagcttccaccacttcctggccgtgccatgcgcttcaactcaagcgtgtgctcccttcctgcacgaaaatctagcacctttgccactctgtcacaaccccgaagcgactgggttgaagccactaacagtttcttcgaccaagacaaacgacccatcatgttatttgacggagtatgcaacttgtgcaacgggggtgtgaagttcgttcgtgataacgatcgaaataagacaattagatatgaacctcttcagagtgaaacgggtaaaatcttactcaggagatcaggaagagctcctgatgatatctcaagtgttgtacttgttgaaaaggaaagatcctatattaagtcagaagccgtgctgaagataatggaatatatagacttaccctttccacagctagcaattcttcttcaatttgtgcctctgtttatcagagattttgtttatgacaatgttgcaaacaatcgttacctgatttttggtcgttcggaatcatgtgaaatatagcatcatcctggcatgagtactggaggtaacagtaatgtgctaagttcaaaaactgggcttctttatagtccaagtcatatcctgttctcaaatattttgaagattctgtgtactactgtatagaagctttacttgtcgttttatttgataagctcatagaagcagaggacatcatcaattcgtaataatattttctgtcccaaatg

SEQ ID NO: 51452 - protein, 172 aa, Glycine max
  peptide (1)..(172): Ceres Seq. ID no. 14311546
  misc_feature (50)..(167): Pfam Name: Protein of unknown function, DUF393 Pfam Description: Protein of unknown function, DUF393
  misc_feature (55)..(169): Homolog of NCBI NO: 22126482 NR Description: hypothetical [Yersinia pestis KIM]
  misc_feature (55)..(169): Homolog of NCBI NO: 16121834 NR Description: putative membrane protein [Yersinia pestis]
  misc_feature (52)..(172): Homolog of NCBI NO: 24215642 NR Description: conserved hypothetical protein
  misc_feature (49)..(172): Homolog of NCBI NO: 15613415 NR Description: BH0852~unknown conserved protein [Bacillus
  misc_feature (55)..(170): Homolog of NCBI NO: 28871571 NR Description: conserved hypothetical protein
  misc_feature (55)..(170): Homolog of NCBI NO: 23470059 NR Description: hypothetical protein [Pseudomonas syringae pv.
  misc_feature (49)..(170): Homolog of NCBI NO: 16080202 NR Description: alternate gene name: yugD [Bacillus subtilis]
  misc_feature (43)..(172): Homolog of NCBI NO: 34910238 NR Description: OSJNBa0089K24.3 [Oryza sativa (japonica
  misc_feature (1)..(172): Homolog of NCBI NO: 21593813 NR Description: unknown [Arabidopsis thaliana]
  misc_feature (1)..(172): Homolog of NCBI NO: 18404093 NR Description: expressed protein [Arabidopsis thaliana]
MALQLPPLPGRAMRFNSSVCSLPARKSSTFATLSQPRSDWVEATNSFFDQDKRPIMLFDGVCNLCNGGVKFVRDNDRNKTIRYEPLQSETGKILLRRSGRAPDDISSVVLVEKERSYIKSEAVLKIMEYIDLPFPQLAILLQFVPLFIRDFVYDNVANNRYLIFGRSESCEI

SEQ ID NO: 51453 - protein, 160 aa, Glycine max
  peptide (1)..(160): Ceres Seq. ID no. 14311547
  misc_feature (38)..(155): Pfam Name: Protein of unknown function, DUF393 Pfam Description: Protein of unknown function, DUF393
  misc_feature (43)..(157): Homolog of NCBI NO: 22126482 NR Description: hypothetical [Yersinia pestis KIM]
  misc_feature (43)..(157): Homolog of NCBI NO: 16121834 NR Description: putative membrane protein [Yersinia pestis]
  misc_feature (40)..(160): Homolog of NCBI NO: 24215642 NR Description: conserved hypothetical protein
  misc_feature (37)..(160): Homolog of NCBI NO: 15613415 NR Description: BH0852~unknown conserved protein [Bacillus
  misc_feature (43)..(158): Homolog of NCBI NO: 28871571 NR Description: conserved hypothetical protein
  misc_feature (43)..(158): Homolog of NCBI NO: 23470059 NR Description: hypothetical protein [Pseudomonas syringae pv.
  misc_feature (37)..(158): Homolog of NCBI NO: 16080202 NR Description: alternate gene name: yugD [Bacillus subtilis]
  misc_feature (31)..(160): Homolog of NCBI NO: 34910238 NR Description: OSJNBa0089K24.3 [Oryza sativa (japonica
  misc_feature (1)..(160): Homolog of NCBI NO: 21593813 NR Description: unknown [Arabidopsis thaliana]
  misc_feature (1)..(160): Homolog of NCBI NO: 18404093 NR Description: expressed protein [Arabidopsis thaliana]
MRFNSSVCSLPARKSSTFATLSQPRSDWVEATNSFFDQDKRPIMLFDGVCNLCNGGVKFVRDNDRNKTIRYEPLQSETGKILLRRSGRAPDDISSVVLVEKERSYIKSEAVLKIMEYIDLPFPQLAILLQFVPLFIRDFVYDNVANNRYLIFGRSESCEI

SEQ ID NO: 51454 - protein, 117 aa, Glycine max
  peptide (1)..(117): Ceres Seq. ID no. 14311548
  misc_feature (1)..(112): Pfam Name: Protein of unknown function, DUF393 Pfam Description: Protein of unknown function, DUF393
  misc_feature (1)..(114): Homolog of NCBI NO: 22126482 NR Description: hypothetical [Yersinia pestis KIM]
  misc_feature (1)..(114): Homolog of NCBI NO: 16121834 NR Description: putative membrane protein [Yersinia pestis]
  misc_feature (1)..(117): Homolog of NCBI NO: 24215642 NR Description: conserved hypothetical protein
  misc_feature (1)..(117): Homolog of NCBI NO: 15613415 NR Description: BH0852~unknown conserved protein [Bacillus
  misc_feature (1)..(115): Homolog of NCBI NO: 28871571 NR Description: conserved hypothetical protein
  misc_feature (1)..(115): Homolog of NCBI NO: 23470059 NR Description: hypothetical protein [Pseudomonas syringae pv.
  misc_feature (1)..(115): Homolog of NCBI NO: 16080202 NR Description: alternate gene name: yugD [Bacillus subtilis]
  misc_feature (1)..(117): Homolog of NCBI NO: 34910238 NR Description: OSJNBa0089K24.3 [Oryza sativa (japonica
  misc_feature (1)..(117): Homolog of NCBI NO: 21593813 NR Description: unknown [Arabidopsis thaliana]
  misc_feature (1)..(117): Homolog of NCBI NO: 18404093 NR Description: expressed protein [Arabidopsis thaliana]
MLFDGVCNLCNGGVKFVRDNDRNKTIRYEPLQSETGKILLRRSGRAPDDISSVVLVEKERSYIKSEAVLKIMEYIDLPFPQLAILLQFVPLFIRDFVYDNVANNRYLIFGRSESCEI

SEQ ID NO: 51455 - DNA, 1408 bp, Glycine max
  misc_feature (1)..(1408): Ceres Seq. ID no. 14311854
agattagtagtatatgctttcaacaatggaagattagaaagcgccagtgtgcgcacgttagcacccaaccccatggattcctctcccccaattcgtaagggaaggaaactataacggaggagggggcaataaacaataagaaaatgttgcggataacgagattctcggggtttttctccgccgcaatgttcgtgactgttcttgttattctctccccctccttccaatccgaagccattcgatcctcccaccgattttccttccggaaagcccctcctttccgcaatgccgccgaatgcgcttctgtttccggccaaaccaccaccgtctgcgacccttccttggtccacgtggccataaccctcgacgtcgactacctccgcggctcaatcgccgccgtgcactccatcctccacaactccctctgtccggagaacatcttcttccatttcctcgtctccgacaccaacctccaaaccctagttgagtccacgttcccaaacctgaaattcaacgtctatttcttcgatccgaacatcgtcgctcacttgatctcctcctccgtgcggcaggcgctggagcagcctctcaattacgcgagaaattacctcgttgaccttctggagagttgcgtggagagggtgatttacttggactccgatctggtggtagtggatgacgtggcgaaactgtggagcgcgagtctggactcgcgtgccatcggcgcgccggagtactgccacgcgaacttcaccaagtatttcacggcggggttctggtctgagtcgaggttgtcggggacgttcgcgcagcggagggcgtgctacttcaacacgggggtgatggtgatggatctggtgaagtggaggaaggaaggatacacgaagagaattgagcgttggatggagattcagaagagtgataggatctatgagcttggttctctgccgccgtttttgctggtgttcgcgggacacgtggcacccattgagcaccggtggaaccagcacggtttgggcggggataacgtgaagggtagttgccgtgacttgcaccctggtccggttagtttgttgcattggtccggtagcggtaagccatggctccgtttaagctccaaacggccttgccctctggattctctatgggctccttttgacttgtatacacacccatcgtcttaactaattcttgctgcatgctacatacatacattcattagtcattcctgatttgaaaataaattgttgaattttattaagttaagtttgtttattataataaatactaattgttagaagaaaaaataaatatttaaagaacactagctggttatatatgttgaagccgtcgtaattagattcaggtgtctagtttgtaaaagttattgttagtactgttctggctg

SEQ ID NO: 51456 - protein, 346 aa, Glycine max
  peptide (1)..(346): Ceres Seq. ID no. 14311855
  misc_feature (15)..(341): Homolog of NCBI NO: 12003394 NR Description: Avr9/Cf-9 rapidly elicited protein 231 [Nicotiana
  misc_feature (8)..(341): Homolog of NCBI NO: 30689156 NR Description: galactinol synthase, putative [Arabidopsis
  misc_feature (40)..(343): Homolog of NCBI NO: 15221684 NR Description: glycosyltransferase family 8 [Arabidopsis
  misc_feature (39)..(343): Homolog of NCBI NO: 18409445 NR Description: glycosyltransferase family 8 [Arabidopsis
  misc_feature (1)..(312): Homolog of NCBI NO: 20258800 NR Description: putative glycosyl transferase [Arabidopsis
  misc_feature (4)..(343): Homolog of NCBI NO: 15217851 NR Description: glycosyltransferase family 8 [Arabidopsis
  misc_feature (1)..(343): Homolog of NCBI NO: 21554300 NR Description: putative glycosyl transferase [Arabidopsis
  misc_feature (1)..(343): Homolog of NCBI NO: 15235247 NR Description: glycosyltransferase family 8 [Arabidopsis
  misc_feature (6)..(345): Homolog of NCBI NO: 11281926 NR Description: hypothetical protein F26K9.90 - Arabidopsis
  misc_feature (1)..(345): Homolog of NCBI NO: 22331906 NR Description: glycosyltransferase family 8 [Arabidopsis
MLRITRFSGFFSAAMFVTVLVILSPSFQSEAIRSSHRFSFRKAPPFRNAAECASVSGQTTTVCDPSLVHVAITLDVDYLRGSIAAVHSILHNSLCPENIFFHFLVSDTNLQTLVESTFPNLKFNVYFFDPNIVAHLISSSVRQALEQPLNYARNYLVDLLESCVERVIYLDSDLVVVDDVAKLWSASLDSRAIGAPEYCHANFTKYFTAGFWSESRLSGTFAQRRACYFNTGVMVMDLVKWRKEGYTKRIERWMEIQKSDRIYELGSLPPFLLVFAGHVAPIEHRWNQHGLGGDNVKGSCRDLHPGPVSLLHWSGSGKPWLRLSSKRPCPLDSLWAPFDLYTHPSS

SEQ ID NO: 51457 - protein, 332 aa, Glycine max
  peptide (1)..(332): Ceres Seq. ID no. 14311856
  misc_feature (1)..(327): Homolog of NCBI NO: 12003394 NR Description: Avr9/Cf-9 rapidly elicited protein 231 [Nicotiana
  misc_feature (1)..(327): Homolog of NCBI NO: 30689156 NR Description: galactinol synthase, putative [Arabidopsis
  misc_feature (26)..(329): Homolog of NCBI NO: 15221684 NR Description: glycosyltransferase family 8 [Arabidopsis
  misc_feature (25)..(329): Homolog of NCBI NO: 18409445 NR Description: glycosyltransferase family 8 [Arabidopsis
  misc_feature (1)..(298): Homolog of NCBI NO: 20258800 NR Description: putative glycosyl transferase [Arabidopsis
  misc_feature (1)..(329): Homolog of NCBI NO: 15217851 NR Description: glycosyltransferase family 8 [Arabidopsis
  misc_feature (1)..(329): Homolog of NCBI NO: 21554300 NR Description: putative glycosyl transferase [Arabidopsis
  misc_feature (1)..(329): Homolog of NCBI NO: 15235247 NR Description: glycosyltransferase family 8 [Arabidopsis
  misc_feature (1)..(331): Homolog of NCBI NO: 11281926 NR Description: hypothetical protein F26K9.90 - Arabidopsis
  misc_feature (1)..(331): Homolog of NCBI NO: 22331906 NR Description: glycosyltransferase family 8 [Arabidopsis
MFVTVLVILSPSFQSEAIRSSHRFSFRKAPPFRNAAECASVSGQTTTVCDPSLVHVAITLDVDYLRGSIAAVHSILHNSLCPENIFFHFLVSDTNLQTLVESTFPNLKFNVYFFDPNIVAHLISSSVRQALEQPLNYARNYLVDLLESCVERVIYLDSDLVVVDDVAKLWSASLDSRAIGAPEYCHANFTKYFTAGFWSESRLSGTFAQRRACYFNTGVMVMDLVKWRKEGYTKRIERWMEIQKSDRIYELGSLPPFLLVFAGHVAPIEHRWNQHGLGGDNVKGSCRDLHPGPVSLLHWSGSGKPWLRLSSKRPCPLDSLWAPFDLYTHPSS

SEQ ID NO: 51458 - DNA, 1676 bp, Glycine max
  misc_feature (1)..(1676): Ceres Seq. ID no. 15171297
ttcaaccttctcttctccccattgtgcacagttcacacctaacacaaacccacttcctctcttttccggcggcttttccggccaccatgctcctccgcctccaccacccaacctccctcgcctagatctactcagatcacaatcccaaatctctcaaatccggcgtcgtcgttttagctcaccttatataaaaaaagcagaaaggatgtcgtttcctctataattcgcttactcgcgctgtgtgctgtgtttctttctaacattcgtgttcgcgtgtgtgcgtttctttttttgttcctttgttcttttcggagcttctttgatttttccggcgagaagaggatgacgtccgtcgcgaggcagccaacgtggaaggagcgggagaacaacaagaggcgagagaggaggaggagagccatcgcggcgaagatcttctccggcctgcgaatgtacggcaactacaagctccccaaacactgcgacaacaacgaagttctcaaggctctctgcaacgaagccggctggaccgtagaagccgatggcaccacctatcgcaagggatgcaagcctcctgttgaacgcatggacatagtaggtggttctgcagcagcaagcccatgctcatcttaccatccaagtccctgtgcttcctacaaccctagtccaggctcttcttgcttaccgagccctcgcgcatccccctttcctccaaacccaaatgctgatggcaattctctcattccatggctcaaaaacctttcatcaggatcatcatcggcatcctcttccaagcttccgcagctgtacattccgaatggctccatcagtgctccagtcactcctccaatcagctctccatcatcccgaaagccccagatcagagctgattgggaggatcagtccaattgtccgacagcgtggggcggactggcatacacctttgtgccctcttcaactcctccaagccccggccgccaggttgccgaaacagattggttttccaagatcaggattcctcagggaggactagcaccaacttctccaaccttcagcctggtctcttccaacccatttggcctcaaggaagatgctatggttggcagcggttcccggatgtggacgacaccaggggcaagtggaacatgttctccagccgtagctgcaggctccgaaaacacttctgacattccaatggctgaagcagtttcagatgaatttgcctttggaagcagctcatcaggtttagtgaatgcctggaaaggagagaggatccatgaagcttcttttggaacagatgatcttgagctcactcttgggagctccaagaccaggttgctccataagtgaatagtcaatggtcccttcaacaacatgaactttgactctgtttattctgtagaaaggctagaggagggaattaagatgagcagcaagtagttgttcttattacataccagaaaaaaaaaatagcagtttattttattcttttattttctcttagtttttattggttcctaagttatatatacagctttagctaggtgtcgggtggttttcaaccctttcatttggtcaatgttgttaaaacctttattactctgggaaagatcatcatatacctgtatggattggcttggtttgatattgaaaggaaaaaattactcgatttcaactgt

SEQ ID NO: 51459 - protein, 334 aa, Glycine max
  peptide (1)..(334): Ceres Seq. ID no. 15171298
  misc_feature (2)..(147): Pfam Name: Plant protein of unknown function (DUF822) Pfam Description: Plant protein of unknown function (DUF822)
  misc_feature (1)..(252): Homolog of NCBI NO: 15230298 NR Description: expressed protein [Arabidopsis thaliana]
  misc_feature (6)..(330): Homolog of NCBI NO: 25352558 NR Description: unknown protein F9E10.7 [imported] - Arabidopsis
  misc_feature (6)..(328): Homolog of NCBI NO: 21592457 NR Description: unknown [Arabidopsis thaliana]
  misc_feature (6)..(328): Homolog of NCBI NO: 6651069 NR Description: 107 protein [Arabidopsis thaliana]
  misc_feature (6)..(330): Homolog of NCBI NO: 18086461 NR Description: At1g75080/F9E10_7 [Arabidopsis thaliana]
  misc_feature (6)..(328): Homolog of NCBI NO: 18394728 NR Description: expressed protein [Arabidopsis thaliana]
  misc_feature (6)..(330): Homolog of NCBI NO: 18410764 NR Description: expressed protein [Arabidopsis thaliana]
  misc_feature (1)..(234): Homolog of NCBI NO: 15234055 NR Description: expressed protein [Arabidopsis thaliana]
  misc_feature (6)..(330): Homolog of NCBI NO: 34903720 NR Description: P0489A05.26 [Oryza sativa (japonica
  misc_feature (1)..(330): Homolog of NCBI NO: 18412073 NR Description: expressed protein [Arabidopsis thaliana]
MTSVARQPTWKERENNKRRERRRRAIAAKIFSGLRMYGNYKLPKHCDNNEVLKALCNEAGWTVEADGTTYRKGCKPPVERMDIVGGSAAASPCSSYHPSPCASYNPSPGSSCLPSPRASPFPPNPNADGNSLIPWLKNLSSGSSSASSSKLPQLYIPNGSISAPVTPPISSPSSRKPQIRADWEDQSNCPTAWGGLAYTFVPSSTPPSPGRQVAETDWFSKIRIPQGGLAPTSPTFSLVSSNPFGLKEDAMVGSGSRMWTTPGASGTCSPAVAAGSENTSDIPMAEAVSDEFAFGSSSSGLVNAWKGERIHEASFGTDDLELTLGSSKTRLLHK

SEQ ID NO: 51460 - protein, 299 aa, Glycine max
  peptide (1)..(299): Ceres Seq. ID no. 15171299
  misc_feature (1)..(112): Pfam Name: Plant protein of unknown function (DUF822) Pfam Description: Plant protein of unknown function (DUF822)
  misc_feature (1)..(217): Homolog of NCBI NO: 15230298 NR Description: expressed protein [Arabidopsis thaliana]
  misc_feature (1)..(295): Homolog of NCBI NO: 25352558 NR Description: unknown protein F9E10.7 [imported] - Arabidopsis
  misc_feature (1)..(293): Homolog of NCBI NO: 21592457 NR Description: unknown [Arabidopsis thaliana]
  misc_feature (1)..(293): Homolog of NCBI NO: 6651069 NR Description: 107 protein [Arabidopsis thaliana]
  misc_feature (1)..(295): Homolog of NCBI NO: 18086461 NR Description: At1g75080/F9E10_7 [Arabidopsis thaliana]
  misc_feature (1)..(293): Homolog of NCBI NO: 18394728 NR Description: expressed protein [Arabidopsis thaliana]
  misc_feature (1)..(295): Homolog of NCBI NO: 18410764 NR Description: expressed protein [Arabidopsis thaliana]
  misc_feature (1)..(199): Homolog of NCBI NO: 15234055 NR Description: expressed protein [Arabidopsis thaliana]
  misc_feature (1)..(295): Homolog of NCBI NO: 34903720 NR Description: P0489A05.26 [Oryza sativa (japonica
  misc_feature (1)..(295): Homolog of NCBI NO: 18412073 NR Description: expressed protein [Arabidopsis thaliana]
MYGNYKLPKHCDNNEVLKALCNEAGWTVEADGTTYRKGCKPPVERMDIVGGSAAASPCSSYHPSPCASYNPSPGSSCLPSPRASPFPPNPNADGNSLIPWLKNLSSGSSSASSSKLPQLYIPNGSISAPVTPPISSPSSRKPQIRADWEDQSNCPTAWGGLAYTFVPSSTPPSPGRQVAETDWFSKIRIPQGGLAPTSPTFSLVSSNPFGLKEDAMVGSGSRMWTTPGASGTCSPAVAAGSENTSDIPMAEAVSDEFAFGSSSSGLVNAWKGERIHEASFGTDDLELTLGSSKTRLLHK

SEQ ID NO: 51461 - protein, 254 aa, Glycine max
  peptide (1)..(254): Ceres Seq. ID no. 15171300
  misc_feature (1)..(67): Pfam Name: Plant protein of unknown function (DUF822) Pfam Description: Plant protein of unknown function (DUF822)
  misc_feature (1)..(172): Homolog of NCBI NO: 15230298 NR Description: expressed protein [Arabidopsis thaliana]
  misc_feature (1)..(250): Homolog of NCBI NO: 25352558 NR Description: unknown protein F9E10.7 [imported] - Arabidopsis
  misc_feature (1)..(248): Homolog of NCBI NO: 21592457 NR Description: unknown [Arabidopsis thaliana]
  misc_feature (1)..(248): Homolog of NCBI NO: 6651069 NR Description: 107 protein [Arabidopsis thaliana]
  misc_feature (1)..(250): Homolog of NCBI NO: 18086461 NR Description: At1g75080/F9E10_7 [Arabidopsis thaliana]
  misc_feature (1)..(248): Homolog of NCBI NO: 18394728 NR Description: expressed protein [Arabidopsis thaliana]
  misc_feature (1)..(250): Homolog of NCBI NO: 18410764 NR Description: expressed protein [Arabidopsis thaliana]
  misc_feature (1)..(154): Homolog of NCBI NO: 15234055 NR Description: expressed protein [Arabidopsis thaliana]
  misc_feature (1)..(250): Homolog of NCBI NO: 34903720 NR Description: P0489A05.26 [Oryza sativa (japonica
  misc_feature (1)..(250): Homolog of NCBI NO: 18412073 NR Description: expressed protein [Arabidopsis thaliana]
MDIVGGSAAASPCSSYHPSPCASYNPSPGSSCLPSPRASPFPPNPNADGNSLIPWLKNLSSGSSSASSSKLPQLYIPNGSISAPVTPPISSPSSRKPQIRADWEDQSNCPTAWGGLAYTFVPSSTPPSPGRQVAETDWFSKIRIPQGGLAPTSPTFSLVSSNPFGLKEDAMVGSGSRMWTTPGASGTCSPAVAAGSENTSDIPMAEAVSDEFAFGSSSSGLVNAWKGERIHEASFGTDDLELTLGSSKTRLLHK

SEQ ID NO: 51462 - DNA, 1647 bp, Glycine max
  misc_feature (1)..(1647): Ceres Seq. ID no. 14311553
aatttaccattcattttggtattttctatattggtctatgagtagcttagttttaaaattcagcagcaactcacaattaccaccacccttttgtttttgttcatgagtgtggcggcttcttatttatgacttcaagctaatcatcttttcttcttgttgtttgctatttttttagttataaactggcttgtgctgtatgttaggcttcttatttcatgttaatatgttatttaccttggcgatttcaacttgtactttatcttaagaataagcttcaaggctaaaccaatgtacacaccttgtgcaggacagacaaagctgattcacttaggagcctcaagagctatgtctacatcttctcgtgctcttcccactcccttggaaaacaagtatatgaaacccccagattcttttcagctttcacccgtcagatctgactgcaaattctgcctcatcaaattcaatcagaagtgctgggaagatgttgtcttcaccttctgaatgtcccgatgatatccctttttcctttgtttctcagacatcaggtgacaatgtgtcttccgaaattcattcaacagcattgatttctcaccctcaagataatgaagatctttcctggggaccagatccatttcaggatattcttggctttcctgaaaatgtttctgtccagcatgatcaggtgcaaaacaatggttgttacataaatgatgataatgtcaaaagatctgattttggggagtgggttgatcagttaatgtcaattgatgattctcttcacccgaactggagtcaacttcttggtgatgacaatgtagcagaaccaaaaccaaaggcatctcatgttcctcagcagcagcatatagcatctgtagaagttgttggcaattcagcatcaactgcaccgcagactaagcctagaatgcgttggactccagaacttcacgaggcctttgtggaagcagttaatcagcttggtggtagtgataaggctactccaaagggtgtgttgaatctaatgaaagttgagggccttactatctatcatgtaaaaagccacttgcagaagtatagaactgccagatataaaccagagccgtcagaaggaaattctgagaaaaaggtgactccaatggaagaaatgaaatctctagatttgaaaacgagtaaggggatcactgaagcattacgtttacagatggaactccagaagcgacttcacgaacaacttgagatccaaagaaagttgcagattcaaattgaagaccaagggaaacgtcttcagatgatgtttgagaaacagggagagatgggtgacaacaaggttaatggctcctcggacacaaacgaggaaggcgacaaatttgaaagcattccaaaagccatgcctgaagagaaggattcaagcacaagaaaacaaatagcaggtgaagctgaagaagtgatcaatgaagatgaagctgcaccacccacaaaacgggtgaaaagttcataacagcaagatcgttttatggttctagatttgtttaatattcttagactggtttggactgcatggaacttgtaaaaatattattggatccaaggatgtttcgacttgctcatttatcactgccagaagtaaaatcttgttttatatttgttatc

SEQ ID NO: 51463 - protein, 337 aa, Glycine max
  peptide (1)..(337): Ceres Seq. ID no. 14311554
  misc_feature (147)..(198): Pfam Name: Myb-like DNA-binding domain Pfam Description: Myb-like DNA-binding domain
  misc_feature (1)..(329): Homolog of NCBI NO: 6942190 NR Description: CDPK substrate protein 1; CSP1 [Mesembryanthemum
  misc_feature (1)..(313): Homolog of NCBI NO: 34394847 NR Description: putative CDPK substrate protein 1
  misc_feature (1)..(293): Homolog of NCBI NO: 26452281 NR Description: putative transfactor [Arabidopsis thaliana]
  misc_feature (1)..(293): Homolog of NCBI NO: 15229298 NR Description: transfactor -related [Arabidopsis thaliana]
  misc_feature (1)..(335): Homolog of NCBI NO: 7487685 NR Description: hypothetical protein T5F17.60 - Arabidopsis
  misc_feature (29)..(325): Homolog of NCBI NO: 30692105 NR Description: expressed protein [Arabidopsis thaliana]
  misc_feature (29)..(325): Homolog of NCBI NO: 30692110 NR Description: expressed protein [Arabidopsis thaliana]
  misc_feature (29)..(325): Homolog of NCBI NO: 21954075 NR Description: unknown protein [Arabidopsis thaliana]
  misc_feature (29)..(325): Homolog of NCBI NO: 21537366 NR Description: transfactor, putative [Arabidopsis thaliana]
  misc_feature (1)..(312): Homolog of NCBI NO: 22329004 NR Description: expressed protein [Arabidopsis thaliana]
MLSSPSECPDDIPFSFVSQTSGDNVSSEIHSTALISHPQDNEDLSWGPDPFQDILGFPENVSVQHDQVQNNGCYINDDNVKRSDFGEWVDQLMSIDDSLHPNWSQLLGDDNVAEPKPKASHVPQQQHIASVEVVGNSASTAPQTKPRMRWTPELHEAFVEAVNQLGGSDKATPKGVLNLMKVEGLTIYHVKSHLQKYRTARYKPEPSEGNSEKKVTPMEEMKSLDLKTSKGITEALRLQMELQKRLHEQLEIQRKLQIQIEDQGKRLQMMFEKQGEMGDNKVNGSSDTNEEGDKFESIPKAMPEEKDSSTRKQIAGEAEEVINEDEAAPPTKRVKSS

SEQ ID NO: 51464 - protein, 245 aa, Glycine max
  peptide (1)..(245): Ceres Seq. ID no. 14311555
  misc_feature (55)..(106): Pfam Name: Myb-like DNA-binding domain Pfam Description: Myb-like DNA-binding domain
  misc_feature (1)..(237): Homolog of NCBI NO: 6942190 NR Description: CDPK substrate protein 1; CSP1 [Mesembryanthemum
  misc_feature (1)..(221): Homolog of NCBI NO: 34394847 NR Description: putative CDPK substrate protein 1
  misc_feature (1)..(201): Homolog of NCBI NO: 26452281 NR Description: putative transfactor [Arabidopsis thaliana]
  misc_feature (1)..(201): Homolog of NCBI NO: 15229298 NR Description: transfactor -related [Arabidopsis thaliana]
  misc_feature (1)..(243): Homolog of NCBI NO: 7487685 NR Description: hypothetical protein T5F17.60 - Arabidopsis
  misc_feature (1)..(233): Homolog of NCBI NO: 30692110 NR Description: expressed protein [Arabidopsis thaliana]
  misc_feature (1)..(233): Homolog of NCBI NO: 21954075 NR Description: unknown protein [Arabidopsis thaliana]
  misc_feature (1)..(233): Homolog of NCBI NO: 30692105 NR Description: expressed protein [Arabidopsis thaliana]
  misc_feature (1)..(233): Homolog of NCBI NO: 21537366 NR Description: transfactor, putative [Arabidopsis thaliana]
  misc_feature (1)..(220): Homolog of NCBI NO: 22329004 NR Description: expressed protein [Arabidopsis thaliana]
MSIDDSLHPNWSQLLGDDNVAEPKPKASHVPQQQHIASVEVVGNSASTAPQTKPRMRWTPELHEAFVEAVNQLGGSDKATPKGVLNLMKVEGLTIYHVKSHLQKYRTARYKPEPSEGNSEKKVTPMEEMKSLDLKTSKGITEALRLQMELQKRLHEQLEIQRKLQIQIEDQGKRLQMMFEKQGEMGDNKVNGSSDTNEEGDKFESIPKAMPEEKDSSTRKQIAGEAEEVINEDEAAPPTKRVKSS

SEQ ID NO: 51465 - protein, 190 aa, Glycine max
  peptide (1)..(190): Ceres Seq. ID no. 14311556
  misc_feature (1)..(51): Pfam Name: Myb-like DNA-binding domain Pfam Description: Myb-like DNA-binding domain
  misc_feature (1)..(182): Homolog of NCBI NO: 6942190 NR Description: CDPK substrate protein 1; CSP1 [Mesembryanthemum
  misc_feature (1)..(166): Homolog of NCBI NO: 34394847 NR Description: putative CDPK substrate protein 1
  misc_feature (1)..(146): Homolog of NCBI NO: 26452281 NR Description: putative transfactor [Arabidopsis thaliana]
  misc_feature (1)..(146): Homolog of NCBI NO: 15229298 NR Description: transfactor -related [Arabidopsis thaliana]
  misc_feature (1)..(188): Homolog of NCBI NO: 7487685 NR Description: hypothetical protein T5F17.60 - Arabidopsis
  misc_feature (1)..(178): Homolog of NCBI NO: 21954075 NR Description: unknown protein [Arabidopsis thaliana]
  misc_feature (1)..(178): Homolog of NCBI NO: 30692110 NR Description: expressed protein [Arabidopsis thaliana]
  misc_feature (1)..(178): Homolog of NCBI NO: 30692105 NR Description: expressed protein [Arabidopsis thaliana]
  misc_feature (1)..(178): Homolog of NCBI NO: 21537366 NR Description: transfactor, putative [Arabidopsis thaliana]
  misc_feature (1)..(165): Homolog of NCBI NO: 22329004 NR Description: expressed protein [Arabidopsis thaliana]
MRWTPELHEAFVEAVNQLGGSDKATPKGVLNLMKVEGLTIYHVKSHLQKYRTARYKPEPSEGNSEKKVTPMEEMKSLDLKTSKGITEALRLQMELQKRLHEQLEIQRKLQIQIEDQGKRLQMMFEKQGEMGDNKVNGSSDTNEEGDKFESIPKAMPEEKDSSTRKQIAGEAEEVINEDEAAPPTKRVKSS

SEQ ID NO: 51466 - DNA, 1254 bp, Glycine max
  misc_feature (1)..(1254): Ceres Seq. ID no. 14311531
ctttcataaatatttctttcgtataactcggtcccacttgccttcttctgtaacgtgtaaaaaacaaacactaaatctcccgcacccccgagcccggaaagagatctagtgtgtctgtgactgtcagaaacaaacattatttggttttctgaattgtttggattgcgagaaaaaaaaaaaaaggaaaaatggcaaaggatattcgattcttcgacctcaacacgggcgccaagatcccttcagtcggcttgggaacttggcagtccgatcctggccttgttgctgaagccgtcgcggcggccatcaaggttggttaccgccacattgattgtgctcaaatctatggcaatgagaaggagattggctctttgttgaagaatctgtttgaggagggtgtattgaagcgcgaggatttgtggattacatctaaactctggaatactgatcatgctccagaagatgtaccactggcactggaccggaccttgaaagatttgcagctggattatgtagatttgtatcttatccactggcctgctccgatgaagaaaggatcagctggctttaagcctgaaaatcttgtgcaaccaaacatacctaacacctggaaggcgatggaagcactctatgactctggcaaggctcggaccatcggtgtaagcaatttttccaccaagaagctctcggatttgctgctaattgctcgtgttcctcccgctgtcaaccaggtggagtgtcatccttcctggcagcaggacaagctgcaggctttctgcaattccaaaggtgtccacctctctggatattcacctttgggttcccctggaacaacctggcttaaaagtgatgtcctcaagcatcaagttataaatatgattgcggagaaactaggcaagacgcctgcacaagtagctcttcgctggggacttcaaatgggccatagtgttcttcccaagagtacaaacgaaactagaataaaggaaaattttgatgtttttggctggtctatacctgaggacctgctcgccaaattttctgagattcaacaggcaagattactcaggggtaccacatttgcccatgaaacttatggtgcctacagatcccttgaggaactttgggatggtgaaatctgagaaatctatctgtaaatttgataagtgaatggatcgaggagtgagagttctgtgaaactgtgaatcagtatactcctttgttgacttgagcaaattttattttattcctggtttgacg

SEQ ID NO: 51467 - protein, 315 aa, Glycine max
  peptide (1)..(315): Ceres Seq. ID no. 14311532
  misc_feature (1)..(314): Homolog of NCBI NO: 2130022 NR Description: aldose reductase homolog - wild oat
  misc_feature (1)..(315): Homolog of NCBI NO: 13160399 NR Description: aldose reductase [Digitalis purpurea]
  misc_feature (1)..(315): Homolog of NCBI NO: 13160397 NR Description: aldose reductase [Digitalis purpurea]
  misc_feature (1)..(288): Homolog of NCBI NO: 25283479 NR Description: probable alcohol dehydrogenase [imported] -
  misc_feature (1)..(315): Homolog of NCBI NO: 7431112 NR Description: abscisic acid activated protein - alfalfa
  misc_feature (1)..(289): Homolog of NCBI NO: 7431114 NR Description: aldehyde dehydrogenase homolog At2g37770 -
  misc_feature (1)..(315): Homolog of NCBI NO: 15232354 NR Description: aldo/keto reductase family [Arabidopsis thaliana]
  misc_feature (12)..(315): Homolog of NCBI NO: 28393400 NR Description: putative aldo/keto reductase [Arabidopsis
  misc_feature (1)..(315): Homolog of NCBI NO: 30687261 NR Description: aldo/keto reductase family [Arabidopsis thaliana]
  misc_feature (1)..(315): Homolog of NCBI NO: 30687247 NR Description: aldo/keto reductase family [Arabidopsis thaliana]
MAKDIRFFDLNTGAKIPSVGLGTWQSDPGLVAEAVAAAIKVGYRHIDCAQIYGNEKEIGSLLKNLFEEGVLKREDLWITSKLWNTDHAPEDVPLALDRTLKDLQLDYVDLYLIHWPAPMKKGSAGFKPENLVQPNIPNTWKAMEALYDSGKARTIGVSNFSTKKLSDLLLIARVPPAVNQVECHPSWQQDKLQAFCNSKGVHLSGYSPLGSPGTTWLKSDVLKHQVINMIAEKLGKTPAQVALRWGLQMGHSVLPKSTNETRIKENFDVFGWSIPEDLLAKFSEIQQARLLRGTTFAHETYGAYRSLEELWDGEI

SEQ ID NO: 51468 - protein, 197 aa, Glycine max
  peptide (1)..(197): Ceres Seq. ID no. 14311533
  misc_feature (1)..(196): Homolog of NCBI NO: 2130022 NR Description: aldose reductase homolog - wild oat
  misc_feature (1)..(197): Homolog of NCBI NO: 13160399 NR Description: aldose reductase [Digitalis purpurea]
  misc_feature (1)..(197): Homolog of NCBI NO: 13160397 NR Description: aldose reductase [Digitalis purpurea]
  misc_feature (1)..(170): Homolog of NCBI NO: 25283479 NR Description: probable alcohol dehydrogenase [imported] -
  misc_feature (1)..(197): Homolog of NCBI NO: 7431112 NR Description: abscisic acid activated protein - alfalfa
  misc_feature (1)..(171): Homolog of NCBI NO: 7431114 NR Description: aldehyde dehydrogenase homolog At2g37770 -
  misc_feature (1)..(197): Homolog of NCBI NO: 15232354 NR Description: aldo/keto reductase family [Arabidopsis thaliana]
  misc_feature (1)..(197): Homolog of NCBI NO: 28393400 NR Description: putative aldo/keto reductase [Arabidopsis
  misc_feature (1)..(197): Homolog of NCBI NO: 30687261 NR Description: aldo/keto reductase family [Arabidopsis thaliana]
  misc_feature (1)..(197): Homolog of NCBI NO: 30687247 NR Description: aldo/keto reductase family [Arabidopsis thaliana]
MKKGSAGFKPENLVQPNIPNTWKAMEALYDSGKARTIGVSNFSTKKLSDLLLIARVPPAVNQVECHPSWQQDKLQAFCNSKGVHLSGYSPLGSPGTTWLKSDVLKHQVINMIAEKLGKTPAQVALRWGLQMGHSVLPKSTNETRIKENFDVFGWSIPEDLLAKFSEIQQARLLRGTTFAHETYGAYRSLEELWDGEI

SEQ ID NO: 51469 - protein, 173 aa, Glycine max
  peptide (1)..(173): Ceres Seq. ID no. 14311534
  misc_feature (1)..(172): Homolog of NCBI NO: 2130022 NR Description: aldose reductase homolog - wild oat
  misc_feature (1)..(173): Homolog of NCBI NO: 13160399 NR Description: aldose reductase [Digitalis purpurea]
  misc_feature (1)..(173): Homolog of NCBI NO: 13160397 NR Description: aldose reductase [Digitalis purpurea]
  misc_feature (1)..(146): Homolog of NCBI NO: 25283479 NR Description: probable alcohol dehydrogenase [imported] -
  misc_feature (1)..(173): Homolog of NCBI NO: 7431112 NR Description: abscisic acid activated protein - alfalfa
  misc_feature (1)..(147): Homolog of NCBI NO: 7431114 NR Description: aldehyde dehydrogenase homolog At2g37770 -
  misc_feature (1)..(173): Homolog of NCBI NO: 15232354 NR Description: aldo/keto reductase family [Arabidopsis thaliana]
  misc_feature (1)..(173): Homolog of NCBI NO: 28393400 NR Description: putative aldo/keto reductase [Arabidopsis
  misc_feature (1)..(173): Homolog of NCBI NO: 30687261 NR Description: aldo/keto reductase family [Arabidopsis thaliana]
  misc_feature (1)..(173): Homolog of NCBI NO: 30687247 NR Description: aldo/keto reductase family [Arabidopsis thaliana]
MEALYDSGKARTIGVSNFSTKKLSDLLLIARVPPAVNQVECHPSWQQDKLQAFCNSKGVHLSGYSPLGSPGTTWLKSDVLKHQVINMIAEKLGKTPAQVALRWGLQMGHSVLPKSTNETRIKENFDVFGWSIPEDLLAKFSEIQQARLLRGTTFAHETYGAYRSLEELWDGEI

SEQ ID NO: 51470 - DNA, 973 bp, Glycine max
  misc_feature (1)..(973): Ceres Seq. ID no. 12608863
aactgcgtgcactatctcatttctttctattcatttcttcattccaccatcaccatggtcaaggagaagaagaacgtggtggtcaagaacaagaagccaaacaacaatgccgacgagcttcacttccgcggcgtccggaagcgaccatggggccgctacgccgccgagatccgtgaccccggcaagaagacccgcgtctggctcggcaccttcgacaccgccgaggacgccgcccgcgcctatgacgccgccgcccgcaacttccgcggccccaaagccaaaaccaacttccccgtgccccccgacgacaacaacaacaacaacgttaacgtgaacaaaaacaagagtgttaacgttaaatctcacagtcccagccagagcagcaccgtggagtccgccaccccggagcgtgaagccacgcgccgctccacctccgccgcaatcgaccgtttcccgttcctacccatccagcagcaaatcctcatgacccaccccgtcgcagcacccatgcgcccggttttctttctcgaccgggcccacttcatgacccagtctttcccgctccggttcgaacccggtccggtccagagcgactccgactcctcctccgtcgtcgtcgattgtcagcccaaaagagagatcaatctcgatcttaacttggctccgcctaatgaatattaacccttttttttatctctttattttttcataaaaaaagatagcagaaagaaaggactaaggagattttttttctctctttttttttttttggaagattaatcttccattaagaagttaattagtacatcctttgatgtaaataggttgattttctcttcttttttgttttttaggtccttgatagtattatcagaggacatgatctgaaattgtctagatctgatataatttttcatgtaacatctgaatatctgatgtaattctggctaatatcaattaatcttcttttatt

SEQ ID NO: 51471 - protein, 226 aa, Glycine max
  peptide (1)..(226): Ceres Seq. ID no. 12608864
  misc_feature (39)..(103): Pfam Name: AP2 domain Pfam Description: AP2 domain
  misc_feature (21)..(135): Homolog of NCBI NO: 28274832 NR Description: ethylene response factor 3 [Lycopersicon
  misc_feature (34)..(197): Homolog of NCBI NO: 2281635 NR Description: AP2 domain containing protein RAP2.5 [Arabidopsis
  misc_feature (28)..(126): Homolog of NCBI NO: 40353323 NR Description: ethylene-responsive element binding factor
  misc_feature (32)..(223): Homolog of NCBI NO: 4587373 NR Description: ethylene responsive element binding factor
  misc_feature (30)..(225): Homolog of NCBI NO: 20340233 NR Description: ethylene responsive element binding factor 4-like
  misc_feature (39)..(225): Homolog of NCBI NO: 38345793 NR Description: OSJNBa0085I10.10 [Oryza sativa (japonica
  misc_feature (26)..(226): Homolog of NCBI NO: 7489114 NR Description: DNA binding protein EREBP-3 - common tobacco
  misc_feature (35)..(226): Homolog of NCBI NO: 8809573 NR Description: ethylene-responsive element binding factor
  misc_feature (32)..(146): Homolog of NCBI NO: 4099921 NR Description: EREBP-3 homolog [Stylosanthes hamata]
  misc_feature (21)..(152): Homolog of NCBI NO: 4099914 NR Description: ethylene-responsive element binding protein
NCVHYLISFYSFLHSTITMVKEKKNVVVKNKKPNNNADELHFRGVRKRPWGRYAAEIRDPGKKTRVWLGTFDTAEDAARAYDAAARNFRGPKAKTNFPVPPDDNNNNNVNVNKNKSVNVKSHSPSQSSTVESATPEREATRRSTSAAIDRFPFLPIQQQILMTHPVAAPMRPVFFLDRAHFMTQSFPLRFEPGPVQSDSDSSSVVVDCQPKREINLDLNLAPPNEY

SEQ ID NO: 51472 - protein, 208 aa, Glycine max
  peptide (1)..(208): Ceres Seq. ID no. 12608865
  misc_feature (21)..(85): Pfam Name: AP2 domain Pfam Description: AP2 domain
  misc_feature (3)..(117): Homolog of NCBI NO: 28274832 NR Description: ethylene response factor 3 [Lycopersicon
  misc_feature (16)..(179): Homolog of NCBI NO: 2281635 NR Description: AP2 domain containing protein RAP2.5 [Arabidopsis
  misc_feature (10)..(108): Homolog of NCBI NO: 40353323 NR Description: ethylene-responsive element binding factor
  misc_feature (14)..(205): Homolog of NCBI NO: 4587373 NR Description: ethylene responsive element binding factor
  misc_feature (12)..(207): Homolog of NCBI NO: 20340233 NR Description: ethylene responsive element binding factor 4-like
  misc_feature (21)..(207): Homolog of NCBI NO: 38345793 NR Description: OSJNBa0085I10.10 [Oryza sativa (japonica
  misc_feature (8)..(208): Homolog of NCBI NO: 7489114 NR Description: DNA binding protein EREBP-3 - common tobacco
  misc_feature (17)..(208): Homolog of NCBI NO: 8809573 NR Description: ethylene-responsive element binding factor
  misc_feature (14)..(128): Homolog of NCBI NO: 4099921 NR Description: EREBP-3 homolog [Stylosanthes hamata]
  misc_feature (3)..(134): Homolog of NCBI NO: 4099914 NR Description: ethylene-responsive element binding protein
MVKEKKNVVVKNKKPNNNADELHFRGVRKRPWGRYAAEIRDPGKKTRVWLGTFDTAEDAARAYDAAARNFRGPKAKTNFPVPPDDNNNNNVNVNKNKSVNVKSHSPSQSSTVESATPEREATRRSTSAAIDRFPFLPIQQQILMTHPVAAPMRPVFFLDRAHFMTQSFPLRFEPGPVQSDSDSSSVVVDCQPKREINLDLNLAPPNEY

SEQ ID NO: 51473 - DNA, 1832 bp, Glycine max
  misc_feature (1)..(1832): Ceres Seq. ID no. 14311857
attttcgttatcttcttcgtttcgttataaccctagctgggaacaaataccatctctcgtccattgtctgcgtctcactcatcctctcccttctcttacattgttcatttctcaactctttctctcttttcttccaaaccctaatctggattagcctctcatcggatttcaattctcacggtcttcaccgaccgccagatctcttagcaccgctcttcttttcatcgattaaataacaaaaaattggcttaattttattctaacatcctaagcaaaaactaacgttttcacccgattttaacattcgagagaagagttagtttattttattgtatttttttattaagttactgtttctatttaaatcgataaacggcgaggtcgagcgttagaattcgaaatccggagaaaaaaaattacaggtattattatcaggggaatcgcgtggaagcgttgttgaggagagtgttgtgtttgatctgaggaagaagaaagaaaaaaaataatggtgggaggtggaagcaggagggatgaagggtcgttggtgttgaacaacacgaacgtgtttgcagcgctggatactctgaagaagaagaagaagtccgataaggagaagaagagcaagggctcgtcgacgaaatcgcaggcccagtccgcgaaggctgaggccccagtgttttgggccccggcgccgctgaacgccaagtcctgggccgacgtcgacgacgaggacgacgacgattactacgccaccacggcgccgccccaatcggtgtggggcgtttctgaacctcatcacagtaaggaggacaaacatgggaattttgaggaaagtgagagtgaggaagatattttggatgaaggggatgatgaggttgaggaagagcatgatcatgaaccagaagaatctttgaaacctgaacatgaggttaagaaggatactgaagtccctttgccgccaccaaaggagacagaaaggcagctctctaaaaaggaaaggaagaagaaggaacttgcagaacttgaggctcttctagctgattttggagtggcgccaaaacaaagtaacgatggtcaagatgagtctcaaggtgctcaggataagaaaggtgttgagactgatggagatggagaaaagaaagaaaatgtccctgcagaatccaaaacttccaagaagaagaagaagaaggataaagcttccaaggaggtgaaagaatctcaagatcaacccaacagttcagacacaaacaatgggcctgatttggccacaggcgctgaaaatgtggaggatacatctactgttgatgtgaaagagcgtctcaagaaagttgcttctacaaagaagaagaagtccagtaaagaaatggatgctgctgcaagagctgctgctcaagaggctgctgcaaggagtgcaaggcttgctgctgcaaaaaaaaaagagaagaaccattataaccagcaacccgtccggtaaaagaaccctgctccttaacatcaatacaggaatttgtatttcttgttcatatgttgatgccgaataaacagtggtctttaggttctggtgagaatggtgatgattctggtcgtattactgtggacctgggaaatttttcatgtagtttttttttgggaattagacaattagtgttgttcaattgttctggacttgctattttggcagagaaaattttagctttaaacattaccggaactacatagttgtgtattgtagttcttatatctctttgtggctgatcagtgatcaattagttctgactgagagtgtttatatttaactatagaaagtgctgtgttgctttaaatgttattat

SEQ ID NO: 51474 - protein, 322 aa, Glycine max
  peptide (1)..(322): Ceres Seq. ID no. 14311858
  misc_feature (121)..(306): Pfam Name: Transcription initiation factor IIF, alpha Pfam Description: Transcription initiation factor IIF, alpha
  misc_feature (1)..(305): Homolog of NCBI NO: 8096269 NR Description: KED [Nicotiana tabacum]
  misc_feature (119)..(322): Homolog of NCBI NO: 7522210 NR Description: hypothetical protein pAFD103 - apple tree
  misc_feature (108)..(292): Homolog of NCBI NO: 7522210 NR Description: hypothetical protein pAFD103 - apple tree
  misc_feature (1)..(132): Homolog of NCBI NO: 34906156 NR Description: P0509B06.15 [Oryza sativa (japonica
  misc_feature (109)..(322): Homolog of NCBI NO: 34906156 NR Description: P0509B06.15 [Oryza sativa (japonica
  misc_feature (1)..(322): Homolog of NCBI NO: 33620414 NR Description: M355 [Lilium longiflorum]
  misc_feature (1)..(322): Homolog of NCBI NO: 15233865 NR Description: expressed protein [Arabidopsis thaliana]
  misc_feature (1)..(322): Homolog of NCBI NO: 17529066 NR Description: unknown protein [Arabidopsis thaliana]
  misc_feature (1)..(322): Homolog of NCBI NO: 21537167 NR Description: unknown [Arabidopsis thaliana]
  misc_feature (1)..(322): Homolog of NCBI NO: 18400901 NR Description: expressed protein [Arabidopsis thaliana]
MVGGGSRRDEGSLVLNNTNVFAALDTLKKKKKSDKEKKSKGSSTKSQAQSAKAEAPVFWAPAPLNAKSWADVDDEDDDDYYATTAPPQSVWGVSEPHHSKEDKHGNFEESESEEDILDEGDDEVEEEHDHEPEESLKPEHEVKKDTEVPLPPPKETERQLSKKERKKKELAELEALLADFGVAPKQSNDGQDESQGAQDKKGVETDGDGEKKENVPAESKTSKKKKKKDKASKEVKESQDQPNSSDTNNGPDLATGAENVEDTSTVDVKERLKKVASTKKKKSSKEMDAAARAAAQEAAARSARLAAAKKKEKNHYNQQPVR

SEQ ID NO: 51475 - DNA, 1371 bp, Glycine max
  misc_feature (1)..(1371): Ceres Seq. ID no. 14311594
attgtcacattatactttgatagccattctggcatgctttctttgctccacagcggagtacaccaccactgtccactggtacactcttggcattttccctttcttttttcatttttatttttaaatcccactctcattttcccttccacttttccaattccttcacttcacactctcacactcacagacacagtctctctaatctaatggatgcaaagtctgctgaagctgttgttcccttagaaccattgaagtatcagacatggttcttgaaagtttcgatccactgtgaaggttgcaggaggaaagttaagaaggttctacagagcattgatggtgtttttaccacaacggttgacccgcaacagcaaaaagtaaccgtcactggaagcgttggagttgagacgctcataaggaaactggtcaaagccggaaaacacgccgagatttggccggagaatctcgccgccgggaagggaaagaactccggcaaagacaagaagcagcagcagcagcagaagaagaagaagaacgaacaaggagaaccagaaagcgcggtaaacaactctactacaacaaatgcagaacaaaacactaactctggcacaaaaaagggaattgaaaaaaatgctggcgaaaacaagagcaccggaaactcaaagtccggcggcggagaaagtgaggcagcgaaaccggagaacaagggtggtcaaagtgaagggggttctgggaagaaaaagaaaaagaaaggtcaaagcggtggagtgagtgcagcatgtggtgatgcacctgcgcacactggatcggaggtgcagtgttctgggcagatgaatctgagccctacacgtcagcaatcatacgtgtatcctgaaacatactgttatcctcaccaagtggtgtatctagcaactcacaacaacaacaggttatgtcccatgcccatgggaacaatgggtggtccttcttactatgtttcatcattgccctacatgtgtgcaggcttcgaccatgactctccttattatcgctttcaatctccacccttcgaaatcttcagtgatgagaatgccaacggttgttctattgtgtgaccaaagataaatcaaataaacatagtgctttttgtttctttgatggtcccaggtagaggtagtttttttttttttttgttttgttatgtttttgtattttgaggagggaaaaatcgagcttatggcatatacgttgtgctctgtccttggattttctaggggctcactttgctgcatttactactccaacactgaaatatgcccaaccttaccttattttgatcttttggaccaagctgtaaataatattctaatatggacccttttaatatttcatgtc

SEQ ID NO: 51476 - protein, 294 aa, Glycine max
  peptide (1)..(294): Ceres Seq. ID no. 14311595
  misc_feature (22)..(80): Pfam Name: Heavy-metal-associated domain Pfam Description: Heavy-metal-associated domain
  misc_feature (13)..(164): Homolog of NCBI NO: 30687142 NR Description: heavy-metal-associated domain-containing protein
  misc_feature (13)..(294): Homolog of NCBI NO: 33146848 NR Description: copper chaperone (CCH)-related protein-like
  misc_feature (15)..(216): Homolog of NCBI NO: 15219992 NR Description: heavy-metal-associated domain-containing protein
  misc_feature (13)..(133): Homolog of NCBI NO: 18397481 NR Description: heavy-metal-associated domain-containing protein
  misc_feature (15)..(138): Homolog of NCBI NO: 34895462 NR Description: P0037C04.27 [Oryza sativa (japonica
  misc_feature (1)..(208): Homolog of NCBI NO: 21536659 NR Description: unknown [Arabidopsis thaliana]
  misc_feature (1)..(208): Homolog of NCBI NO: 27754505 NR Description: putative copper chaperone (CCH) protein
  misc_feature (1)..(208): Homolog of NCBI NO: 18405728 NR Description: copper chaperone (CCH)-related [Arabidopsis
  misc_feature (13)..(255): Homolog of NCBI NO: 15241025 NR Description: heavy-metal-associated domain-containing protein
  misc_feature (13)..(189): Homolog of NCBI NO: 12083536 NR Description: hypothetical protein [Oryza sativa]
MDAKSAEAVVPLEPLKYQTWFLKVSIHCEGCRRKVKKVLQSIDGVFTTTVDPQQQKVTVTGSVGVETLIRKLVKAGKHAEIWPENLAAGKGKNSGKDKKQQQQQKKKKNEQGEPESAVNNSTTTNAEQNTNSGTKKGIEKNAGENKSTGNSKSGGGESEAAKPENKGGQSEGGSGKKKKKKGQSGGVSAACGDAPAHTGSEVQCSGQMNLSPTRQQSYVYPETYCYPHQVVYLATHNNNRLCPMPMGTMGGPSYYVSSLPYMCAGFDHDSPYYRFQSPPFEIFSDENANGCSIV

SEQ ID NO: 51477 - DNA, 956 bp, Glycine max
  misc_feature (1)..(956): Ceres Seq. ID no. 12609770
gtggtgcaaggcataaagaggagaattggtggggataggcgaaggaggtggcgactgagtagtgaatagggtttttgattgattgatagcaataattggtgttagcgaagcttgagaattgagatttatgggtcgcaatcgcagtcgcagtcgcagtgtgtcacgctctccttccaattcccgcagaagaaggtactctccatcccctgtttctcatcgccactcgagaacttccaggcgccgctctccttcccacaagcgccgtcgaaggcacagaacctcttcctccccctctctttcacgcagccccactcccaaacccaagaaagatcaaaacaaaagcaagcgtcaacacgaggaagagttgaaactattggaagaagagactgcaagaagactggaagaagcaattcgaaaaaatgttgaggagaaacttaacacagaggaagtcaagttagaaatagaaaagcgcgtagcagagggagtgaagaaattgtttgatgatgttgaagctcaacttgaaaaagaaaaggaagatgctcttactgaagctagaaggaaggaagaacaagcccgtaaagaaagagaagagctggacaagatgcttgaagagaataggaggagagtggaagaatctcagagaagagaagctctagagcagcaaagaaaggaggaggaacgacaaagggaattggagatgattcagagacaaaaagaagaggctgctcggagaaagaagctggaggaggaagaagaacatgcaaatcgaattaattctttgggtaagaacaaatctaggcctaaatcttatggtttctaattactactatatgtgatatcattttgtaccccaaattatttgtaccctttatgtggaacaatgatcttgaatgaaagatttgatactcctatgtttgagcttgcaacctactttattaaaagatctaagaaaatcg

SEQ ID NO: 51478 - protein, 230 aa, Glycine max
  peptide (1)..(230): Ceres Seq. ID no. 12609771
  misc_feature (85)..(224): Pfam Name: Caldesmon Pfam Description: Caldesmon
  misc_feature (1)..(226): Homolog of NCBI NO: 28278343 NR Description: Unknown (protein for MGC:55548) [Danio rerio]
  misc_feature (1)..(226): Homolog of NCBI NO: 17862050 NR Description: LD06138p [Drosophila melanogaster]
  misc_feature (1)..(226): Homolog of NCBI NO: 38541231 NR Description: Unknown (protein for MGC:77695) [Danio rerio]
  misc_feature (3)..(226): Homolog of NCBI NO: 39795605 NR Description: Unknown (protein for MGC:76303) [Silurana
  misc_feature (1)..(226): Homolog of NCBI NO: 8922259 NR Description: hypothetical protein FLJ10154 [Homo sapiens]
  misc_feature (3)..(226): Homolog of NCBI NO: 34879649 NR Description: similar to hypothetical protein FLJ10154 [Rattus
  misc_feature (3)..(226): Homolog of NCBI NO: 31234644 NR Description: ENSANGP00000022336 [Anopheles gambiae]
  misc_feature (72)..(221): Homolog of NCBI NO: 37532486 NR Description: hypothetical protein [Oryza sativa (japonica
  misc_feature (19)..(226): Homolog of NCBI NO: 15220234 NR Description: unknown protein; protein id: At1g10890.1
  misc_feature (1)..(226): Homolog of NCBI NO: 15240607 NR Description: putative protein; protein id: At5g13340.1
MGRNRSRSRSVSRSPSNSRRRRYSPSPVSHRHSRTSRRRSPSHKRRRRHRTSSSPSLSRSPTPKPKKDQNKSKRQHEEELKLLEEETARRLEEAIRKNVEEKLNTEEVKLEIEKRVAEGVKKLFDDVEAQLEKEKEDALTEARRKEEQARKEREELDKMLEENRRRVEESQRREALEQQRKEEERQRELEMIQRQKEEAARRKKLEEEEEHANRINSLGKNKSRPKSYGF

SEQ ID NO: 51479 - DNA, 1548 bp, Glycine max
  misc_feature (1)..(1548): Ceres Seq. ID no. 15171386
ctatttgacatctatttgcttcattatattctgtagcaacttaattgtaactccgatttccttggaactctttcaacttggctgctgttgttagtcattattacgtattttcaacactctctggtgcagagggccatcttggtgtggtatacagaaaggtgagcaaagaaagactgaaaaagtgcaagtgtttatggattggaatttgaaagcaccttcttgggatttgagtgaagtggatcaggcaaacttacccaacatggaaacaatggaaggctcaagcagatatggaatgtatagaactaagggggaattttctgttgacttgaagcttggccaagtgggaaattctggcagggaatcatcagtgttgactaagtccaaagatggtggtgctgttggagtctccaaaatgatatcctcatcttcttcagggtcagctaagagagctcgttcccttagcaacgggacacaaacagtgtcatgccttgtggacgggtgccactctgatctcagtaactgcagagactatcataggcgccataaggtctgtgaagtccattccaagactgcacaggtcacaattggaggccagaaacaaaggttctgccagcagtgtagcaggttccattcactggaggaatttgatgaggggaaaaggagctgcaggaagcggttagatgggcacaaccgacggagaagaaagccacaaccagaagttgttctaacgcggtctgctagttttttgtcgaattaccaccaaggcacacaattgctatctttctcaagttcacatgtgtacccatccactactgtggtgaatcctactttgggtggagttgttacttctggtgatgtaaggcttcatgggcagaaccaccaccaccaccaaatgcatttggttgataaacaggacctgtttcttggatcttctccaaccggttacaaggaagggaagcatttggcattcatgcaaggtgaccacaccctcaacaaccagagcccacatcttccaggtgcttccgtgggcccggcccagatgtttcttaggaccagcccgtattcagaaagcggtggattgagatgcaaaatgttctgcgatagcctaacaggttcggcccacggcaacacctctcgtgctctctctcttctgtcatcaccaccacagccgcacagtcctggaaatggattaaaccaaatggtgaaccctcactcgccacttatgcaacccttgggcctgagcctgcatgataacagcctgggctccgtggacccggttttgggccccaacgggagtgaccattcctcatcaatgcatcacataggttctaatggatcccaggtgaatgaggcccctccactatttccctttcaatgggaatagacttcaattataaggactcgtcctttggttgttgattctttccctcgtactatttcaatgttcaatttatcttttaatgaaggcaatgaactatatccatcacgtttaacaaaatggtgtggaaatttttcatgtctttaaaagtgatgagtttgttgctgtgc

SEQ ID NO: 51480 - protein, 396 aa, Glycine max
  peptide (1)..(396): Ceres Seq. ID no. 15171387
  misc_feature (98)..(175): Pfam Name: SBP domain Pfam Description: SBP domain
  misc_feature (64)..(174): Homolog of NCBI NO: 15028115 NR Description: putative squamosa-promoter binding protein
  misc_feature (72)..(180): Homolog of NCBI NO: 25406455 NR Description: unknown protein F14G6.18 [imported] - Arabidopsis
  misc_feature (1)..(201): Homolog of NCBI NO: 15232241 NR Description: squamosa promoter binding protein-related 12
  misc_feature (48)..(181): Homolog of NCBI NO: 15230904 NR Description: squamosa promoter-binding protein homolog
  misc_feature (76)..(207): Homolog of NCBI NO: 25352584 NR Description: squamosa promoter binding protein-homolog 4
  misc_feature (69)..(174): Homolog of NCBI NO: 25456646 NR Description: squamosa promoter binding protein 2
  misc_feature (69)..(174): Homolog of NCBI NO: 15239820 NR Description: squamosa promoter binding protein-related 2
  misc_feature (1)..(201): Homolog of NCBI NO: 7485487 NR Description: probable squamosa-promoter binding protein
  misc_feature (26)..(270): Homolog of NCBI NO: 21536841 NR Description: unknown [Arabidopsis thaliana]
  misc_feature (1)..(270): Homolog of NCBI NO: 18423163 NR Description: expressed protein [Arabidopsis thaliana]
MDWNLKAPSWDLSEVDQANLPNMETMEGSSRYGMYRTKGEFSVDLKLGQVGNSGRESSVLTKSKDGGAVGVSKMISSSSSGSAKRARSLSNGTQTVSCLVDGCHSDLSNCRDYHRRHKVCEVHSKTAQVTIGGQKQRFCQQCSRFHSLEEFDEGKRSCRKRLDGHNRRRRKPQPEVVLTRSASFLSNYHQGTQLLSFSSSHVYPSTTVVNPTLGGVVTSGDVRLHGQNHHHHQMHLVDKQDLFLGSSPTGYKEGKHLAFMQGDHTLNNQSPHLPGASVGPAQMFLRTSPYSESGGLRCKMFCDSLTGSAHGNTSRALSLLSSPPQPHSPGNGLNQMVNPHSPLMQPLGLSLHDNSLGSVDPVLGPNGSDHSSSMHHIGSNGSQVNEAPPLFPFQWE

SEQ ID NO: 51481 - protein, 374 aa, Glycine max
  peptide (1)..(374): Ceres Seq. ID no. 15171388
  misc_feature (76)..(153): Pfam Name: SBP domain Pfam Description: SBP domain
  misc_feature (42)..(152): Homolog of NCBI NO: 15028115 NR Description: putative squamosa-promoter binding protein
  misc_feature (50)..(158): Homolog of NCBI NO: 25406455 NR Description: unknown protein F14G6.18 [imported] - Arabidopsis
  misc_feature (1)..(179): Homolog of NCBI NO: 15232241 NR Description: squamosa promoter binding protein-related 12
  misc_feature (26)..(159): Homolog of NCBI NO: 15230904 NR Description: squamosa promoter-binding protein homolog
  misc_feature (54)..(185): Homolog of NCBI NO: 25352584 NR Description: squamosa promoter binding protein-homolog 4
  misc_feature (47)..(152): Homolog of NCBI NO: 25456646 NR Description: squamosa promoter binding protein 2
  misc_feature (47)..(152): Homolog of NCBI NO: 15239820 NR Description: squamosa promoter binding protein-related 2
  misc_feature (1)..(179): Homolog of NCBI NO: 7485487 NR Description: probable squamosa-promoter binding protein
  misc_feature (4)..(248): Homolog of NCBI NO: 21536841 NR Description: unknown [Arabidopsis thaliana]
  misc_feature (1)..(248): Homolog of NCBI NO: 18423163 NR Description: expressed protein [Arabidopsis thaliana]
METMEGSSRYGMYRTKGEFSVDLKLGQVGNSGRESSVLTKSKDGGAVGVSKMISSSSSGSAKRARSLSNGTQTVSCLVDGCHSDLSNCRDYHRRHKVCEVHSKTAQVTIGGQKQRFCQQCSRFHSLEEFDEGKRSCRKRLDGHNRRRRKPQPEVVLTRSASFLSNYHQGTQLLSFSSSHVYPSTTVVNPTLGGVVTSGDVRLHGQNHHHHQMHLVDKQDLFLGSSPTGYKEGKHLAFMQGDHTLNNQSPHLPGASVGPAQMFLRTSPYSESGGLRCKMFCDSLTGSAHGNTSRALSLLSSPPQPHSPGNGLNQMVNPHSPLMQPLGLSLHDNSLGSVDPVLGPNGSDHSSSMHHIGSNGSQVNEAPPLFPFQWE

SEQ ID NO: 51482 - protein, 371 aa, Glycine max
  peptide (1)..(371): Ceres Seq. ID no. 15171389
  misc_feature (73)..(150): Pfam Name: SBP domain Pfam Description: SBP domain
  misc_feature (39)..(149): Homolog of NCBI NO: 15028115 NR Description: putative squamosa-promoter binding protein
  misc_feature (47)..(155): Homolog of NCBI NO: 25406455 NR Description: unknown protein F14G6.18 [imported] - Arabidopsis
  misc_feature (1)..(176): Homolog of NCBI NO: 15232241 NR Description: squamosa promoter binding protein-related 12
  misc_feature (23)..(156): Homolog of NCBI NO: 15230904 NR Description: squamosa promoter-binding protein homolog
  misc_feature (51)..(182): Homolog of NCBI NO: 25352584 NR Description: squamosa promoter binding protein-homolog 4
  misc_feature (44)..(149): Homolog of NCBI NO: 25456646 NR Description: squamosa promoter binding protein 2
  misc_feature (44)..(149): Homolog of NCBI NO: 15239820 NR Description: squamosa promoter binding protein-related 2
  misc_feature (1)..(176): Homolog of NCBI NO: 7485487 NR Description: probable squamosa-promoter binding protein
  misc_feature (1)..(245): Homolog of NCBI NO: 21536841 NR Description: unknown [Arabidopsis thaliana]
  misc_feature (1)..(245): Homolog of NCBI NO: 18423163 NR Description: expressed protein [Arabidopsis thaliana]
MEGSSRYGMYRTKGEFSVDLKLGQVGNSGRESSVLTKSKDGGAVGVSKMISSSSSGSAKRARSLSNGTQTVSCLVDGCHSDLSNCRDYHRRHKVCEVHSKTAQVTIGGQKQRFCQQCSRFHSLEEFDEGKRSCRKRLDGHNRRRRKPQPEVVLTRSASFLSNYHQGTQLLSFSSSHVYPSTTVVNPTLGGVVTSGDVRLHGQNHHHHQMHLVDKQDLFLGSSPTGYKEGKHLAFMQGDHTLNNQSPHLPGASVGPAQMFLRTSPYSESGGLRCKMFCDSLTGSAHGNTSRALSLLSSPPQPHSPGNGLNQMVNPHSPLMQPLGLSLHDNSLGSVDPVLGPNGSDHSSSMHHIGSNGSQVNEAPPLFPFQWE

SEQ ID NO: 51483 - DNA, 647 bp, Glycine max
  misc_feature (1)..(647): Ceres Seq. ID no. 13638509
aatcgaaaaactcacaaaacaatataacttaattgccttaaggaacgttcgagaccacagaggtttctctagtcttcttctgtggagagcttgttttctcttgttcattcatctcacttccaattaaggaacaagctttccaccaatttgaatcaccaatggctcgctctttctccaacctcaaggttctctctgctcttgtcgccgacggattctccaacactctcaccaggcgtgggtacgcagtagcgacacaaagcgcaacaagaggaggagcagcctccatcagcggcaagtcaggggaagacaaggtactaggaggaggtgctgaaaaggtttcgtgggtcccagaccctgtcactggttactacaaaccggagaacatcaaagagattgatgttgctgagctgagagccacggttttgggcaaaaaattcaaccactaggctctacttaatttcaataattaacctttttggtctcacgtgaatatgttatatgatatatgaagttcacagaaccttcggggattattcagcatggggtttttttcttgtatttctctcttgagaatttggactagcatatgaccaaattaatgtttactagtgtgattggatctcccgttgaaaactcaataaagtggg

SEQ ID NO: 51484 - protein, 95 aa, Glycine max
  peptide (1)..(95): Ceres Seq. ID no. 15220420
  misc_feature (1)..(90): Pfam Name: Late embryogenesis abundant protein Pfam Description: Late embryogenesis abundant protein
  misc_feature (1)..(94): Homolog of NCBI NO: 416639 NR Description: INDOLE-3-ACETIC ACID INDUCED PROTEIN ARG2
MARSFSNLKVLSALVADGFSNTLTRRGYAVATQSATRGGAASISGKSGEDKVLGGGAEKVSWVPDPVTGYYKPENIKEIDVAELRATVLGKKFNH

SEQ ID NO: 51485 - DNA, 1546 bp, Glycine max
  misc_feature (1)..(1546): Ceres Seq. ID no. 15171355
agcattaacatgtacattgagtattccccttcccaatctcaaacggcaaaggtgccacatacatttcctgcttctcacctgatatttttccaatttgtttaatcttcctttcttttctctacccattttcttcttcttcttctcccctccttttttccttcttctaccagcttctagaacaaggatgtgcccatttcctgcttacttgaatctcaaacacaaaactgaatctttgacaacaatttcaagattttcccaccaacccaccacagcaaagcacctggtcgcttcaaagatctgatttttagttctttggggtggggtttctaccgtttttccttccaccattggcacctgcagcagaaccaaattttgaacaaccagaatggtcaacactttatggtcactttgtgtggtttaaacttgttggattcttggtgggtttagtttaatttttgactgaacgaatgagatcttgatgagggttggaaccagtttccttgcactgctctcactgttgccactgcttctttctcttcaattttcaagtgctcagcttccagctgacactgacaacatctcatcacgcacccttgatgccattctccaagattgcgcctttaaggcatttttgaggccaaaaactggggtaccctatgatggcaaagtgcccagaagcctaaatgggattagagtttcagcaatgaggctcaggagtggtagtttgaggacaagaggtgttgaaagctataaagagtttcagatcccaattggggtttttgaacagccttatgtagagaggctggtttttgtgtaccataacttaggcaattggtctgagaagttttatcctttgcctggttacatatatttggctcctgttttaggtctaatgtcatatagtggtgccaatttgtctgattctgagttgcctgaattggacataagagcttctgataagccaattttgatcaagttccctcatgtggaatcagcaccattagggtcagtgccaacgtgtgtgtactttgatctacatggttcagtgcaatttgacatcctattacatgggaatgtttgttcaactttccaacaagggcacttctctattgttgtggagtctaatgccccttccccagcacctgctgctgttgctgttgctgctgatgttgggagaagtggtagtgggaggaacaattccatggtgtggataattgttgcatctttggttggtggatgcttcttgttgattatgttgagtttattggttgctaaagtgaggagaaccagacaagggatgaagatccagcaattggaatgggcagctgagagcaatgaaactttgcagattgcatctattgggggcaccaaagcaccattggcaatagggactcgcacaagaccaaccattgaaaatgattacataccttagatttgagggattcttgtaggaccaatttttttcttttttttttcttcttgcttggtattgtaatttttgtgttcatacttgataatgagttaaaaaaaaattctttccttgtcc

SEQ ID NO: 51486 - protein, 317 aa, Glycine max
  peptide (1)..(317): Ceres Seq. ID no. 15171356
  misc_feature (39)..(159): Homolog of NCBI NO: 38345868 NR Description: OSJNBa0064M23.10 [Oryza sativa (japonica
  misc_feature (7)..(315): Homolog of NCBI NO: 21594262 NR Description: unknown [Arabidopsis thaliana]
  misc_feature (7)..(315): Homolog of NCBI NO: 18398173 NR Description: expressed protein [Arabidopsis thaliana]
  misc_feature (13)..(315): Homolog of NCBI NO: 27542756 NR Description: hypothetical protein-like protein [Sorghum
  misc_feature (10)..(315): Homolog of NCBI NO: 27542758 NR Description: hypothetical protein-like protein [Sorghum
MRVGTSFLALLSLLPLLLSLQFSSAQLPADTDNISSRTLDAILQDCAFKAFLRPKTGVPYDGKVPRSLNGIRVSAMRLRSGSLRTRGVESYKEFQIPIGVFEQPYVERLVFVYHNLGNWSEKFYPLPGYIYLAPVLGLMSYSGANLSDSELPELDIRASDKPILIKFPHVESAPLGSVPTCVYFDLHGSVQFDILLHGNVCSTFQQGHFSIVVESNAPSPAPAAVAVAADVGRSGSGRNNSMVWIIVASLVGGCFLLIMLSLLVAKVRRTRQGMKIQQLEWAAESNETLQIASIGGTKAPLAIGTRTRPTIENDYIP

SEQ ID NO: 51487 - protein, 242 aa, Glycine max
  peptide (1)..(242): Ceres Seq. ID no. 15171357
  misc_feature (1)..(84): Homolog of NCBI NO: 38345868 NR Description: OSJNBa0064M23.10 [Oryza sativa (japonica
  misc_feature (1)..(240): Homolog of NCBI NO: 21594262 NR Description: unknown [Arabidopsis thaliana]
  misc_feature (1)..(240): Homolog of NCBI NO: 18398173 NR Description: expressed protein [Arabidopsis thaliana]
  misc_feature (1)..(240): Homolog of NCBI NO: 27542756 NR Description: hypothetical protein-like protein [Sorghum
  misc_feature (1)..(240): Homolog of NCBI NO: 27542758 NR Description: hypothetical protein-like protein [Sorghum
MRLRSGSLRTRGVESYKEFQIPIGVFEQPYVERLVFVYHNLGNWSEKFYPLPGYIYLAPVLGLMSYSGANLSDSELPELDIRASDKPILIKFPHVESAPLGSVPTCVYFDLHGSVQFDILLHGNVCSTFQQGHFSIVVESNAPSPAPAAVAVAADVGRSGSGRNNSMVWIIVASLVGGCFLLIMLSLLVAKVRRTRQGMKIQQLEWAAESNETLQIASIGGTKAPLAIGTRTRPTIENDYIP

SEQ ID NO: 51488 - protein, 179 aa, Glycine max
  peptide (1)..(179): Ceres Seq. ID no. 15171358
  misc_feature (1)..(21): Homolog of NCBI NO: 38345868 NR Description: OSJNBa0064M23.10 [Oryza sativa (japonica
  misc_feature (1)..(177): Homolog of NCBI NO: 21594262 NR Description: unknown [Arabidopsis thaliana]
  misc_feature (1)..(177): Homolog of NCBI NO: 18398173 NR Description: expressed protein [Arabidopsis thaliana]
  misc_feature (1)..(177): Homolog of NCBI NO: 27542756 NR Description: hypothetical protein-like protein [Sorghum
  misc_feature (1)..(177): Homolog of NCBI NO: 27542758 NR Description: hypothetical protein-like protein [Sorghum
MSYSGANLSDSELPELDIRASDKPILIKFPHVESAPLGSVPTCVYFDLHGSVQFDILLHGNVCSTFQQGHFSIVVESNAPSPAPAAVAVAADVGRSGSGRNNSMVWIIVASLVGGCFLLIMLSLLVAKVRRTRQGMKIQQLEWAAESNETLQIASIGGTKAPLAIGTRTRPTIENDYIP

SEQ ID NO: 51489 - DNA, 1154 bp, Glycine max
  misc_feature (1)..(1154): Ceres Seq. ID no. 12582736
aactatttcagttgttcggctggctataaaatcctcttaaccagttgttgctgctgcgttgcacttcagtttacagctcccgaaaatggctcctccaagaggtcgtggtggttttggtggtggcggtgggttcaggggtggtggtaggggtgacagaggcagaggaaggggcggtggaggaagaggaggagacaggggcactcccttcaaagctagaggaggtggcagaggtggtggtggccgtggcggaggcaggggtggtggccgtggtggtggcagaggtggaatgaagggaggtagcaaggttgtggttcagccccatagacatgatggtattttcattgccaagggtaaagaagacgctcttgttactaagaatcttgttcctggtgaagctgtttacaatgagaaaaggattactgttcagaacgaagatggttccaaagatgagtacagagtttggaatccttttcgatccaagttggctgctgccatccttggtggagttgacaacatatggattaaacctggagccagagtcctttacctaggagctgcttctggaaccactgtttctcatgtatcagacgttgttggccctactggagttgtctatgcagtagaattttcccatagaagtggacgtgacctggttaatatggcaaagaagcgaactaatgttattcccattattgaagatgctagacatccagctaagtataggatgctggtcggaatggttgatgtcatattttctgatgttgctcagcccgatcaggcaaggattttggggctgaatgcttcatattatctgaaagcaggaggtcattttgttatttcaatcaaggctaactgcatagactccacagtccctgccgaggcagtgtttgaaagcgaagtgaacaagttgaaggcagatcaattcaaaccattcgagcaagtcacccttgaaccatttgagagggaccatgcctgtgtggttggtggatacagaatgcccaagaagaaaaaagatgctgctgagtagattgctttccggtagccagtaggcttaatgtcatttcaggagattgtgttaattttgttttgaaacctcggttatcaaacatactttgtaccttttctatagtagtaatgtagtcaagtttgccttc

SEQ ID NO: 51490 - protein, 313 aa, Glycine max
  peptide (1)..(313): Ceres Seq. ID no. 12582737
  misc_feature (72)..(304): Pfam Name: Fibrillarin Pfam Description: Fibrillarin
  misc_feature (1)..(307): Homolog of NCBI NO: 31200907 NR Description: ENSANGP00000015622 [Anopheles gambiae]
  misc_feature (1)..(309): Homolog of NCBI NO: 38566188 NR Description: Fibrillarin [Silurana tropicalis]
  misc_feature (1)..(309): Homolog of NCBI NO: 27924365 NR Description: Unknown (protein for IMAGE:5543421) [Xenopus
  misc_feature (5)..(308): Homolog of NCBI NO: 17647425 NR Description: Fibrillarin CG9888-PA
  misc_feature (5)..(308): Homolog of NCBI NO: 25012804 NR Description: RE72617p [Drosophila melanogaster]
  misc_feature (5)..(308): Homolog of NCBI NO: 27374264 NR Description: Fib-PA [Drosophila erecta]
  misc_feature (1)..(312): Homolog of NCBI NO: 6003681 NR Description: fibrillarin homolog [Arabidopsis thaliana]
  misc_feature (1)..(312): Homolog of NCBI NO: 30696189 NR Description: fibrillarin 1 (Fib1) (SKIP7) [Arabidopsis
  misc_feature (1)..(311): Homolog of NCBI NO: 15028155 NR Description: putative fibrillarin 2 protein AtFib2
  misc_feature (1)..(311): Homolog of NCBI NO: 18416588 NR Description: fibrillarin 2 (AtFib2)
MAPPRGRGGFGGGGGFRGGGRGDRGRGRGGGGRGGDRGTPFKARGGGRGGGGRGGGRGGGRGGGRGGMKGGSKVVVQPHRHDGIFIAKGKEDALVTKNLVPGEAVYNEKRITVQNEDGSKDEYRVWNPFRSKLAAAILGGVDNIWIKPGARVLYLGAASGTTVSHVSDVVGPTGVVYAVEFSHRSGRDLVNMAKKRTNVIPIIEDARHPAKYRMLVGMVDVIFSDVAQPDQARILGLNASYYLKAGGHFVISIKANCIDSTVPAEAVFESEVNKLKADQFKPFEQVTLEPFERDHACVVGGYRMPKKKKDAAE

SEQ ID NO: 51491 - protein, 246 aa, Glycine max
  peptide (1)..(246): Ceres Seq. ID no. 12582738
  misc_feature (5)..(237): Pfam Name: Fibrillarin Pfam Description: Fibrillarin
  misc_feature (1)..(240): Homolog of NCBI NO: 31200907 NR Description: ENSANGP00000015622 [Anopheles gambiae]
  misc_feature (1)..(242): Homolog of NCBI NO: 38566188 NR Description: Fibrillarin [Silurana tropicalis]
  misc_feature (1)..(242): Homolog of NCBI NO: 27924365 NR Description: Unknown (protein for IMAGE:5543421) [Xenopus
  misc_feature (1)..(241): Homolog of NCBI NO: 17647425 NR Description: Fibrillarin CG9888-PA
  misc_feature (1)..(241): Homolog of NCBI NO: 25012804 NR Description: RE72617p [Drosophila melanogaster]
  misc_feature (1)..(241): Homolog of NCBI NO: 27374264 NR Description: Fib-PA [Drosophila erecta]
  misc_feature (1)..(245): Homolog of NCBI NO: 6003681 NR Description: fibrillarin homolog [Arabidopsis thaliana]
  misc_feature (1)..(245): Homolog of NCBI NO: 30696189 NR Description: fibrillarin 1 (Fib1) (SKIP7) [Arabidopsis
  misc_feature (1)..(244): Homolog of NCBI NO: 15028155 NR Description: putative fibrillarin 2 protein AtFib2
  misc_feature (1)..(244): Homolog of NCBI NO: 18416588 NR Description: fibrillarin 2 (AtFib2)
MKGGSKVVVQPHRHDGIFIAKGKEDALVTKNLVPGEAVYNEKRITVQNEDGSKDEYRVWNPFRSKLAAAILGGVDNIWIKPGARVLYLGAASGTTVSHVSDVVGPTGVVYAVEFSHRSGRDLVNMAKKRTNVIPIIEDARHPAKYRMLVGMVDVIFSDVAQPDQARILGLNASYYLKAGGHFVISIKANCIDSTVPAEAVFESEVNKLKADQFKPFEQVTLEPFERDHACVVGGYRMPKKKKDAAE

SEQ ID NO: 51492 - DNA, 1223 bp, Glycine max
  misc_feature (1)..(1223): Ceres Seq. ID no. 15171370
actccttcctcttcctctctctcgtccattttagttgtaagactaagatctcatcttagattccattttgtctcttcattgcccccaaaataactttattttctctgaattattgcctacagcaactttgaataattctccttcgtatcaagtcttcctcatcttcaccacctttttatatttatgtgtctaagaacataaactaaaaaaccaaggcgagtgaaagaaaaaaaatgtcaggtgtgtctctagcagtgtctggtccaccagcagcaacagtggctgaagcagcaggtacaaagcctaaacgaagaacagaacaggcaccaatgggtggcatgatgggttcactgcgcgtgatagaacttcagctggtggccttcatcttggtgttctcagcaagtggcctcgtcccactccttgatctagtgttccctgcattcgcctctgcatacatcttggcactttcacaattcgcatttccatcggcgtcttcgtcggggactgagatcttcaaagggagcagattgttccgaatgtatgttgtttttggcaccaccgtggggctgttcttgccgctggcttacgtgcttggtgggtttgcaagaggggatgagcatgcagtgcgttctgccaccccgcacttgttcttgctatcgtttcagatactcactgagaacattattggtggtttgtctctgttttcgccacccgtgagggcgttggtgccaatcatctacacaattcggaggatctttgtggatattgattggattcatgatgtctggctcaacaagactttgcctgtcaatgccaaatttcaggacttggcatggtattggttcggaaagggtctggcagtggccaatctggcttatttctccattaatctatttgggttcttgatacccaggttccttccaagagcttttgagaggtatttccaagagaagggagagatctataccaagtcagcagaggataaaagatctgtggttgtcaacagaacccaattatcagaaaagaagacagattaagagctatagccaattttgacttcacttgcaattttaaacactttcagcattttttttccttagaaaatagtaatgaatgtgtatgatgatatgtgagcctggacttaaaaatctggctctccgttacattatgaaactatatatggcttttggataaattttatgtatcatacaggttaattcaat

SEQ ID NO: 51493 - protein, 267 aa, Glycine max
  peptide (1)..(267): Ceres Seq. ID no. 15171371
  misc_feature (1)..(104): Homolog of NCBI NO: 26449376 NR Description: unknown protein [Arabidopsis thaliana]
  misc_feature (22)..(237): Homolog of NCBI NO: 15237854 NR Description: expressed protein [Arabidopsis thaliana]
  misc_feature (3)..(237): Homolog of NCBI NO: 37536624 NR Description: unknown protein [Oryza sativa (japonica
  misc_feature (44)..(237): Homolog of NCBI NO: 18423389 NR Description: expressed protein [Arabidopsis thaliana]
  misc_feature (44)..(237): Homolog of NCBI NO: 15146256 NR Description: AT5g52420/K24M7_17 [Arabidopsis thaliana]
  misc_feature (1)..(267): Homolog of NCBI NO: 38347228 NR Description: OSJNBa0044M19.10 [Oryza sativa (japonica
  misc_feature (1)..(267): Homolog of NCBI NO: 15217782 NR Description: expressed protein [Arabidopsis thaliana]
MSGVSLAVSGPPAATVAEAAGTKPKRRTEQAPMGGMMGSLRVIELQLVAFILVFSASGLVPLLDLVFPAFASAYILALSQFAFPSASSSGTEIFKGSRLFRMYVVFGTTVGLFLPLAYVLGGFARGDEHAVRSATPHLFLLSFQILTENIIGGLSLFSPPVRALVPIIYTIRRIFVDIDWIHDVWLNKTLPVNAKFQDLAWYWFGKGLAVANLAYFSINLFGFLIPRFLPRAFERYFQEKGEIYTKSAEDKRSVVVNRTQLSEKKTD

SEQ ID NO: 51494 - protein, 235 aa, Glycine max
  peptide (1)..(235): Ceres Seq. ID no. 15171372
  misc_feature (1)..(72): Homolog of NCBI NO: 26449376 NR Description: unknown protein [Arabidopsis thaliana]
  misc_feature (1)..(205): Homolog of NCBI NO: 15237854 NR Description: expressed protein [Arabidopsis thaliana]
  misc_feature (1)..(205): Homolog of NCBI NO: 37536624 NR Description: unknown protein [Oryza sativa (japonica
  misc_feature (12)..(205): Homolog of NCBI NO: 18423389 NR Description: expressed protein [Arabidopsis thaliana]
  misc_feature (12)..(205): Homolog of NCBI NO: 15146256 NR Description: AT5g52420/K24M7_17 [Arabidopsis thaliana]
  misc_feature (1)..(235): Homolog of NCBI NO: 38347228 NR Description: OSJNBa0044M19.10 [Oryza sativa (japonica
  misc_feature (1)..(235): Homolog of NCBI NO: 15217782 NR Description: expressed protein [Arabidopsis thaliana]
MGGMMGSLRVIELQLVAFILVFSASGLVPLLDLVFPAFASAYILALSQFAFPSASSSGTEIFKGSRLFRMYVVFGTTVGLFLPLAYVLGGFARGDEHAVRSATPHLFLLSFQILTENIIGGLSLFSPPVRALVPIIYTIRRIFVDIDWIHDVWLNKTLPVNAKFQDLAWYWFGKGLAVANLAYFSINLFGFLIPRFLPRAFERYFQEKGEIYTKSAEDKRSVVVNRTQLSEKKTD

SEQ ID NO: 51495 - protein, 232 aa, Glycine max
  peptide (1)..(232): Ceres Seq. ID no. 15171373
  misc_feature (1)..(69): Homolog of NCBI NO: 26449376 NR Description: unknown protein [Arabidopsis thaliana]
  misc_feature (1)..(202): Homolog of NCBI NO: 15237854 NR Description: expressed protein [Arabidopsis thaliana]
  misc_feature (1)..(202): Homolog of NCBI NO: 37536624 NR Description: unknown protein [Oryza sativa (japonica
  misc_feature (9)..(202): Homolog of NCBI NO: 18423389 NR Description: expressed protein [Arabidopsis thaliana]
  misc_feature (9)..(202): Homolog of NCBI NO: 15146256 NR Description: AT5g52420/K24M7_17 [Arabidopsis thaliana]
  misc_feature (1)..(232): Homolog of NCBI NO: 38347228 NR Description: OSJNBa0044M19.10 [Oryza sativa (japonica
  misc_feature (1)..(232): Homolog of NCBI NO: 15217782 NR Description: expressed protein [Arabidopsis thaliana]
MMGSLRVIELQLVAFILVFSASGLVPLLDLVFPAFASAYILALSQFAFPSASSSGTEIFKGSRLFRMYVVFGTTVGLFLPLAYVLGGFARGDEHAVRSATPHLFLLSFQILTENIIGGLSLFSPPVRALVPIIYTIRRIFVDIDWIHDVWLNKTLPVNAKFQDLAWYWFGKGLAVANLAYFSINLFGFLIPRFLPRAFERYFQEKGEIYTKSAEDKRSVVVNRTQLSEKKTD

SEQ ID NO: 51496 - DNA, 1061 bp, Glycine max
  misc_feature (1)..(1061): Ceres Seq. ID no. 13594515
ctagaacatcctaatcgaaaaatttttcaactttgcattcgtctagttgtggaatccttcttaatagtactgttttagaattgctaagatgaagtcaagttttgaagaattgaagaagaagaagaagaaaggcgaaggagagcattcgaaggcataaacataaagaaattgaagataatgcgaaccctttgcgacgtatgcgagagcgccgctgccattctcttctgcgccgctgatgaggccgctctctgctccgcttgtgaccacaagatccatatgtgtaacaaacttgctagtaggcatgttcgagttggccttgctgaccccactgatgttccacgctgtgacatatgtgaaaatgcacctgctttcttttactgtgagatagatggtagttcgctgtgtctgcaatgtgatatgattgtgcatgttggtggtaaaagaacccatggaagatatcttctattgaggcaaagagctcagtttccaggtgataaacctgcccaaatggaagaactagagctgcaacctatggatcaaaatgaatcgagaagggatgaaagtcagtcactcaagctaaaaacaagagatagtcagcagaatcacagtgtctcaccttttccaaggcaagaaaataatattgatggtcatggaaaaatggataaaaagttaattgatcttaataccaggccactgcggttaaatggatcagcaccaaacaaccaggaacaatgcatggatattttaagaggcaataatcatgaatctgccagtgtgccaccagtagaatccttcaaacaagagtctgagaagtaacaaaggtacaacatatagggtgtgccagtgtgggcagaggctacagaaatattatgtttactcaaatttcttttacactgttgaccttgtttatgtgaatcttgtttttttttttgcttaaaatttgaattgtttggctgcagacctaattaatgacggaaaatagttgctttcatatggatgagctgcataaacaaggttactactgcataaattcgagggtataacataaattgttgtccagg

SEQ ID NO: 51497 - protein, 212 aa, Glycine max
  peptide (1)..(212): Ceres Seq. ID no. 15221370
  misc_feature (51)..(96): Pfam Name: B-box zinc finger Pfam Description: B-box zinc finger
  misc_feature (1)..(149): Homolog of NCBI NO: 15221367 NR Description: salt-tolerance protein [Arabidopsis thaliana]
  misc_feature (1)..(102): Homolog of NCBI NO: 25412029 NR Description: hypothetical protein At2g21320 [imported] -
  misc_feature (136)..(212): Homolog of NCBI NO: 38603920 NR Description: At4g38960 [Arabidopsis thaliana]
  misc_feature (34)..(110): Homolog of NCBI NO: 38603920 NR Description: At4g38960 [Arabidopsis thaliana]
  misc_feature (136)..(212): Homolog of NCBI NO: 7485798 NR Description: hypothetical protein F19H22.60 - Arabidopsis
  misc_feature (1)..(92): Homolog of NCBI NO: 7485798 NR Description: hypothetical protein F19H22.60 - Arabidopsis
  misc_feature (151)..(196): Homolog of NCBI NO: 18399657 NR Description: CONSTANS B-box zinc finger family protein
  misc_feature (1)..(129): Homolog of NCBI NO: 18399657 NR Description: CONSTANS B-box zinc finger family protein
  misc_feature (136)..(212): Homolog of NCBI NO: 22329245 NR Description: CONSTANS B-box zinc finger family protein
  misc_feature (1)..(110): Homolog of NCBI NO: 22329245 NR Description: CONSTANS B-box zinc finger family protein
MRTLCDVCESAAAILFCAADEAALCSACDHKIHMCNKLASRHVRVGLADPTDVPRCDICENAPAFFYCEIDGSSLCLQCDMIVHVGGKRTHGRYLLLRQRAQFPGDKPAQMEELELQPMDQNESRRDESQSLKLKTRDSQQNHSVSPFPRQENNIDGHGKMDKKLIDLNTRPLRLNGSAPNNQEQCMDILRGNNHESASVPPVESFKQESEK

SEQ ID NO: 51498 - protein, 179 aa, Glycine max
  peptide (1)..(179): Ceres Seq. ID no. 15221371
  misc_feature (18)..(63): Pfam Name: B-box zinc finger Pfam Description: B-box zinc finger
  misc_feature (1)..(116): Homolog of NCBI NO: 15221367 NR Description: salt-tolerance protein [Arabidopsis thaliana]
  misc_feature (1)..(69): Homolog of NCBI NO: 25412029 NR Description: hypothetical protein At2g21320 [imported] -
  misc_feature (103)..(179): Homolog of NCBI NO: 38603920 NR Description: At4g38960 [Arabidopsis thaliana]
  misc_feature (1)..(77): Homolog of NCBI NO: 38603920 NR Description: At4g38960 [Arabidopsis thaliana]
  misc_feature (103)..(179): Homolog of NCBI NO: 7485798 NR Description: hypothetical protein F19H22.60 - Arabidopsis
  misc_feature (1)..(59): Homolog of NCBI NO: 7485798 NR Description: hypothetical protein F19H22.60 - Arabidopsis
  misc_feature (118)..(163): Homolog of NCBI NO: 18399657 NR Description: CONSTANS B-box zinc finger family protein
  misc_feature (1)..(96): Homolog of NCBI NO: 18399657 NR Description: CONSTANS B-box zinc finger family protein
  misc_feature (103)..(179): Homolog of NCBI NO: 22329245 NR Description: CONSTANS B-box zinc finger family protein
  misc_feature (1)..(77): Homolog of NCBI NO: 22329245 NR Description: CONSTANS B-box zinc finger family protein
MCNKLASRHVRVGLADPTDVPRCDICENAPAFFYCEIDGSSLCLQCDMIVHVGGKRTHGRYLLLRQRAQFPGDKPAQMEELELQPMDQNESRRDESQSLKLKTRDSQQNHSVSPFPRQENNIDGHGKMDKKLIDLNTRPLRLNGSAPNNQEQCMDILRGNNHESASVPPVESFKQESEK

SEQ ID NO: 51499 - protein, 132 aa, Glycine max
  peptide (1)..(132): Ceres Seq. ID no. 15221372
  misc_feature (1)..(69): Homolog of NCBI NO: 15221367 NR Description: salt-tolerance protein [Arabidopsis thaliana]
  misc_feature (1)..(22): Homolog of NCBI NO: 25412029 NR Description: hypothetical protein At2g21320 [imported] -
  misc_feature (56)..(132): Homolog of NCBI NO: 38603920 NR Description: At4g38960 [Arabidopsis thaliana]
  misc_feature (1)..(30): Homolog of NCBI NO: 38603920 NR Description: At4g38960 [Arabidopsis thaliana]
  misc_feature (56)..(132): Homolog of NCBI NO: 7485798 NR Description: hypothetical protein F19H22.60 - Arabidopsis
  misc_feature (1)..(12): Homolog of NCBI NO: 7485798 NR Description: hypothetical protein F19H22.60 - Arabidopsis
  misc_feature (71)..(116): Homolog of NCBI NO: 18399657 NR Description: CONSTANS B-box zinc finger family protein
  misc_feature (1)..(49): Homolog of NCBI NO: 18399657 NR Description: CONSTANS B-box zinc finger family protein
  misc_feature (56)..(132): Homolog of NCBI NO: 22329245 NR Description: CONSTANS B-box zinc finger family protein
  misc_feature (1)..(30): Homolog of NCBI NO: 22329245 NR Description: CONSTANS B-box zinc finger family protein
MIVHVGGKRTHGRYLLLRQRAQFPGDKPAQMEELELQPMDQNESRRDESQSLKLKTRDSQQNHSVSPFPRQENNIDGHGKMDKKLIDLNTRPLRLNGSAPNNQEQCMDILRGNNHESASVPPVESFKQESEK

SEQ ID NO: 51500 - DNA, 1847 bp, Glycine max
  misc_feature (1)..(1847): Ceres Seq. ID no. 15171430
aagtcaaccagttgtggttttctttcgtccccctctctcccttgatggtcaaaagtcaaaaaagcatgaagcttccaagatcacccacaaggcaatcacgttcacacacacagaaaacaaaagaaacaagctagactttggaacaggaagccagcatttgcattcaataaggctgttaaaaaccgcgcttgacagctaacccttcatgtggaaatagttcctttcacacttgcattgtttttttttttttttttctccttttcacgggctttctcttcttttcctctggcttcatcatctctcatctgcaccccttttgagaacttcaacttgttacctaattactctactccccctctcttgcttctgtgttcttcttcttcgcttctctcttcatggggtgctgcttaagtgccaggatcaaagctgagagccctccacgcaatggtttgagttcaaaggatggtaacaaggaagaagatggcttaagcagcaaggtctcaactccctccgatcctccaactccacggacggagggagagatcttgaagtcttcaaacatgaagagcttcaacttcagtgagctaaaaactgctacaaggaactttcgtccggatagtgtggtgggtgaaggtgggtttggttgtgtttttaaggggtggattgatgaacagacacttgcaccagttagaccagggactggcgtggtcattgctgttaagaggcttaaccaagaaggtctgcagggacacagtgaatggttgacagaaattaattatctggggcagctgcgtcatcctaatcttgtgaaactgattggttactgcttagaggacgatcaacggcttttggtgtatgagtttttgaccaaaggaagtttggataatcatttatttaggagagcttcttactttcaaccactttcttggaacttccgtatgaaggttgctcttgatgctgctaagggtcttgcatatcttcatagcgatgaagcaaaagtgatatatcgagacttcaaagcttcaaatatcttacttgattcgaattacaatgcaaaactttctgattttggcttggcaaaggatggaccagctggtgataagagccatgtctctacaagggtaatgggcacatatggctatgctgctcctgaatatatggccacaggtcacttgacaaagaagagtgatgtatacagcttcggggttgttctgcttgaaattatgtccggcaaacgtgcacttgacagcaacaggccaagtggggagcacaatttaattgaatgggccaaaccttacctcagcaacaagcgcaggatcttccaagtcatggatgcgcgcattgaaggccaatacacgttgcgcgaatcaatgaaagtagccaaccttgccattcaatgtctgtctgtggaaccaagatttagaccaaaaatggatgaagtggtgagagcattagaggaacttcaggattcagaagacagagctggaggggtgggaagctctcgagatcaaactgctagaaggagtggccatagctcaagcagcagtgggcctagacaacatagaggtagacaacatgaaacaacaaggaagtgaaaagtgaatgttgatttcatgctgtgatcatctgattttgctagagttggtacattgtatttacgtgtatcatgatgaacttaagcatggctctagatgtctgattgctgtacagttgttgattgagcaataatattgaaatcttcatttcttccgatacttctcttcccttcccacccatcatctatcgttgtaaaataggaatattttcttatgtcatgctatttattaatcagatgtggtgataagatg

SEQ ID NO: 51501 - protein, 399 aa, Glycine max
  peptide (1)..(399): Ceres Seq. ID no. 15171431
  misc_feature (1)..(397): Homolog of NCBI NO: 28804505 NR Description: serine/threonine protein kinase [Aster tripolium]
  misc_feature (1)..(356): Homolog of NCBI NO: 166809 NR Description: protein kinase
  misc_feature (1)..(356): Homolog of NCBI NO: 15241749 NR Description: protein kinase, putative [Arabidopsis thaliana]
  misc_feature (1)..(373): Homolog of NCBI NO: 34897424 NR Description: putative protein kinase [Oryza sativa (japonica
  misc_feature (1)..(383): Homolog of NCBI NO: 15227001 NR Description: protein kinase (APK1b) [Arabidopsis thaliana]
  misc_feature (258)..(383): Homolog of NCBI NO: 8778537 NR Description: F22G5.5 [Arabidopsis thaliana]
  misc_feature (1)..(258): Homolog of NCBI NO: 8778537 NR Description: F22G5.5 [Arabidopsis thaliana]
  misc_feature (1)..(383): Homolog of NCBI NO: 15222437 NR Description: protein kinase (APK1a) [Arabidopsis thaliana]
  misc_feature (1)..(390): Homolog of NCBI NO: 34906046 NR Description: putative serine/threonine-specific protein kinase
  misc_feature (1)..(382): Homolog of NCBI NO: 14719339 NR Description: putative protein kinase [Oryza sativa]
MGCCLSARIKAESPPRNGLSSKDGNKEEDGLSSKVSTPSDPPTPRTEGEILKSSNMKSFNFSELKTATRNFRPDSVVGEGGFGCVFKGWIDEQTLAPVRPGTGVVIAVKRLNQEGLQGHSEWLTEINYLGQLRHPNLVKLIGYCLEDDQRLLVYEFLTKGSLDNHLFRRASYFQPLSWNFRMKVALDAAKGLAYLHSDEAKVIYRDFKASNILLDSNYNAKLSDFGLAKDGPAGDKSHVSTRVMGTYGYAAPEYMATGHLTKKSDVYSFGVVLLEIMSGKRALDSNRPSGEHNLIEWAKPYLSNKRRIFQVMDARIEGQYTLRESMKVANLAIQCLSVEPRFRPKMDEVVRALEELQDSEDRAGGVGSSRDQTARRSGHSSSSSGPRQHRGRQHETTRK

SEQ ID NO: 51502 - protein, 344 aa, Glycine max
  peptide (1)..(344): Ceres Seq. ID no. 15171432
  misc_feature (1)..(342): Homolog of NCBI NO: 28804505 NR Description: serine/threonine protein kinase [Aster tripolium]
  misc_feature (1)..(301): Homolog of NCBI NO: 166809 NR Description: protein kinase
  misc_feature (1)..(301): Homolog of NCBI NO: 15241749 NR Description: protein kinase, putative [Arabidopsis thaliana]
  misc_feature (1)..(318): Homolog of NCBI NO: 34897424 NR Description: putative protein kinase [Oryza sativa (japonica
  misc_feature (1)..(328): Homolog of NCBI NO: 15227001 NR Description: protein kinase (APK1b) [Arabidopsis thaliana]
  misc_feature (203)..(328): Homolog of NCBI NO: 8778537 NR Description: F22G5.5 [Arabidopsis thaliana]
  misc_feature (1)..(203): Homolog of NCBI NO: 8778537 NR Description: F22G5.5 [Arabidopsis thaliana]
  misc_feature (1)..(328): Homolog of NCBI NO: 15222437 NR Description: protein kinase (APK1a) [Arabidopsis thaliana]
  misc_feature (1)..(335): Homolog of NCBI NO: 34906046 NR Description: putative serine/threonine-specific protein kinase
  misc_feature (1)..(327): Homolog of NCBI NO: 14719339 NR Description: putative protein kinase [Oryza sativa]
MKSFNFSELKTATRNFRPDSVVGEGGFGCVFKGWIDEQTLAPVRPGTGVVIAVKRLNQEGLQGHSEWLTEINYLGQLRHPNLVKLIGYCLEDDQRLLVYEFLTKGSLDNHLFRRASYFQPLSWNFRMKVALDAAKGLAYLHSDEAKVIYRDFKASNILLDSNYNAKLSDFGLAKDGPAGDKSHVSTRVMGTYGYAAPEYMATGHLTKKSDVYSFGVVLLEIMSGKRALDSNRPSGEHNLIEWAKPYLSNKRRIFQVMDARIEGQYTLRESMKVANLAIQCLSVEPRFRPKMDEVVRALEELQDSEDRAGGVGSSRDQTARRSGHSSSSSGPRQHRGRQHETTRK

SEQ ID NO: 51503 - protein, 218 aa, Glycine max
  peptide (1)..(218): Ceres Seq. ID no. 15171433
  misc_feature (1)..(216): Homolog of NCBI NO: 28804505 NR Description: serine/threonine protein kinase [Aster tripolium]
  misc_feature (1)..(175): Homolog of NCBI NO: 166809 NR Description: protein kinase
  misc_feature (1)..(175): Homolog of NCBI NO: 15241749 NR Description: protein kinase, putative [Arabidopsis thaliana]
  misc_feature (1)..(192): Homolog of NCBI NO: 34897424 NR Description: putative protein kinase [Oryza sativa (japonica
  misc_feature (1)..(202): Homolog of NCBI NO: 15227001 NR Description: protein kinase (APK1b) [Arabidopsis thaliana]
  misc_feature (77)..(202): Homolog of NCBI NO: 8778537 NR Description: F22G5.5 [Arabidopsis thaliana]
  misc_feature (1)..(77): Homolog of NCBI NO: 8778537 NR Description: F22G5.5 [Arabidopsis thaliana]
  misc_feature (1)..(202): Homolog of NCBI NO: 15222437 NR Description: protein kinase (APK1a) [Arabidopsis thaliana]
  misc_feature (1)..(209): Homolog of NCBI NO: 34906046 NR Description: putative serine/threonine-specific protein kinase
  misc_feature (1)..(201): Homolog of NCBI NO: 14719339 NR Description: putative protein kinase [Oryza sativa]
MKVALDAAKGLAYLHSDEAKVIYRDFKASNILLDSNYNAKLSDFGLAKDGPAGDKSHVSTRVMGTYGYAAPEYMATGHLTKKSDVYSFGVVLLEIMSGKRALDSNRPSGEHNLIEWAKPYLSNKRRIFQVMDARIEGQYTLRESMKVANLAIQCLSVEPRFRPKMDEVVRALEELQDSEDRAGGVGSSRDQTARRSGHSSSSSGPRQHRGRQHETTRK

SEQ ID NO: 51504 - DNA, 1365 bp, Glycine max
  misc_feature (1)..(1365): Ceres Seq. ID no. 14311890
cctttcctcctcttctgttcttttattctagggttacaaagttttccttccatacttgccggcagccgtgtggtcttgatagagcgacaccgtgccaccgcgccaccacccaaccttgcagccccaagtctgcgtttccgcagatccactgtccgcacataaaggtgtatactctgctcagttatatcatttgctaataattttcactatctttacgacgccgccaccgaccccaagcccgccgtctgcgccgcgcactccgacgccgcggcggcccatctgatcaagatcaacgggaggtttactcgttcgtgtcaagctcaaaggttgaaacaaacacgaaggcgctgaaacaaccctaagaagtaagaaccagattttatctccatacagtagaagtaaaacagtatattgtagccattcggttgagttcaaattgaaagagacaagatggccgggcaatcaaaccatgacctttcattgttttcagctgaggagcttgagttcattgctgaagatgagatcgtggacattgtacccaatctcaaaatgagtgctctcaatttcatttctggagattttggcccatttacgccccagattgttacccaagtaccactgtggttggccactgctctcaagaagagaggcaagtgctccatttgccctccccaatggatgtctgttgagaagttgagtcaagttttggaggcagagcgagactctcaagagatgtcagatcaattgccatttcattatgtggaaatctcaagacttctttttgatcatgcacgtgacaacattcctgatgtatatatggtgaggtctctaattgaggacatcagaaatgttcggtttcataaagttgaaactgatttggaagcatttaatggtcgtacaattgctgttaagattaaaaatttatctgcaatggaagtgaatattgttcgtccatttattggaagagctttacaggcattttataagcatgatagtccagagctgataccagacccagagagagtttctgataggcgcccccaagttatcaacaatgctccaagaagacaactacgaagatagtcattgtcacctattggtaacatctcttctagaatcataagcatttggcccgcttcaaaggggcatctttcatgagaaatacttcacaactttctttgctgctgacttcagtgtaaatgaatggcttgagacatggtcgaatcttcagaaagtaatgttctctcaaaatattctcataattatttgtcaagagtctgaaaaagcaaagcacttcatgggattaacatggccatgcccccatatactttatgttgttaattctattagtagtgttaagtattt

SEQ ID NO: 51505 - protein, 210 aa, Glycine max
  peptide (1)..(210): Ceres Seq. ID no. 14311891
  misc_feature (20)..(167): Pfam Name: Partner of SLD five, PSF2 Pfam Description: Partner of SLD five, PSF2
  misc_feature (13)..(146): Homolog of NCBI NO: 39584442 NR Description: Hypothetical protein CBG19768 [Caenorhabditis
  misc_feature (9)..(174): Homolog of NCBI NO: 17945611 NR Description: RE26983p [Drosophila melanogaster]
  misc_feature (12)..(179): Homolog of NCBI NO: 19112285 NR Description: hypothetical protein [Schizosaccharomyces pombe]
  misc_feature (14)..(179): Homolog of NCBI NO: 26390541 NR Description: unnamed protein product [Mus musculus]
  misc_feature (14)..(179): Homolog of NCBI NO: 7706367 NR Description: HSPC037 protein [Homo sapiens]
  misc_feature (14)..(179): Homolog of NCBI NO: 34851825 NR Description: similar to HSPC037 protein [Rattus norvegicus]
  misc_feature (20)..(210): Homolog of NCBI NO: 15230511 NR Description: expressed protein [Arabidopsis thaliana]
  misc_feature (1)..(210): Homolog of NCBI NO: 37999772 NR Description: Probable DNA replication complex GINS protein PSF2
  misc_feature (1)..(210): Homolog of NCBI NO: 34904658 NR Description: P0034C11.24 [Oryza sativa (japonica
  misc_feature (1)..(210): Homolog of NCBI NO: 5042457 NR Description: unknown protein [Oryza sativa (japonica
MAGQSNHDLSLFSAEELEFIAEDEIVDIVPNLKMSALNFISGDFGPFTPQIVTQVPLWLATALKKRGKCSICPPQWMSVEKLSQVLEAERDSQEMSDQLPFHYVEISRLLFDHARDNIPDVYMVRSLIEDIRNVRFHKVETDLEAFNGRTIAVKIKNLSAMEVNIVRPFIGRALQAFYKHDSPELIPDPERVSDRRPQVINNAPRRQLRR

SEQ ID NO: 51506 - protein, 177 aa, Glycine max
  peptide (1)..(177): Ceres Seq. ID no. 14311892
  misc_feature (1)..(134): Pfam Name: Partner of SLD five, PSF2 Pfam Description: Partner of SLD five, PSF2
  misc_feature (1)..(113): Homolog of NCBI NO: 39584442 NR Description: Hypothetical protein CBG19768 [Caenorhabditis
  misc_feature (1)..(141): Homolog of NCBI NO: 17945611 NR Description: RE26983p [Drosophila melanogaster]
  misc_feature (1)..(146): Homolog of NCBI NO: 19112285 NR Description: hypothetical protein [Schizosaccharomyces pombe]
  misc_feature (1)..(146): Homolog of NCBI NO: 26390541 NR Description: unnamed protein product [Mus musculus]
  misc_feature (1)..(146): Homolog of NCBI NO: 7706367 NR Description: HSPC037 protein [Homo sapiens]
  misc_feature (1)..(146): Homolog of NCBI NO: 34851825 NR Description: similar to HSPC037 protein [Rattus norvegicus]
  misc_feature (1)..(177): Homolog of NCBI NO: 15230511 NR Description: expressed protein [Arabidopsis thaliana]
  misc_feature (1)..(177): Homolog of NCBI NO: 37999772 NR Description: Probable DNA replication complex GINS protein PSF2
  misc_feature (1)..(177): Homolog of NCBI NO: 34904658 NR Description: P0034C11.24 [Oryza sativa (japonica
  misc_feature (1)..(177): Homolog of NCBI NO: 5042457 NR Description: unknown protein [Oryza sativa (japonica
MSALNFISGDFGPFTPQIVTQVPLWLATALKKRGKCSICPPQWMSVEKLSQVLEAERDSQEMSDQLPFHYVEISRLLFDHARDNIPDVYMVRSLIEDIRNVRFHKVETDLEAFNGRTIAVKIKNLSAMEVNIVRPFIGRALQAFYKHDSPELIPDPERVSDRRPQVINNAPRRQLRR

SEQ ID NO: 51507 - protein, 134 aa, Glycine max
  peptide (1)..(134): Ceres Seq. ID no. 14311893
  misc_feature (1)..(91): Pfam Name: Partner of SLD five, PSF2 Pfam Description: Partner of SLD five, PSF2
  misc_feature (1)..(70): Homolog of NCBI NO: 39584442 NR Description: Hypothetical protein CBG19768 [Caenorhabditis
  misc_feature (1)..(98): Homolog of NCBI NO: 17945611 NR Description: RE26983p [Drosophila melanogaster]
  misc_feature (1)..(103): Homolog of NCBI NO: 19112285 NR Description: hypothetical protein [Schizosaccharomyces pombe]
  misc_feature (1)..(103): Homolog of NCBI NO: 26390541 NR Description: unnamed protein product [Mus musculus]
  misc_feature (1)..(103): Homolog of NCBI NO: 7706367 NR Description: HSPC037 protein [Homo sapiens]
  misc_feature (1)..(103): Homolog of NCBI NO: 34851825 NR Description: similar to HSPC037 protein [Rattus norvegicus]
  misc_feature (1)..(134): Homolog of NCBI NO: 15230511 NR Description: expressed protein [Arabidopsis thaliana]
  misc_feature (1)..(134): Homolog of NCBI NO: 37999772 NR Description: Probable DNA replication complex GINS protein PSF2
  misc_feature (1)..(134): Homolog of NCBI NO: 34904658 NR Description: P0034C11.24 [Oryza sativa (japonica
  misc_feature (1)..(134): Homolog of NCBI NO: 5042457 NR Description: unknown protein [Oryza sativa (japonica
MSVEKLSQVLEAERDSQEMSDQLPFHYVEISRLLFDHARDNIPDVYMVRSLIEDIRNVRFHKVETDLEAFNGRTIAVKIKNLSAMEVNIVRPFIGRALQAFYKHDSPELIPDPERVSDRRPQVINNAPRRQLRR

SEQ ID NO: 51508 - DNA, 1385 bp, Glycine max
  misc_feature (1)..(1385): Ceres Seq. ID no. 13581800
atactctattatcggccttcgtttcgttcgttagtttctcagtcgtttgttctgagatcaaccttgcatcaggtgtttctcttcacttcttcttttttccctttcacaaaaacttgaattgaaccatcaacgctcaatgccgaaccctaccaattccttctattcttctattccttcaattttctcaatattaacttgtatttggttcaaccaccatttgtttctccccctttaattcaatattctcttcacacttttttcggtttgaatccttgtgaataattgtttcgcttcaacttaatcatttcaatttgaaataaatagtacactgcgttggattctctaatgttttcataaatttccagggttagggaatggctgctatcttagctcggaaatcactccttgctcttcgtgcgcgccaattggctgtaagcggtcaagggctgcacagctcccaaaactatggccttcgattaagtgcacactcctactctaccaaaagagaggatgaagaaagggagcaactcgcaaaggaaatttcaaaggattggagttctgtttttgaacgtagcatcaacactctctttctcactgaaatggttcgaggtctaatgctgactctgaaatacttctttgaaacaaaagttacaatcaattatccatttgagaaaggccctttgagcccccgtttccggggtgaacatgcactccgacgatatccaacaggagaggaacgctgcattgcttgcaaactttgtgaagctatatgtcctgcacaagcaatcacaattgaggctgaggagcgagaagatggaagccgcaggacaactcggtatgatattgacatgaccaagtgcatttattgtggattttgtcaagaggcatgccctgttgatgcgattgttgaagggccaaactttgaatttgctacagagactcatgaggagcttttatatgacaaggagaagctgcttgaaaatggggaccgatgggagactgaaattgcagagaacctgagatctgaaagcctttaccgctgaaattttccatgtgatccttgcctgttgctttttgggtctaattgggcaatgataaataaaatgaccagtgaatggttttaaagagctgtatgcatacacaattgttacatcagtttttttttttcttttgtcaatgcttgcattgctgttaagtgtacaatattgatgacgtttatctccttgaaatcttgaacaaatgtggaaataattgaatttttcagcaaattgatgccctttcagcatactggcaacttgtaggcttgtagtcataattgatcctttgaaaatggaagcactgatgcagtgcagctttcagaatctaaattcattggggattcggtg

SEQ ID NO: 51509 - protein, 222 aa, Glycine max
  peptide (1)..(222): Ceres Seq. ID no. 13581801
  misc_feature (155)..(178): Pfam Name: 4Fe-4S binding domain Pfam Description: 4Fe-4S binding domain
  misc_feature (2)..(222): Homolog of NCBI NO: 22074762 NR Description: NADH dehydrogenase:ubiquinone Fe-S protein 8 [Mus
  misc_feature (11)..(222): Homolog of NCBI NO: 27807359 NR Description: NADH dehydrogenase (ubiquinone) Fe-S protein 8,
  misc_feature (46)..(222): Homolog of NCBI NO: 34328786 NR Description: NADH:ubiquinone oxidoreductase subunit 8;
  misc_feature (62)..(222): Homolog of NCBI NO: 11466496 NR Description: NADH dehydrogenase, subunit 8 [Reclinomonas
  misc_feature (1)..(222): Homolog of NCBI NO: 34915206 NR Description: putative  NADH dehydrogenase
  misc_feature (1)..(222): Homolog of NCBI NO: 3929358 NR Description: NADH-ubiquinone oxidoreductase 23 kDa subunit, precursor (Complex I-23KD) (CI-23KD) (Complex I-28.5KD)
  misc_feature (1)..(222): Homolog of NCBI NO: 15219265 NR Description: NADH dehydrogenase -related [Arabidopsis
  misc_feature (1)..(222): Homolog of NCBI NO: 1076669 NR Description: NADH2 dehydrogenase (ubiquinone) (EC 1.6.5.3)
  misc_feature (1)..(222): Homolog of NCBI NO: 6226880 NR Description: NADH-ubiquinone oxidoreductase 23 kDa subunit, precursor (Complex I-23KD) (CI-23KD) (Complex I-28.5KD)
  misc_feature (1)..(222): Homolog of NCBI NO: 15219311 NR Description: NADH:ubiquinone oxidoreductase -related
MAAILARKSLLALRARQLAVSGQGLHSSQNYGLRLSAHSYSTKREDEEREQLAKEISKDWSSVFERSINTLFLTEMVRGLMLTLKYFFETKVTINYPFEKGPLSPRFRGEHALRRYPTGEERCIACKLCEAICPAQAITIEAEEREDGSRRTTRYDIDMTKCIYCGFCQEACPVDAIVEGPNFEFATETHEELLYDKEKLLENGDRWETEIAENLRSESLYR

SEQ ID NO: 51510 - protein, 147 aa, Glycine max
  peptide (1)..(147): Ceres Seq. ID no. 13581802
  misc_feature (80)..(103): Pfam Name: 4Fe-4S binding domain Pfam Description: 4Fe-4S binding domain
  misc_feature (1)..(147): Homolog of NCBI NO: 22074762 NR Description: NADH dehydrogenase:ubiquinone Fe-S protein 8 [Mus
  misc_feature (1)..(147): Homolog of NCBI NO: 27807359 NR Description: NADH dehydrogenase (ubiquinone) Fe-S protein 8,
  misc_feature (1)..(147): Homolog of NCBI NO: 34328786 NR Description: NADH:ubiquinone oxidoreductase subunit 8;
  misc_feature (1)..(147): Homolog of NCBI NO: 11466496 NR Description: NADH dehydrogenase, subunit 8 [Reclinomonas
  misc_feature (1)..(147): Homolog of NCBI NO: 34915206 NR Description: putative  NADH dehydrogenase
  misc_feature (1)..(147): Homolog of NCBI NO: 3929358 NR Description: NADH-ubiquinone oxidoreductase 23 kDa subunit, precursor (Complex I-23KD) (CI-23KD) (Complex I-28.5KD)
  misc_feature (1)..(147): Homolog of NCBI NO: 15219265 NR Description: NADH dehydrogenase -related [Arabidopsis
  misc_feature (1)..(147): Homolog of NCBI NO: 1076669 NR Description: NADH2 dehydrogenase (ubiquinone) (EC 1.6.5.3)
  misc_feature (1)..(147): Homolog of NCBI NO: 6226880 NR Description: NADH-ubiquinone oxidoreductase 23 kDa subunit, precursor (Complex I-23KD) (CI-23KD) (Complex I-28.5KD)
  misc_feature (1)..(147): Homolog of NCBI NO: 15219311 NR Description: NADH:ubiquinone oxidoreductase -related
MVRGLMLTLKYFFETKVTINYPFEKGPLSPRFRGEHALRRYPTGEERCIACKLCEAICPAQAITIEAEEREDGSRRTTRYDIDMTKCIYCGFCQEACPVDAIVEGPNFEFATETHEELLYDKEKLLENGDRWETEIAENLRSESLYR

SEQ ID NO: 51511 - protein, 142 aa, Glycine max
  peptide (1)..(142): Ceres Seq. ID no. 13581803
  misc_feature (75)..(98): Pfam Name: 4Fe-4S binding domain Pfam Description: 4Fe-4S binding domain
  misc_feature (1)..(142): Homolog of NCBI NO: 22074762 NR Description: NADH dehydrogenase:ubiquinone Fe-S protein 8 [Mus
  misc_feature (1)..(142): Homolog of NCBI NO: 27807359 NR Description: NADH dehydrogenase (ubiquinone) Fe-S protein 8,
  misc_feature (1)..(142): Homolog of NCBI NO: 34328786 NR Description: NADH:ubiquinone oxidoreductase subunit 8;
  misc_feature (1)..(142): Homolog of NCBI NO: 11466496 NR Description: NADH dehydrogenase, subunit 8 [Reclinomonas
  misc_feature (1)..(142): Homolog of NCBI NO: 34915206 NR Description: putative  NADH dehydrogenase
  misc_feature (1)..(142): Homolog of NCBI NO: 3929358 NR Description: NADH-ubiquinone oxidoreductase 23 kDa subunit, precursor (Complex I-23KD) (CI-23KD) (Complex I-28.5KD)
  misc_feature (1)..(142): Homolog of NCBI NO: 15219265 NR Description: NADH dehydrogenase -related [Arabidopsis
  misc_feature (1)..(142): Homolog of NCBI NO: 1076669 NR Description: NADH2 dehydrogenase (ubiquinone) (EC 1.6.5.3)
  misc_feature (1)..(142): Homolog of NCBI NO: 6226880 NR Description: NADH-ubiquinone oxidoreductase 23 kDa subunit, precursor (Complex I-23KD) (CI-23KD) (Complex I-28.5KD)
  misc_feature (1)..(142): Homolog of NCBI NO: 15219311 NR Description: NADH:ubiquinone oxidoreductase -related
MLTLKYFFETKVTINYPFEKGPLSPRFRGEHALRRYPTGEERCIACKLCEAICPAQAITIEAEEREDGSRRTTRYDIDMTKCIYCGFCQEACPVDAIVEGPNFEFATETHEELLYDKEKLLENGDRWETEIAENLRSESLYR

SEQ ID NO: 51512 - DNA, 1341 bp, Glycine max
  misc_feature (1)..(1341): Ceres Seq. ID no. 14311961
taatcgaaaattttttcttgttgccgccaccactcttctaatgtctagttctgagagcacaaacgcgagaactagaacagcgtcatggttttctaccccattctttgttatcgttctcccggtggccgtggctgcgcttctctaccggctcgaaccattcaagccggttcttttgccggtccagctgggccggtccaccgtggcggttccggctcgtaacggccacatgcaagatggatcggaacgtgtgggtgagggacacttggagggcccggaagacttggcctacgacgctgcggcacgtgtcgtttataccgggtgtgaggatgggtggatcaagcgagtcacggtgaatgactcggtggttgactcggcggttgaagattgggtcaacacaggaggaaggccacttggactagttttgaagccgaatggagaactcatagttgctgatgcggaaaagggactgctgagagtgtcaagtgagaaggagattgagttgctggtagatgagtttgaggggttaaaattcaaactcacagatggtgttgatatagcagatgatggtacaatttatttcacagatgcatcacacaaataccccgtgaaggatgctgtgtttgacgtcttagaagggaagccaaatggaagattcttcagctataatccagcaacaaagaagacaaccctgcttgcccaagacctctactttgccaatggggttgcagtttcagcagatcaacaatttgtggtcttctgtgaatctgtcttgatgagatgcaataaatatttcgtcctgggccctaaaacaggaaccatagagaagttctgtgacctgcctggcatgcctgataacattcattatgatggacaagggcactatttaattgcaatgttcacggccctttctcccgaattggaattggcatatagataccctttcattaggaaggcttttgcaatgtttacaaagtatgtagggagtctatctatctcgaagaatggaggagttctagtcgtggatttagaaggaaaaccaactgcacattattatgatcccaaattagcattgactagtgcgattaaaattgggaatcatatatatgctggttccattttctacccctttgtaacacgttttgatgttgagaaatatcctgctctccccacagtttgagcaacagtgaacatcttgtaaggttaatgatgtacaagaaaatgtttagtttctggagtgtcatgatgtgaaaatgtttagtttctggagtgtcatgatgtgaaaattccattcatgaatctgttatatatatttttatataataaaaatggaatttcttttac

SEQ ID NO: 51513 - protein, 391 aa, Glycine max
  peptide (1)..(391): Ceres Seq. ID no. 14311962
  misc_feature (34)..(377): Pfam Name: Strictosidine synthase Pfam Description: Strictosidine synthase
  misc_feature (34)..(383): Homolog of NCBI NO: 23059369 NR Description: hypothetical protein [Pseudomonas fluorescens
  misc_feature (52)..(384): Homolog of NCBI NO: 23237921 NR Description: ABC transporter permease protein-like protein
  misc_feature (90)..(372): Homolog of NCBI NO: 40063117 NR Description: strictosidine synthase family protein [uncultured
  misc_feature (36)..(372): Homolog of NCBI NO: 15596490 NR Description: hypothetical protein [Pseudomonas aeruginosa
  misc_feature (37)..(387): Homolog of NCBI NO: 15230490 NR Description: strictosidine synthase-related [Arabidopsis
  misc_feature (39)..(387): Homolog of NCBI NO: 37536558 NR Description: mucin-like protein [Oryza sativa (japonica
  misc_feature (34)..(387): Homolog of NCBI NO: 15230488 NR Description: strictosidine synthase-related [Arabidopsis
  misc_feature (34)..(387): Homolog of NCBI NO: 11358518 NR Description: mucin-like protein - Arabidopsis thaliana
  misc_feature (29)..(387): Homolog of NCBI NO: 15230477 NR Description: strictosidine synthase-related [Arabidopsis
  misc_feature (34)..(387): Homolog of NCBI NO: 18409339 NR Description: strictosidine synthase-related [Arabidopsis
NRKFFLVAATTLLMSSSESTNARTRTASWFSTPFFVIVLPVAVAALLYRLEPFKPVLLPVQLGRSTVAVPARNGHMQDGSERVGEGHLEGPEDLAYDAAARVVYTGCEDGWIKRVTVNDSVVDSAVEDWVNTGGRPLGLVLKPNGELIVADAEKGLLRVSSEKEIELLVDEFEGLKFKLTDGVDIADDGTIYFTDASHKYPVKDAVFDVLEGKPNGRFFSYNPATKKTTLLAQDLYFANGVAVSADQQFVVFCESVLMRCNKYFVLGPKTGTIEKFCDLPGMPDNIHYDGQGHYLIAMFTALSPELELAYRYPFIRKAFAMFTKYVGSLSISKNGGVLVVDLEGKPTAHYYDPKLALTSAIKIGNHIYAGSIFYPFVTRFDVEKYPALPTV

SEQ ID NO: 51514 - protein, 378 aa, Glycine max
  peptide (1)..(378): Ceres Seq. ID no. 14311963
  misc_feature (21)..(364): Pfam Name: Strictosidine synthase Pfam Description: Strictosidine synthase
  misc_feature (21)..(370): Homolog of NCBI NO: 23059369 NR Description: hypothetical protein [Pseudomonas fluorescens
  misc_feature (39)..(371): Homolog of NCBI NO: 23237921 NR Description: ABC transporter permease protein-like protein
  misc_feature (77)..(359): Homolog of NCBI NO: 40063117 NR Description: strictosidine synthase family protein [uncultured
  misc_feature (23)..(359): Homolog of NCBI NO: 15596490 NR Description: hypothetical protein [Pseudomonas aeruginosa
  misc_feature (24)..(374): Homolog of NCBI NO: 15230490 NR Description: strictosidine synthase-related [Arabidopsis
  misc_feature (26)..(374): Homolog of NCBI NO: 37536558 NR Description: mucin-like protein [Oryza sativa (japonica
  misc_feature (21)..(374): Homolog of NCBI NO: 15230488 NR Description: strictosidine synthase-related [Arabidopsis
  misc_feature (21)..(374): Homolog of NCBI NO: 11358518 NR Description: mucin-like protein - Arabidopsis thaliana
  misc_feature (16)..(374): Homolog of NCBI NO: 15230477 NR Description: strictosidine synthase-related [Arabidopsis
  misc_feature (21)..(374): Homolog of NCBI NO: 18409339 NR Description: strictosidine synthase-related [Arabidopsis
MSSSESTNARTRTASWFSTPFFVIVLPVAVAALLYRLEPFKPVLLPVQLGRSTVAVPARNGHMQDGSERVGEGHLEGPEDLAYDAAARVVYTGCEDGWIKRVTVNDSVVDSAVEDWVNTGGRPLGLVLKPNGELIVADAEKGLLRVSSEKEIELLVDEFEGLKFKLTDGVDIADDGTIYFTDASHKYPVKDAVFDVLEGKPNGRFFSYNPATKKTTLLAQDLYFANGVAVSADQQFVVFCESVLMRCNKYFVLGPKTGTIEKFCDLPGMPDNIHYDGQGHYLIAMFTALSPELELAYRYPFIRKAFAMFTKYVGSLSISKNGGVLVVDLEGKPTAHYYDPKLALTSAIKIGNHIYAGSIFYPFVTRFDVEKYPALPTV

SEQ ID NO: 51515 - protein, 316 aa, Glycine max
  peptide (1)..(316): Ceres Seq. ID no. 14311964
  misc_feature (1)..(302): Pfam Name: Strictosidine synthase Pfam Description: Strictosidine synthase
  misc_feature (1)..(308): Homolog of NCBI NO: 23059369 NR Description: hypothetical protein [Pseudomonas fluorescens
  misc_feature (1)..(309): Homolog of NCBI NO: 23237921 NR Description: ABC transporter permease protein-like protein
  misc_feature (15)..(297): Homolog of NCBI NO: 40063117 NR Description: strictosidine synthase family protein [uncultured
  misc_feature (1)..(297): Homolog of NCBI NO: 15596490 NR Description: hypothetical protein [Pseudomonas aeruginosa
  misc_feature (1)..(312): Homolog of NCBI NO: 15230490 NR Description: strictosidine synthase-related [Arabidopsis
  misc_feature (1)..(312): Homolog of NCBI NO: 37536558 NR Description: mucin-like protein [Oryza sativa (japonica
  misc_feature (1)..(312): Homolog of NCBI NO: 15230488 NR Description: strictosidine synthase-related [Arabidopsis
  misc_feature (1)..(312): Homolog of NCBI NO: 11358518 NR Description: mucin-like protein - Arabidopsis thaliana
  misc_feature (1)..(312): Homolog of NCBI NO: 15230477 NR Description: strictosidine synthase-related [Arabidopsis
  misc_feature (1)..(312): Homolog of NCBI NO: 18409339 NR Description: strictosidine synthase-related [Arabidopsis
MQDGSERVGEGHLEGPEDLAYDAAARVVYTGCEDGWIKRVTVNDSVVDSAVEDWVNTGGRPLGLVLKPNGELIVADAEKGLLRVSSEKEIELLVDEFEGLKFKLTDGVDIADDGTIYFTDASHKYPVKDAVFDVLEGKPNGRFFSYNPATKKTTLLAQDLYFANGVAVSADQQFVVFCESVLMRCNKYFVLGPKTGTIEKFCDLPGMPDNIHYDGQGHYLIAMFTALSPELELAYRYPFIRKAFAMFTKYVGSLSISKNGGVLVVDLEGKPTAHYYDPKLALTSAIKIGNHIYAGSIFYPFVTRFDVEKYPALPTV

SEQ ID NO: 51516 - DNA, 1917 bp, Glycine max
  misc_feature (1)..(1917): Ceres Seq. ID no. 14311942
atctcatttcatttatctgggtagcggagccaaacaggcttacgcggaatctgactgctgcccgaagtcattctcagtaactgctaatcactgacacggtcagctaagctaagctaccccttctctctctaaaacctttgccattgtctcccacaacaccttacaacttacaacttcaatgtctgagtcaagactcatttatttataaccaccaccagctcaggtggcgcagccaaaccaaacccacaagaggttaagaacaagtagaataacaaaacccattcttcacctctctcccatcgtaataatgggtcagagcctgagttgcagtggcaaccatgaccacggcctcttcaccgccgtgctgcacggcgaccttcaaattgtcacaactctcttggattccgacccttctctcttgcaccaaacaactctctacgatcgccactctcctcttcatattgctgcagccaatggccagatcgagattctgtctaggctcttagatggatctcttaacccagatgttttaaatcgccacaaacagactccgcttatgttggcagcaatgcacgggaacatcgcctgtgtggagaagcttcttcaagccggagctaatgttttgatgtttgatactatttacgggagaacctgcttacactattccgcttactacggccattcttcttgccttaaggctattctttccgctgctcaatctagtccagtggctgcttcttgggggtttgctcggtttgtgaatattagagatggaaaaggtgcaacgccattgcacttggcggctcgtcagaggcggtctgaatgtgtacatattctattagacagtggagctcttgtttgtgcttcaactggtggatatggctgtcctgggagcactcctcttcatctagcagctagaggaggatctctggattgcattcgtgaattgttggcatggggtgcagatcgtcttcaacgcgatgcatctgggcgtataccatatatggttgcccttaaacacaaacatggagcctgtgcatcattgctaaatcctacatctgcagaacctcttgtctggccgtctccattgaagttcatcagtgagcttaatcctgaagccaaagctttattagagcaggccttgatggatgcaaacagagaaagagagaaaaacatattgaaagggagttcttactctctgccatctccatctcattctgatggggtagctgataatacgtctgaggttagtgaatccgaattatgttgcatctgctttgagcaggtgtgcacaattgaagttcagaactgtggccaccagatgtgtgcacaatgcacactagccctgtgttgccacaacaagcccaaccctgccactgcctgtcttactccaccagtttgtccattttgtcgaagcaccataacaagacttgttgttgtgaagacggaatgccacgatgaaactgatcaagacagtgttgatatcaactgttccaagctgagcaagtcatcaaggaaactcagaaacttgaatgacattggtagcagcagcttcaagggactatctagtgttagttcattcgggaaattgggtagccgcagctctggaaggattgctgcagagtggcttgataaacagtgatggcaatttgcaattacttgtggtaatcaatgattccatattggcaaagatacggtaactacaaaggtgcttaaccggcaaggcaaaaatcaaagttaaaagggaaaggaatattatgtaattttgggaaataagcaaagtgagttgaagtgaagttcgcggtaggtaccaagtgttgttgggaaaaaaagagaaggggatgtcatgttgtagtagtattattattacttgagaatgaagaagcatcacctgcgtcgatgattttgggcatcgtc

SEQ ID NO: 51517 - protein, 444 aa, Glycine max
  peptide (1)..(444): Ceres Seq. ID no. 14311943
  misc_feature (194)..(226): Pfam Name: Ankyrin repeat Pfam Description: Ankyrin repeat
  misc_feature (1)..(134): Homolog of NCBI NO: 37573164 NR Description: receptor-like kinase Xa21-binding protein 3-like
  misc_feature (195)..(376): Homolog of NCBI NO: 37573164 NR Description: receptor-like kinase Xa21-binding protein 3-like
  misc_feature (316)..(373): Homolog of NCBI NO: 15240746 NR Description: expressed protein [Arabidopsis thaliana]
  misc_feature (1)..(207): Homolog of NCBI NO: 15240746 NR Description: expressed protein [Arabidopsis thaliana]
  misc_feature (279)..(434): Homolog of NCBI NO: 25044835 NR Description: RING zinc finger protein [Ananas comosus]
  misc_feature (1)..(216): Homolog of NCBI NO: 16226319 NR Description: At2g28840/F8N16.13 [Arabidopsis thaliana]
  misc_feature (1)..(431): Homolog of NCBI NO: 34906062 NR Description: putative receptor-like kinase Xa21-binding
  misc_feature (1)..(437): Homolog of NCBI NO: 14279688 NR Description: receptor-like kinase Xa21-binding protein 3
  misc_feature (33)..(439): Homolog of NCBI NO: 25408016 NR Description: probable RING zinc finger ankyrin protein
  misc_feature (1)..(439): Homolog of NCBI NO: 30684032 NR Description: RING zinc finger ankyrin protein -related
MGQSLSCSGNHDHGLFTAVLHGDLQIVTTLLDSDPSLLHQTTLYDRHSPLHIAAANGQIEILSRLLDGSLNPDVLNRHKQTPLMLAAMHGNIACVEKLLQAGANVLMFDTIYGRTCLHYSAYYGHSSCLKAILSAAQSSPVAASWGFARFVNIRDGKGATPLHLAARQRRSECVHILLDSGALVCASTGGYGCPGSTPLHLAARGGSLDCIRELLAWGADRLQRDASGRIPYMVALKHKHGACASLLNPTSAEPLVWPSPLKFISELNPEAKALLEQALMDANREREKNILKGSSYSLPSPSHSDGVADNTSEVSESELCCICFEQVCTIEVQNCGHQMCAQCTLALCCHNKPNPATACLTPPVCPFCRSTITRLVVVKTECHDETDQDSVDINCSKLSKSSRKLRNLNDIGSSSFKGLSSVSSFGKLGSRSSGRIAAEWLDKQ

SEQ ID NO: 51518 - protein, 361 aa, Glycine max
  peptide (1)..(361): Ceres Seq. ID no. 14311944
  misc_feature (111)..(143): Pfam Name: Ankyrin repeat Pfam Description: Ankyrin repeat
  misc_feature (1)..(51): Homolog of NCBI NO: 37573164 NR Description: receptor-like kinase Xa21-binding protein 3-like
  misc_feature (112)..(293): Homolog of NCBI NO: 37573164 NR Description: receptor-like kinase Xa21-binding protein 3-like
  misc_feature (233)..(290): Homolog of NCBI NO: 15240746 NR Description: expressed protein [Arabidopsis thaliana]
  misc_feature (1)..(124): Homolog of NCBI NO: 15240746 NR Description: expressed protein [Arabidopsis thaliana]
  misc_feature (196)..(351): Homolog of NCBI NO: 25044835 NR Description: RING zinc finger protein [Ananas comosus]
  misc_feature (1)..(133): Homolog of NCBI NO: 16226319 NR Description: At2g28840/F8N16.13 [Arabidopsis thaliana]
  misc_feature (1)..(348): Homolog of NCBI NO: 34906062 NR Description: putative receptor-like kinase Xa21-binding
  misc_feature (1)..(354): Homolog of NCBI NO: 14279688 NR Description: receptor-like kinase Xa21-binding protein 3
  misc_feature (1)..(356): Homolog of NCBI NO: 25408016 NR Description: probable RING zinc finger ankyrin protein
  misc_feature (1)..(356): Homolog of NCBI NO: 30684032 NR Description: RING zinc finger ankyrin protein -related
MLAAMHGNIACVEKLLQAGANVLMFDTIYGRTCLHYSAYYGHSSCLKAILSAAQSSPVAASWGFARFVNIRDGKGATPLHLAARQRRSECVHILLDSGALVCASTGGYGCPGSTPLHLAARGGSLDCIRELLAWGADRLQRDASGRIPYMVALKHKHGACASLLNPTSAEPLVWPSPLKFISELNPEAKALLEQALMDANREREKNILKGSSYSLPSPSHSDGVADNTSEVSESELCCICFEQVCTIEVQNCGHQMCAQCTLALCCHNKPNPATACLTPPVCPFCRSTITRLVVVKTECHDETDQDSVDINCSKLSKSSRKLRNLNDIGSSSFKGLSSVSSFGKLGSRSSGRIAAEWLDKQ

SEQ ID NO: 51519 - protein, 357 aa, Glycine max
  peptide (1)..(357): Ceres Seq. ID no. 14311945
  misc_feature (107)..(139): Pfam Name: Ankyrin repeat Pfam Description: Ankyrin repeat
  misc_feature (1)..(47): Homolog of NCBI NO: 37573164 NR Description: receptor-like kinase Xa21-binding protein 3-like
  misc_feature (108)..(289): Homolog of NCBI NO: 37573164 NR Description: receptor-like kinase Xa21-binding protein 3-like
  misc_feature (229)..(286): Homolog of NCBI NO: 15240746 NR Description: expressed protein [Arabidopsis thaliana]
  misc_feature (1)..(120): Homolog of NCBI NO: 15240746 NR Description: expressed protein [Arabidopsis thaliana]
  misc_feature (192)..(347): Homolog of NCBI NO: 25044835 NR Description: RING zinc finger protein [Ananas comosus]
  misc_feature (1)..(129): Homolog of NCBI NO: 16226319 NR Description: At2g28840/F8N16.13 [Arabidopsis thaliana]
  misc_feature (1)..(344): Homolog of NCBI NO: 34906062 NR Description: putative receptor-like kinase Xa21-binding
  misc_feature (1)..(350): Homolog of NCBI NO: 14279688 NR Description: receptor-like kinase Xa21-binding protein 3
  misc_feature (1)..(352): Homolog of NCBI NO: 25408016 NR Description: probable RING zinc finger ankyrin protein
  misc_feature (1)..(352): Homolog of NCBI NO: 30684032 NR Description: RING zinc finger ankyrin protein -related
MHGNIACVEKLLQAGANVLMFDTIYGRTCLHYSAYYGHSSCLKAILSAAQSSPVAASWGFARFVNIRDGKGATPLHLAARQRRSECVHILLDSGALVCASTGGYGCPGSTPLHLAARGGSLDCIRELLAWGADRLQRDASGRIPYMVALKHKHGACASLLNPTSAEPLVWPSPLKFISELNPEAKALLEQALMDANREREKNILKGSSYSLPSPSHSDGVADNTSEVSESELCCICFEQVCTIEVQNCGHQMCAQCTLALCCHNKPNPATACLTPPVCPFCRSTITRLVVVKTECHDETDQDSVDINCSKLSKSSRKLRNLNDIGSSSFKGLSSVSSFGKLGSRSSGRIAAEWLDKQ

SEQ ID NO: 51520 - DNA, 1714 bp, Glycine max
  misc_feature (1)..(1714): Ceres Seq. ID no. 15171442
gaatgaatagggagtgttggcgaagtagatctgaaaggtgaagaatttgagtaggtaaaacccaaagttttcaactttgaatcaaagggtcatcaaatgctttaacgttttggttttttctgccttccgacactctaagaaaatgccgcacccttctttccacaagcttcttctaccctccactgtccaacccaaccaacaactgaggcttccggataattttatgaggaaatatgggggtgaactctctccaattgttaccctctctgttcctgatggtagtgtctggcatgtaggattgaaaaaagcagacaacaagtattgtttccttgatggttggaaagagtttgttcaacgctattccattggtgttggatacttgttggtattcagatacgaaggaaagtcatctttcaatgtccatatttttaatttggctacttctgagataaactatcaatcagtcacacgaagcagtaatgaagggcttcacttcacaaattgtcttaaattttttgaagaaatggaaggtgaagattccattgaaatctcggattcatcaccctcccacctttcacccagttcattgcaaaatcaagctcttgctggatcagtagataaaatgatgcccggaaagagttataatacacctccagcattgcagaatctgttcaatggatctaaacttaatagcataaactggggagaaggtggtaatgcccattcttcaagaagtgccaattcactagataatcgattgaccagagacataggacttcagtttaatgcagtcgagtttaaaagatctactgaagaattgaaattgcgtgcttccatcgaggaaaggatgaaaaaaactacaagaaagaagcgaaaatcagatggccaggaaccctctgctgggcacgaagaggaggtagaaatgcgctttagattttatgaaagtgcttctgcaagaaaaagaactgtgacagctgaagaaagagagagggtcatcaacgaagcaaaagcatttgaaccatctaatcctttctgtcgagttgtcctgcggccctcatatttatataggggatgcataatgtatctgccatcatgctttgcagagaagcatttgaatggagtttcagggtttattaaacttcagatctctaatggtagacagtggccggttcgctgcctttataaaggaggtagagccaagttaagccaggggtggtttgaattttcattagagaacaatttaggggaaggtgatgtctgtgtgtttgagctgcttagaatgaaagaagtagtgctgcaagttaccatctttcatgttaccgaggatgtgggactgttgagccctcctttgcagcataaccaaaacatgacctcagctaaactgttaagcactcccttgcagcaacacctcacttcaactaaaatggttagaaattagcagcaggttcattctcgatagctcaactgtatcaaaataaccccttgcttctgtgtggaacttagatgctttttctgtccaaaatttcagggtgacttgagtggaacatagttatagtttttataccttttctttcccttttgacttgggttgtaaatagattgttcaatctagctgattaggaaccgagtcaatgcttgtcctattgtgtatcttggttttaattttttttttttttctgtttgaagataaattatatagcttcttctgcctgac

SEQ ID NO: 51521 - protein, 431 aa, Glycine max
  peptide (1)..(431): Ceres Seq. ID no. 15171443
  misc_feature (297)..(394): Pfam Name: B3 DNA binding domain Pfam Description: B3 DNA binding domain
  misc_feature (264)..(394): Homolog of NCBI NO: 34910734 NR Description: P0022F10.13 [Oryza sativa (japonica
  misc_feature (236)..(396): Homolog of NCBI NO: 18402653 NR Description: transcriptional factor B3 family [Arabidopsis
  misc_feature (236)..(396): Homolog of NCBI NO: 14596161 NR Description: Unknown protein [Arabidopsis thaliana]
  misc_feature (237)..(396): Homolog of NCBI NO: 9280316 NR Description: gb|AAD43153.1~gene_id:K13E13.10~similar to
  misc_feature (1)..(133): Homolog of NCBI NO: 33943517 NR Description: reduced vernalization response 1 [Brassica rapa]
  misc_feature (237)..(396): Homolog of NCBI NO: 33943517 NR Description: reduced vernalization response 1 [Brassica rapa]
  misc_feature (1)..(133): Homolog of NCBI NO: 40806799 NR Description: reduced vernalization response 1 [Brassica rapa]
  misc_feature (237)..(396): Homolog of NCBI NO: 40806799 NR Description: reduced vernalization response 1 [Brassica rapa]
  misc_feature (1)..(157): Homolog of NCBI NO: 30685150 NR Description: transcriptional factor B3 family [Arabidopsis
  misc_feature (237)..(396): Homolog of NCBI NO: 30685150 NR Description: transcriptional factor B3 family [Arabidopsis
MPHPSFHKLLLPSTVQPNQQLRLPDNFMRKYGGELSPIVTLSVPDGSVWHVGLKKADNKYCFLDGWKEFVQRYSIGVGYLLVFRYEGKSSFNVHIFNLATSEINYQSVTRSSNEGLHFTNCLKFFEEMEGEDSIEISDSSPSHLSPSSLQNQALAGSVDKMMPGKSYNTPPALQNLFNGSKLNSINWGEGGNAHSSRSANSLDNRLTRDIGLQFNAVEFKRSTEELKLRASIEERMKKTTRKKRKSDGQEPSAGHEEEVEMRFRFYESASARKRTVTAEERERVINEAKAFEPSNPFCRVVLRPSYLYRGCIMYLPSCFAEKHLNGVSGFIKLQISNGRQWPVRCLYKGGRAKLSQGWFEFSLENNLGEGDVCVFELLRMKEVVLQVTIFHVTEDVGLLSPPLQHNQNMTSAKLLSTPLQQHLTSTKMVRN

SEQ ID NO: 51522 - protein, 404 aa, Glycine max
  peptide (1)..(404): Ceres Seq. ID no. 15171444
  misc_feature (270)..(367): Pfam Name: B3 DNA binding domain Pfam Description: B3 DNA binding domain
  misc_feature (237)..(367): Homolog of NCBI NO: 34910734 NR Description: P0022F10.13 [Oryza sativa (japonica
  misc_feature (209)..(369): Homolog of NCBI NO: 18402653 NR Description: transcriptional factor B3 family [Arabidopsis
  misc_feature (209)..(369): Homolog of NCBI NO: 14596161 NR Description: Unknown protein [Arabidopsis thaliana]
  misc_feature (210)..(369): Homolog of NCBI NO: 9280316 NR Description: gb|AAD43153.1~gene_id:K13E13.10~similar to
  misc_feature (1)..(106): Homolog of NCBI NO: 33943517 NR Description: reduced vernalization response 1 [Brassica rapa]
  misc_feature (210)..(369): Homolog of NCBI NO: 33943517 NR Description: reduced vernalization response 1 [Brassica rapa]
  misc_feature (1)..(106): Homolog of NCBI NO: 40806799 NR Description: reduced vernalization response 1 [Brassica rapa]
  misc_feature (210)..(369): Homolog of NCBI NO: 40806799 NR Description: reduced vernalization response 1 [Brassica rapa]
  misc_feature (1)..(130): Homolog of NCBI NO: 30685150 NR Description: transcriptional factor B3 family [Arabidopsis
  misc_feature (210)..(369): Homolog of NCBI NO: 30685150 NR Description: transcriptional factor B3 family [Arabidopsis
MRKYGGELSPIVTLSVPDGSVWHVGLKKADNKYCFLDGWKEFVQRYSIGVGYLLVFRYEGKSSFNVHIFNLATSEINYQSVTRSSNEGLHFTNCLKFFEEMEGEDSIEISDSSPSHLSPSSLQNQALAGSVDKMMPGKSYNTPPALQNLFNGSKLNSINWGEGGNAHSSRSANSLDNRLTRDIGLQFNAVEFKRSTEELKLRASIEERMKKTTRKKRKSDGQEPSAGHEEEVEMRFRFYESASARKRTVTAEERERVINEAKAFEPSNPFCRVVLRPSYLYRGCIMYLPSCFAEKHLNGVSGFIKLQISNGRQWPVRCLYKGGRAKLSQGWFEFSLENNLGEGDVCVFELLRMKEVVLQVTIFHVTEDVGLLSPPLQHNQNMTSAKLLSTPLQQHLTSTKMVRN

SEQ ID NO: 51523 - protein, 304 aa, Glycine max
  peptide (1)..(304): Ceres Seq. ID no. 15171445
  misc_feature (170)..(267): Pfam Name: B3 DNA binding domain Pfam Description: B3 DNA binding domain
  misc_feature (1)..(32): Homolog of NCBI NO: 28201553 NR Description: putative auxin response factor
  misc_feature (50)..(262): Homolog of NCBI NO: 28201553 NR Description: putative auxin response factor
  misc_feature (137)..(267): Homolog of NCBI NO: 34910734 NR Description: P0022F10.13 [Oryza sativa (japonica
  misc_feature (109)..(269): Homolog of NCBI NO: 18402653 NR Description: transcriptional factor B3 family [Arabidopsis
  misc_feature (109)..(269): Homolog of NCBI NO: 14596161 NR Description: Unknown protein [Arabidopsis thaliana]
  misc_feature (110)..(269): Homolog of NCBI NO: 9280316 NR Description: gb|AAD43153.1~gene_id:K13E13.10~similar to
  misc_feature (110)..(269): Homolog of NCBI NO: 33943517 NR Description: reduced vernalization response 1 [Brassica rapa]
  misc_feature (110)..(269): Homolog of NCBI NO: 40806799 NR Description: reduced vernalization response 1 [Brassica rapa]
  misc_feature (1)..(30): Homolog of NCBI NO: 30685150 NR Description: transcriptional factor B3 family [Arabidopsis
  misc_feature (110)..(269): Homolog of NCBI NO: 30685150 NR Description: transcriptional factor B3 family [Arabidopsis
MEGEDSIEISDSSPSHLSPSSLQNQALAGSVDKMMPGKSYNTPPALQNLFNGSKLNSINWGEGGNAHSSRSANSLDNRLTRDIGLQFNAVEFKRSTEELKLRASIEERMKKTTRKKRKSDGQEPSAGHEEEVEMRFRFYESASARKRTVTAEERERVINEAKAFEPSNPFCRVVLRPSYLYRGCIMYLPSCFAEKHLNGVSGFIKLQISNGRQWPVRCLYKGGRAKLSQGWFEFSLENNLGEGDVCVFELLRMKEVVLQVTIFHVTEDVGLLSPPLQHNQNMTSAKLLSTPLQQHLTSTKMVRN

SEQ ID NO: 51524 - DNA, 1112 bp, Glycine max
  misc_feature (1)..(1112): Ceres Seq. ID no. 12609304
atcaagtcttgatttcatatggaagagtcctccaaggcggttgaggttgagcaggaagcaagtgaagcaaaggctcctcacgaggctttgtttcttgtcttgtcatatcttcctgtgtacgaggttgtggtcatgtctcaagtctgcacatcactaagggatgcagtgaacaatgacatattactatggttgaatgttattgttcaaaggcccctcagttggcgactcaacgatgagattctaatcaaaatcacctcaaaggccaatggtaggctcaaaactctcgctctcatcaactgcatgcacgttaccgaccacggcctccaaagggtcgttcaacaaaatcctctcattaacaagttgcatataccagcatgcactggcataacccctgaaggagttctaggagccgtgaaaacactatgccaaagaagcaattgcttaaagaccttaagtataaacggcatctacaacatacagaaggagcatcttgacatgcttatcatgaaccttggaaagaatcaaccactagaggagcagcaaaagcagcagcagcctgtctactatcatgaacgatgtagcttttcagtattcaagcaggaagaaagctggcggcttattgatttggagatatgtcccaggtgctttgaggtgaggatggtttatgattgccccaaagagcactgcacgagaagggaatggcccctagctccatgtaggggttgcaatttttgtattccaaggtgcgaaaactgtggtggatgcattgaatccggagaagtggaagagggagcttgtgaagatatcttctgccttgaatgttggttacagcttcccaagtgcagtttctgcaacaaaccatattgtaagcaacacacaaactggtggtgcacttcttcagactcttcattgatctgtaaagtttgtgatgaaaattctcacggatatacgtatactgatgttctataatgacgtgcaacttgggataagtttcaactatcatgcatcaagccatcaagtaagtttatagatgatgaatgattatattatttgcattcatgaatgtacttaaagtttgattgttctggattataaaatgaaggtttttctct

SEQ ID NO: 51525 - protein, 316 aa, Glycine max
  peptide (1)..(316): Ceres Seq. ID no. 12609305
  misc_feature (112)..(288): Homolog of NCBI NO: 18379265 NR Description: expressed protein
  misc_feature (97)..(288): Homolog of NCBI NO: 21536590 NR Description: unknown [Arabidopsis thaliana]
  misc_feature (21)..(268): Homolog of NCBI NO: 18405307 NR Description: expressed protein
  misc_feature (11)..(269): Homolog of NCBI NO: 18379265 NR Description: expressed protein
  misc_feature (3)..(268): Homolog of NCBI NO: 38345348 NR Description: OSJNBa0081L15.21 [Oryza sativa (japonica
  misc_feature (11)..(269): Homolog of NCBI NO: 21536590 NR Description: unknown [Arabidopsis thaliana]
  misc_feature (21)..(274): Homolog of NCBI NO: 22655121 NR Description: expressed protein [Arabidopsis thaliana]
  misc_feature (21)..(274): Homolog of NCBI NO: 18404757 NR Description: expressed protein
  misc_feature (14)..(307): Homolog of NCBI NO: 38175497 NR Description: F-box protein family-like protein
MEESSKAVEVEQEASEAKAPHEALFLVLSYLPVYEVVVMSQVCTSLRDAVNNDILLWLNVIVQRPLSWRLNDEILIKITSKANGRLKTLALINCMHVTDHGLQRVVQQNPLINKLHIPACTGITPEGVLGAVKTLCQRSNCLKTLSINGIYNIQKEHLDMLIMNLGKNQPLEEQQKQQQPVYYHERCSFSVFKQEESWRLIDLEICPRCFEVRMVYDCPKEHCTRREWPLAPCRGCNFCIPRCENCGGCIESGEVEEGACEDIFCLECWLQLPKCSFCNKPYCKQHTNWWCTSSDSSLICKVCDENSHGYTYTDVL

SEQ ID NO: 51526 - protein, 278 aa, Glycine max
  peptide (1)..(278): Ceres Seq. ID no. 12609306
  misc_feature (74)..(250): Homolog of NCBI NO: 18379265 NR Description: expressed protein
  misc_feature (59)..(250): Homolog of NCBI NO: 21536590 NR Description: unknown [Arabidopsis thaliana]
  misc_feature (1)..(230): Homolog of NCBI NO: 18405307 NR Description: expressed protein
  misc_feature (1)..(231): Homolog of NCBI NO: 18379265 NR Description: expressed protein
  misc_feature (1)..(230): Homolog of NCBI NO: 38345348 NR Description: OSJNBa0081L15.21 [Oryza sativa (japonica
  misc_feature (1)..(231): Homolog of NCBI NO: 21536590 NR Description: unknown [Arabidopsis thaliana]
  misc_feature (1)..(236): Homolog of NCBI NO: 22655121 NR Description: expressed protein [Arabidopsis thaliana]
  misc_feature (1)..(236): Homolog of NCBI NO: 18404757 NR Description: expressed protein
  misc_feature (1)..(269): Homolog of NCBI NO: 38175497 NR Description: F-box protein family-like protein
MSQVCTSLRDAVNNDILLWLNVIVQRPLSWRLNDEILIKITSKANGRLKTLALINCMHVTDHGLQRVVQQNPLINKLHIPACTGITPEGVLGAVKTLCQRSNCLKTLSINGIYNIQKEHLDMLIMNLGKNQPLEEQQKQQQPVYYHERCSFSVFKQEESWRLIDLEICPRCFEVRMVYDCPKEHCTRREWPLAPCRGCNFCIPRCENCGGCIESGEVEEGACEDIFCLECWLQLPKCSFCNKPYCKQHTNWWCTSSDSSLICKVCDENSHGYTYTDVL

SEQ ID NO: 51527 - protein, 222 aa, Glycine max
  peptide (1)..(222): Ceres Seq. ID no. 12609307
  misc_feature (18)..(194): Homolog of NCBI NO: 18379265 NR Description: expressed protein
  misc_feature (3)..(194): Homolog of NCBI NO: 21536590 NR Description: unknown [Arabidopsis thaliana]
  misc_feature (1)..(174): Homolog of NCBI NO: 18405307 NR Description: expressed protein
  misc_feature (1)..(175): Homolog of NCBI NO: 18379265 NR Description: expressed protein
  misc_feature (1)..(174): Homolog of NCBI NO: 38345348 NR Description: OSJNBa0081L15.21 [Oryza sativa (japonica
  misc_feature (1)..(175): Homolog of NCBI NO: 21536590 NR Description: unknown [Arabidopsis thaliana]
  misc_feature (1)..(180): Homolog of NCBI NO: 22655121 NR Description: expressed protein [Arabidopsis thaliana]
  misc_feature (1)..(180): Homolog of NCBI NO: 18404757 NR Description: expressed protein
  misc_feature (1)..(213): Homolog of NCBI NO: 38175497 NR Description: F-box protein family-like protein
MHVTDHGLQRVVQQNPLINKLHIPACTGITPEGVLGAVKTLCQRSNCLKTLSINGIYNIQKEHLDMLIMNLGKNQPLEEQQKQQQPVYYHERCSFSVFKQEESWRLIDLEICPRCFEVRMVYDCPKEHCTRREWPLAPCRGCNFCIPRCENCGGCIESGEVEEGACEDIFCLECWLQLPKCSFCNKPYCKQHTNWWCTSSDSSLICKVCDENSHGYTYTDVL

SEQ ID NO: 51528 - DNA, 1374 bp, Glycine max
  misc_feature (1)..(1374): Ceres Seq. ID no. 15224418
aaaggaacaaattactattttagtgacaaaatcaattggattttgaaaaatctgccttaaaaatgatttgtaccaaaatttatgatccttaaccacggagaacacttttttacattgtaaatttgtaattgcatggaaatgaaactttgaaaattatccttataaaataattatttaatttataatttataaaagtaaaaaataattttaatttgaaaagtataatatgaacacgacagggtttctttccgaagagaagagaagagagatctgagagaagcagagctgaagaggtgaagtgaagatgatgtccggaaaatatacgtcgattgacgcgcagcagcttcagggatctgttcctgccgttccagattcacgacccgccaccgtcaatttcgcagattcaaatcttcagacttttcctccttctggagctcagggcaagatcaccgctgcttccgggcctcctcgtgacgctgatgattcattttcaaaacctgtatctggttctgatgaaccgcagcagggtggttggtttcagacttttacaattgctgcttacaaaccatactttgatgttgacacttcagatgttctagagaggattatcgactcactatttccatttagaggatctttcaatgaaaaaactgctaccaaccctgatttgtatggtccattctggatttgcactaccttgatatttgtagcggcatctattggcacctttgtgacatacatagcgcacaagctaaagagcaaagaatgggattatgacataaatctggtgacttggtctgctggtttgttttatggctatgttaccattgttcctctttgcctgtatgtaatcctcaaatatttctctgcaccggctggccttgtgcaactattctgtctgtatgggtattccctgtttgtctttattccagccctgtgtatgtccgttgtgccactggatatatttagatgggtggttgcaggtgtggcagggttcatgtcagcaacatttgtggcactgaacctccgggcacatatcaaatcagcaggtgaaaggtggttcttgattgttgctggcatttttctgttgcagctggctctagctgtggtactaaagctttacctcttcactgtatcagtttaagaggaaactggacagtatggatgaaatatacagaatgaaggtatagctttttggcattgtaggttttcatggatacaatttgtagctgaagcatgattcacagattaaaccatcgtgtattcattcttttgttgcaatatagaggcgaataacttgtgatcatcataaaagcacttgtctttgacgttgttaatgcaagttataatgcaggcttctgtgattcttttgtt

SEQ ID NO: 51529 - protein, 279 aa, Glycine max
  peptide (1)..(279): Ceres Seq. ID no. 15224419
  misc_feature (90)..(255): Pfam Name: Yip1 domain Pfam Description: Yip1 domain
  misc_feature (72)..(275): Homolog of NCBI NO: 40740298 NR Description: hypothetical protein AN4017.2 [Aspergillus
  misc_feature (42)..(275): Homolog of NCBI NO: 18859855 NR Description: CG4645-PA [Drosophila melanogaster]
  misc_feature (81)..(275): Homolog of NCBI NO: 38106634 NR Description: hypothetical protein MG06045.4 [Magnaporthe
  misc_feature (29)..(275): Homolog of NCBI NO: 32408303 NR Description: hypothetical protein [Neurospora crassa]
  misc_feature (2)..(275): Homolog of NCBI NO: 30688039 NR Description: expressed protein [Arabidopsis thaliana]
  misc_feature (1)..(279): Homolog of NCBI NO: 34912560 NR Description: P0410E03.18 [Oryza sativa (japonica
  misc_feature (1)..(279): Homolog of NCBI NO: 6729038 NR Description: unknown protein [Arabidopsis thaliana]
  misc_feature (1)..(279): Homolog of NCBI NO: 30679454 NR Description: expressed protein [Arabidopsis thaliana]
  misc_feature (1)..(279): Homolog of NCBI NO: 38564308 NR Description: At5g27490 [Arabidopsis thaliana]
  misc_feature (1)..(279): Homolog of NCBI NO: 30690667 NR Description: expressed protein [Arabidopsis thaliana]
MMSGKYTSIDAQQLQGSVPAVPDSRPATVNFADSNLQTFPPSGAQGKITAASGPPRDADDSFSKPVSGSDEPQQGGWFQTFTIAAYKPYFDVDTSDVLERIIDSLFPFRGSFNEKTATNPDLYGPFWICTTLIFVAASIGTFVTYIAHKLKSKEWDYDINLVTWSAGLFYGYVTIVPLCLYVILKYFSAPAGLVQLFCLYGYSLFVFIPALCMSVVPLDIFRWVVAGVAGFMSATFVALNLRAHIKSAGERWFLIVAGIFLLQLALAVVLKLYLFTVSV

SEQ ID NO: 51530 - protein, 278 aa, Glycine max
  peptide (1)..(278): Ceres Seq. ID no. 15224420
  misc_feature (89)..(254): Pfam Name: Yip1 domain Pfam Description: Yip1 domain
  misc_feature (71)..(274): Homolog of NCBI NO: 40740298 NR Description: hypothetical protein AN4017.2 [Aspergillus
  misc_feature (41)..(274): Homolog of NCBI NO: 18859855 NR Description: CG4645-PA [Drosophila melanogaster]
  misc_feature (80)..(274): Homolog of NCBI NO: 38106634 NR Description: hypothetical protein MG06045.4 [Magnaporthe
  misc_feature (28)..(274): Homolog of NCBI NO: 32408303 NR Description: hypothetical protein [Neurospora crassa]
  misc_feature (1)..(274): Homolog of NCBI NO: 30688039 NR Description: expressed protein [Arabidopsis thaliana]
  misc_feature (1)..(278): Homolog of NCBI NO: 34912560 NR Description: P0410E03.18 [Oryza sativa (japonica
  misc_feature (1)..(278): Homolog of NCBI NO: 6729038 NR Description: unknown protein [Arabidopsis thaliana]
  misc_feature (1)..(278): Homolog of NCBI NO: 30679454 NR Description: expressed protein [Arabidopsis thaliana]
  misc_feature (1)..(278): Homolog of NCBI NO: 38564308 NR Description: At5g27490 [Arabidopsis thaliana]
  misc_feature (1)..(278): Homolog of NCBI NO: 30690667 NR Description: expressed protein [Arabidopsis thaliana]
MSGKYTSIDAQQLQGSVPAVPDSRPATVNFADSNLQTFPPSGAQGKITAASGPPRDADDSFSKPVSGSDEPQQGGWFQTFTIAAYKPYFDVDTSDVLERIIDSLFPFRGSFNEKTATNPDLYGPFWICTTLIFVAASIGTFVTYIAHKLKSKEWDYDINLVTWSAGLFYGYVTIVPLCLYVILKYFSAPAGLVQLFCLYGYSLFVFIPALCMSVVPLDIFRWVVAGVAGFMSATFVALNLRAHIKSAGERWFLIVAGIFLLQLALAVVLKLYLFTVSV

SEQ ID NO: 51531 - DNA, 1239 bp, Glycine max
  misc_feature (1)..(1239): Ceres Seq. ID no. 13638540
aaaacaaaaacccctcgtccgctccaaaaccctaaaacctgaaagcatacgctacttctgcttcgttgcgatgttggaaatcaaaaccgccaagacccgcaagggcaagcgggagctagagaaacgcgctcccaagctcgtggaatcggggaagaagacgctgatcctgcacggaacgaagaccagcggcgtgctgaacgccgtgctggcgcagatttatcacctgaagaaggactgtgccgtcaagtacagccgcaggaacgagaacgtcaagcccttcgaggccggcggcgagacttcgcttgagttcttctctctcaaaaccgattgcagtatctttgtgtatggatctcactcgaagaagcggcctgataaccttgttattgggagaacttatgatcatcatatctatgatttagtggaggttggagttgaaaattttaaacccatggagtcttttagttatgataagaagttggctcctaaggaagggtcaaagccttttattgtttttattggagaaggatttgaggctgtggaagagctaaagcatttgaaggaagttttgctcgatcttcttcgcggtgaggttgtggagaatctaaatcttgctggagtggatcgtgcatatgtatgtgctgccctttctccgaatcgtgtgttttttacacactgtgcattgcggctgaaaaagtcaggcaccgttgtgccaaggatggaattggaagaagttggcccgtccatggattttgttcttcgtaggcatcgtcctcctaatgaaagtttgaggaaggaagcactgaaaacgtcgagggagaagccgaagaaaaaggagaagaatgttaaaaaggatgaattacagggaaagattggaagtatttatatcccagatcagaaggttggagaaactcctttaccttacaaagcaaaaggagtgaagagggagcgccgagaatcgaagcggaaaaatgagagtgatggaagtgcttcaaaacggaagaaggaagattcttaatacttacaaattacacttgttgtctttccctggcatctgattataatagaatgatcaattgtagatcatatgatattaaactgcatgttgtttaggtgtcatgaatattcatgattttcccctataagggggggttttgccatcattttattcagcgtatttttttccccttcatattttgccaagttgaaatgcagtcctttgaaccatgagtcttagctttt

SEQ ID NO: 51532 - protein, 337 aa, Glycine max
  peptide (1)..(337): Ceres Seq. ID no. 13638541
  misc_feature (31)..(279): Homolog of NCBI NO: 10437105 NR Description: unnamed protein product [Homo sapiens]
  misc_feature (23)..(336): Homolog of NCBI NO: 12850727 NR Description: unnamed protein product [Mus musculus]
  misc_feature (23)..(336): Homolog of NCBI NO: 31982662 NR Description: RIKEN cDNA 2810470K21 [Mus musculus]
  misc_feature (23)..(336): Homolog of NCBI NO: 18203123 NR Description: Brix domain containing protein 1
  misc_feature (23)..(335): Homolog of NCBI NO: 27705690 NR Description: similar to RIKEN cDNA 2810470K21 gene
  misc_feature (31)..(336): Homolog of NCBI NO: 39930469 NR Description: brix domain containing 1 [Homo sapiens]
  misc_feature (23)..(336): Homolog of NCBI NO: 7670547 NR Description: unnamed protein product [Mus musculus]
  misc_feature (27)..(335): Homolog of NCBI NO: 34914658 NR Description: P0504D03.20 [Oryza sativa (japonica
  misc_feature (25)..(333): Homolog of NCBI NO: 21554561 NR Description: unknown [Arabidopsis thaliana]
  misc_feature (24)..(333): Homolog of NCBI NO: 18403828 NR Description: expressed protein [Arabidopsis thaliana]
KQKPLVRSKTLKPESIRYFCFVAMLEIKTAKTRKGKRELEKRAPKLVESGKKTLILHGTKTSGVLNAVLAQIYHLKKDCAVKYSRRNENVKPFEAGGETSLEFFSLKTDCSIFVYGSHSKKRPDNLVIGRTYDHHIYDLVEVGVENFKPMESFSYDKKLAPKEGSKPFIVFIGEGFEAVEELKHLKEVLLDLLRGEVVENLNLAGVDRAYVCAALSPNRVFFTHCALRLKKSGTVVPRMELEEVGPSMDFVLRRHRPPNESLRKEALKTSREKPKKKEKNVKKDELQGKIGSIYIPDQKVGETPLPYKAKGVKRERRESKRKNESDGSASKRKKEDS

SEQ ID NO: 51533 - protein, 314 aa, Glycine max
  peptide (1)..(314): Ceres Seq. ID no. 13638542
  misc_feature (8)..(256): Homolog of NCBI NO: 10437105 NR Description: unnamed protein product [Homo sapiens]
  misc_feature (1)..(313): Homolog of NCBI NO: 12850727 NR Description: unnamed protein product [Mus musculus]
  misc_feature (1)..(313): Homolog of NCBI NO: 31982662 NR Description: RIKEN cDNA 2810470K21 [Mus musculus]
  misc_feature (1)..(313): Homolog of NCBI NO: 18203123 NR Description: Brix domain containing protein 1
  misc_feature (1)..(312): Homolog of NCBI NO: 27705690 NR Description: similar to RIKEN cDNA 2810470K21 gene
  misc_feature (8)..(313): Homolog of NCBI NO: 39930469 NR Description: brix domain containing 1 [Homo sapiens]
  misc_feature (1)..(313): Homolog of NCBI NO: 7670547 NR Description: unnamed protein product [Mus musculus]
  misc_feature (4)..(312): Homolog of NCBI NO: 34914658 NR Description: P0504D03.20 [Oryza sativa (japonica
  misc_feature (2)..(310): Homolog of NCBI NO: 21554561 NR Description: unknown [Arabidopsis thaliana]
  misc_feature (1)..(310): Homolog of NCBI NO: 18403828 NR Description: expressed protein [Arabidopsis thaliana]
MLEIKTAKTRKGKRELEKRAPKLVESGKKTLILHGTKTSGVLNAVLAQIYHLKKDCAVKYSRRNENVKPFEAGGETSLEFFSLKTDCSIFVYGSHSKKRPDNLVIGRTYDHHIYDLVEVGVENFKPMESFSYDKKLAPKEGSKPFIVFIGEGFEAVEELKHLKEVLLDLLRGEVVENLNLAGVDRAYVCAALSPNRVFFTHCALRLKKSGTVVPRMELEEVGPSMDFVLRRHRPPNESLRKEALKTSREKPKKKEKNVKKDELQGKIGSIYIPDQKVGETPLPYKAKGVKRERRESKRKNESDGSASKRKKEDS

SEQ ID NO: 51534 - protein, 188 aa, Glycine max
  peptide (1)..(188): Ceres Seq. ID no. 13638543
  misc_feature (1)..(130): Homolog of NCBI NO: 10437105 NR Description: unnamed protein product [Homo sapiens]
  misc_feature (1)..(187): Homolog of NCBI NO: 12850727 NR Description: unnamed protein product [Mus musculus]
  misc_feature (1)..(187): Homolog of NCBI NO: 31982662 NR Description: RIKEN cDNA 2810470K21 [Mus musculus]
  misc_feature (1)..(187): Homolog of NCBI NO: 18203123 NR Description: Brix domain containing protein 1
  misc_feature (1)..(186): Homolog of NCBI NO: 27705690 NR Description: similar to RIKEN cDNA 2810470K21 gene
  misc_feature (1)..(187): Homolog of NCBI NO: 39930469 NR Description: brix domain containing 1 [Homo sapiens]
  misc_feature (1)..(187): Homolog of NCBI NO: 7670547 NR Description: unnamed protein product [Mus musculus]
  misc_feature (1)..(186): Homolog of NCBI NO: 34914658 NR Description: P0504D03.20 [Oryza sativa (japonica
  misc_feature (1)..(184): Homolog of NCBI NO: 21554561 NR Description: unknown [Arabidopsis thaliana]
  misc_feature (1)..(184): Homolog of NCBI NO: 18403828 NR Description: expressed protein [Arabidopsis thaliana]
MESFSYDKKLAPKEGSKPFIVFIGEGFEAVEELKHLKEVLLDLLRGEVVENLNLAGVDRAYVCAALSPNRVFFTHCALRLKKSGTVVPRMELEEVGPSMDFVLRRHRPPNESLRKEALKTSREKPKKKEKNVKKDELQGKIGSIYIPDQKVGETPLPYKAKGVKRERRESKRKNESDGSASKRKKEDS

SEQ ID NO: 51535 - DNA, 1658 bp, Glycine max
  misc_feature (1)..(1658): Ceres Seq. ID no. 15176223
ttttccaattcgagagcttcggaataaacctgaagctaacgaaccaaccataaaccctatctatggccaccctcgacccaatccaaaacggcgtctcttcggacaatccagccgccgaaccgtcctccacccccgccgaagaccccaccccagaccccgccgccgccgagaagcggtggccggggtggcctggccactgcgttttccgcctaatcgtgccggtgctcaaggtcggtagcatcatcggccgcaagggggagctcatcaagaagacctgcgaggaaacgaaagctcgcattcgagtcctcgacggcgccgtcggcacctccgatcgaatcgtactcatatcagggaaggaagagccggaggcacctctttctcctgcaatgaatgctgtaataagggtttttaaacgtgtctctgggttttctgaaattgatgccgagaataaagcatcagcagttgcattttgttctgtccgtttattggtggcctcaacacaggctataaatttgattggaaagcagggttcattaattaaatctatacaggaaaataccggtgcttctgttagagtgctgtctggagatgaggttcccttttatgctgctgcggacgagaggatcgtggaactacagggagaagccatgaaggtccttaaggctttagaagcagtagttgggcacctgaggaagtttttggttgataatagtgttcttcccttatttgagaaaacttacaatgcaacaatctcccaagagcaccaggcagatactacctgggttgataaaccatcactgcatagtgcttcacaacctagcattgtaactgatcttcctctttcaacaaaaagggattctctctttgctgaccgtgaaagtcagttggactcattgctccctccttccacaatgtcaatatatgggcaagattcttcactttctggtcttcgttcttcggctctcagtcgacccagtgctcctcctattgttacaacggtaatacaaaccatgcaaataccattgtcctatgcagaggacataattggtatacaagggactaatattgaatacattcgctgtactagtggagccatattgactgttcaggagagcccggtgcctgatgaaatcattgtggaaataaaaggtacctcatctcaggttcaaacggcacaacagttgattcaggaagttataagtaatcacaaagaacctcttgctagtaattacagcaggttagatacaggcctgaggtcttcttaccctcagttgggcagttcatcgtattcctcatcttccttgtcctcgcaaccctatagcggtgggtacggatcttctggtcttggaggctataggactttcagactttgaatttagtctctaggtctcacactgacttcatttgttctaattgggtctgatttgagagtcgatgctggaatgtattatggagccaccaaaatcacgtttttattatctgttatcatcatcataattgggtaatcttcgatgtggccaaagagttgagtagtgccatagaaaatgtaatgaaatattaaccatttccaggatgtttagtttgtagtgtatatgtgcattgatttaaagcttaatcgtggaatctataggggcatgaagctatgttatatttatttt

SEQ ID NO: 51536 - protein, 436 aa, Glycine max
  peptide (1)..(436): Ceres Seq. ID no. 15176224
  misc_feature (140)..(193): Pfam Name: KH domain Pfam Description: KH domain
  misc_feature (47)..(211): Homolog of NCBI NO: 30685269 NR Description: KH domain protein [Arabidopsis thaliana]
  misc_feature (40)..(209): Homolog of NCBI NO: 18921324 NR Description: putative nucleic acid binding protein [Oryza
  misc_feature (43)..(345): Homolog of NCBI NO: 34904418 NR Description: unnamed protein product [Oryza sativa (japonica
  misc_feature (175)..(250): Homolog of NCBI NO: 37534332 NR Description: unknown protein [Oryza sativa (japonica
  misc_feature (33)..(173): Homolog of NCBI NO: 37534332 NR Description: unknown protein [Oryza sativa (japonica
  misc_feature (220)..(380): Homolog of NCBI NO: 37534332 NR Description: unknown protein [Oryza sativa (japonica
  misc_feature (5)..(431): Homolog of NCBI NO: 15229321 NR Description: KH domain protein [Arabidopsis thaliana]
  misc_feature (32)..(431): Homolog of NCBI NO: 16924113 NR Description: putative RNA binding protein [Oryza sativa]
  misc_feature (16)..(431): Homolog of NCBI NO: 37536904 NR Description: putative nucleic acid binding protein
  misc_feature (19)..(434): Homolog of NCBI NO: 15236094 NR Description: KH domain protein [Arabidopsis thaliana]
MATLDPIQNGVSSDNPAAEPSSTPAEDPTPDPAAAEKRWPGWPGHCVFRLIVPVLKVGSIIGRKGELIKKTCEETKARIRVLDGAVGTSDRIVLISGKEEPEAPLSPAMNAVIRVFKRVSGFSEIDAENKASAVAFCSVRLLVASTQAINLIGKQGSLIKSIQENTGASVRVLSGDEVPFYAAADERIVELQGEAMKVLKALEAVVGHLRKFLVDNSVLPLFEKTYNATISQEHQADTTWVDKPSLHSASQPSIVTDLPLSTKRDSLFADRESQLDSLLPPSTMSIYGQDSSLSGLRSSALSRPSAPPIVTTVIQTMQIPLSYAEDIIGIQGTNIEYIRCTSGAILTVQESPVPDEIIVEIKGTSSQVQTAQQLIQEVISNHKEPLASNYSRLDTGLRSSYPQLGSSSYSSSSLSSQPYSGGYGSSGLGGYRTFRL

SEQ ID NO: 51537 - protein, 328 aa, Glycine max
  peptide (1)..(328): Ceres Seq. ID no. 15176225
  misc_feature (32)..(85): Pfam Name: KH domain Pfam Description: KH domain
  misc_feature (1)..(103): Homolog of NCBI NO: 30685269 NR Description: KH domain protein [Arabidopsis thaliana]
  misc_feature (1)..(101): Homolog of NCBI NO: 18921324 NR Description: putative nucleic acid binding protein [Oryza
  misc_feature (1)..(237): Homolog of NCBI NO: 34904418 NR Description: unnamed protein product [Oryza sativa (japonica
  misc_feature (67)..(142): Homolog of NCBI NO: 37534332 NR Description: unknown protein [Oryza sativa (japonica
  misc_feature (1)..(65): Homolog of NCBI NO: 37534332 NR Description: unknown protein [Oryza sativa (japonica
  misc_feature (112)..(272): Homolog of NCBI NO: 37534332 NR Description: unknown protein [Oryza sativa (japonica
  misc_feature (1)..(323): Homolog of NCBI NO: 15229321 NR Description: KH domain protein [Arabidopsis thaliana]
  misc_feature (1)..(323): Homolog of NCBI NO: 16924113 NR Description: putative RNA binding protein [Oryza sativa]
  misc_feature (1)..(323): Homolog of NCBI NO: 37536904 NR Description: putative nucleic acid binding protein
  misc_feature (1)..(326): Homolog of NCBI NO: 15236094 NR Description: KH domain protein [Arabidopsis thaliana]
MNAVIRVFKRVSGFSEIDAENKASAVAFCSVRLLVASTQAINLIGKQGSLIKSIQENTGASVRVLSGDEVPFYAAADERIVELQGEAMKVLKALEAVVGHLRKFLVDNSVLPLFEKTYNATISQEHQADTTWVDKPSLHSASQPSIVTDLPLSTKRDSLFADRESQLDSLLPPSTMSIYGQDSSLSGLRSSALSRPSAPPIVTTVIQTMQIPLSYAEDIIGIQGTNIEYIRCTSGAILTVQESPVPDEIIVEIKGTSSQVQTAQQLIQEVISNHKEPLASNYSRLDTGLRSSYPQLGSSSYSSSSLSSQPYSGGYGSSGLGGYRTFRL

SEQ ID NO: 51538 - protein, 241 aa, Glycine max
  peptide (1)..(241): Ceres Seq. ID no. 15176226
  misc_feature (1)..(16): Homolog of NCBI NO: 11357886 NR Description: hypothetical protein F8M21.160 - Arabidopsis
  misc_feature (1)..(16): Homolog of NCBI NO: 30685269 NR Description: KH domain protein [Arabidopsis thaliana]
  misc_feature (1)..(14): Homolog of NCBI NO: 18921324 NR Description: putative nucleic acid binding protein [Oryza
  misc_feature (1)..(150): Homolog of NCBI NO: 34904418 NR Description: unnamed protein product [Oryza sativa (japonica
  misc_feature (1)..(55): Homolog of NCBI NO: 37534332 NR Description: unknown protein [Oryza sativa (japonica
  misc_feature (25)..(185): Homolog of NCBI NO: 37534332 NR Description: unknown protein [Oryza sativa (japonica
  misc_feature (1)..(236): Homolog of NCBI NO: 15229321 NR Description: KH domain protein [Arabidopsis thaliana]
  misc_feature (1)..(236): Homolog of NCBI NO: 16924113 NR Description: putative RNA binding protein [Oryza sativa]
  misc_feature (1)..(236): Homolog of NCBI NO: 37536904 NR Description: putative nucleic acid binding protein
  misc_feature (1)..(239): Homolog of NCBI NO: 15236094 NR Description: KH domain protein [Arabidopsis thaliana]
MKVLKALEAVVGHLRKFLVDNSVLPLFEKTYNATISQEHQADTTWVDKPSLHSASQPSIVTDLPLSTKRDSLFADRESQLDSLLPPSTMSIYGQDSSLSGLRSSALSRPSAPPIVTTVIQTMQIPLSYAEDIIGIQGTNIEYIRCTSGAILTVQESPVPDEIIVEIKGTSSQVQTAQQLIQEVISNHKEPLASNYSRLDTGLRSSYPQLGSSSYSSSSLSSQPYSGGYGSSGLGGYRTFRL

SEQ ID NO: 51539 - DNA, 1480 bp, Glycine max
  misc_feature (1)..(1480): Ceres Seq. ID no. 14311922
acttttcctttcatccttgagaccttgacactttcactttctcgcataacccttaaggtgccgcagatacgggcacagcctccctcccttgcgagtcttacaccgtcataagtcacggttgtcatcggagctcttgcggttgctcctcacagtcacagattgttaaaaattgtggtaaatcatggaaaatatcgcgaaccacaacgatgatagcaaacaaaaagaagcgcctcagctggcggcgttgttgaaagaaatgaaggaaggacttgataccgtaaggcataaaattcaatctttaactgccatggtgaaagaaggtctatatcctacagcagatggatttagttaccttgaagttaaaaatttgttgcttctgaattattgtcaatcccttgtttattatttattgcggaaggctaagggattatcaatagaagatcatcctgttgttcgaagtgttgtagagatacgattgtttttggaaaagattcggccaattgacaagaaacaacaataccagatccagaaactgatgcaagctagtgaaaatgcaatcagaagtgatattctaaacaaggagccagttgcatccaataagagcgaggacgcatcaaagtatcgtcccaatcctgacatgcttgttagcaaagtagacctaacctcgcaggctgacaatgagtattatcaacctgtaaaatttgcgcctacttctatggatctagagaaatcttcaaagcatgaaagaaatgccttgcgaagagaaaaagaaattctgaaacaagctaagcagagtgattatcttaggacattgatgaatgatatggaggaaagacctgaagagataagagattttgagggagctagcagagaagttgatagatatattgccaagatggacgaacgtgctcggcaagaggaggagctgttcacacgcgttcctcttacgaaacaggaaaggaaacgagaaaagtatttgaagaaatcaagaaatgggttgcaaggtctaacagaaagtttctatgatgaaatcaaaacattaccctttgaagataaaactggagagcaagtagtgggctctagtaatggtagcagaacaaacaatagactgaagaagcgaaagaggaaacattaaaggaagaaaatttgggttttgagctaaagggctgaaatgctctctggaaaacagaccacttcatgctgttgtcggaagtaatgctagatttaacgaaaacgacagagttggtgttggtgctttcctccgtgtttgtttgtagattttagttacattattgtctttttatttatttatttacttattattattattattataggctcgggtgcttaattgggtacgtgaatttgagattttcgcagagatgaaatgtgtttttttttttgctattacagatgtgcacccatttttgcgatgcaagtggatttttttaacccacctttatatatttaggtggagtac

SEQ ID NO: 51540 - protein, 317 aa, Glycine max
  peptide (1)..(317): Ceres Seq. ID no. 14311923
  misc_feature (16)..(124): Pfam Name: Sas10/Utp3 family Pfam Description: Sas10/Utp3 family
  misc_feature (22)..(317): Homolog of NCBI NO: 20876056 NR Description: RIKEN cDNA 1500001L15 [Mus musculus]
  misc_feature (13)..(317): Homolog of NCBI NO: 34874139 NR Description: similar to CG11030-PA [Rattus norvegicus]
  misc_feature (14)..(317): Homolog of NCBI NO: 40675680 NR Description: Unknown (protein for IMAGE:5336691) [Silurana
  misc_feature (22)..(317): Homolog of NCBI NO: 23272205 NR Description: 1500001L15Rik protein [Mus musculus]
  misc_feature (13)..(315): Homolog of NCBI NO: 37545892 NR Description: similar to hypothetical protein [Homo sapiens]
  misc_feature (13)..(315): Homolog of NCBI NO: 21410066 NR Description: DKFZP564O092 protein [Homo sapiens]
  misc_feature (13)..(315): Homolog of NCBI NO: 7512783 NR Description: hypothetical protein DKFZp564O092.1 - human
  misc_feature (15)..(220): Homolog of NCBI NO: 34906856 NR Description: P0470A12.5 [Oryza sativa (japonica
  misc_feature (13)..(269): Homolog of NCBI NO: 25372823 NR Description: protein F24B9.6 [imported] - Arabidopsis thaliana
  misc_feature (13)..(317): Homolog of NCBI NO: 18390818 NR Description: expressed protein [Arabidopsis thaliana]
MENIANHNDDSKQKEAPQLAALLKEMKEGLDTVRHKIQSLTAMVKEGLYPTADGFSYLEVKNLLLLNYCQSLVYYLLRKAKGLSIEDHPVVRSVVEIRLFLEKIRPIDKKQQYQIQKLMQASENAIRSDILNKEPVASNKSEDASKYRPNPDMLVSKVDLTSQADNEYYQPVKFAPTSMDLEKSSKHERNALRREKEILKQAKQSDYLRTLMNDMEERPEEIRDFEGASREVDRYIAKMDERARQEEELFTRVPLTKQERKREKYLKKSRNGLQGLTESFYDEIKTLPFEDKTGEQVVGSSNGSRTNNRLKKRKRKH

SEQ ID NO: 51541 - protein, 292 aa, Glycine max
  peptide (1)..(292): Ceres Seq. ID no. 14311924
  misc_feature (1)..(99): Pfam Name: Sas10/Utp3 family Pfam Description: Sas10/Utp3 family
  misc_feature (1)..(292): Homolog of NCBI NO: 20876056 NR Description: RIKEN cDNA 1500001L15 [Mus musculus]
  misc_feature (1)..(292): Homolog of NCBI NO: 34874139 NR Description: similar to CG11030-PA [Rattus norvegicus]
  misc_feature (1)..(292): Homolog of NCBI NO: 40675680 NR Description: Unknown (protein for IMAGE:5336691) [Silurana
  misc_feature (1)..(292): Homolog of NCBI NO: 23272205 NR Description: 1500001L15Rik protein [Mus musculus]
  misc_feature (1)..(290): Homolog of NCBI NO: 37545892 NR Description: similar to hypothetical protein [Homo sapiens]
  misc_feature (1)..(290): Homolog of NCBI NO: 21410066 NR Description: DKFZP564O092 protein [Homo sapiens]
  misc_feature (1)..(290): Homolog of NCBI NO: 7512783 NR Description: hypothetical protein DKFZp564O092.1 - human
  misc_feature (1)..(195): Homolog of NCBI NO: 34906856 NR Description: P0470A12.5 [Oryza sativa (japonica
  misc_feature (1)..(244): Homolog of NCBI NO: 25372823 NR Description: protein F24B9.6 [imported] - Arabidopsis thaliana
  misc_feature (1)..(292): Homolog of NCBI NO: 18390818 NR Description: expressed protein [Arabidopsis thaliana]
MKEGLDTVRHKIQSLTAMVKEGLYPTADGFSYLEVKNLLLLNYCQSLVYYLLRKAKGLSIEDHPVVRSVVEIRLFLEKIRPIDKKQQYQIQKLMQASENAIRSDILNKEPVASNKSEDASKYRPNPDMLVSKVDLTSQADNEYYQPVKFAPTSMDLEKSSKHERNALRREKEILKQAKQSDYLRTLMNDMEERPEEIRDFEGASREVDRYIAKMDERARQEEELFTRVPLTKQERKREKYLKKSRNGLQGLTESFYDEIKTLPFEDKTGEQVVGSSNGSRTNNRLKKRKRKH

SEQ ID NO: 51542 - protein, 275 aa, Glycine max
  peptide (1)..(275): Ceres Seq. ID no. 14311925
  misc_feature (1)..(82): Pfam Name: Sas10/Utp3 family Pfam Description: Sas10/Utp3 family
  misc_feature (1)..(275): Homolog of NCBI NO: 20876056 NR Description: RIKEN cDNA 1500001L15 [Mus musculus]
  misc_feature (1)..(275): Homolog of NCBI NO: 34874139 NR Description: similar to CG11030-PA [Rattus norvegicus]
  misc_feature (1)..(275): Homolog of NCBI NO: 40675680 NR Description: Unknown (protein for IMAGE:5336691) [Silurana
  misc_feature (1)..(275): Homolog of NCBI NO: 23272205 NR Description: 1500001L15Rik protein [Mus musculus]
  misc_feature (1)..(273): Homolog of NCBI NO: 21410066 NR Description: DKFZP564O092 protein [Homo sapiens]
  misc_feature (1)..(273): Homolog of NCBI NO: 37545892 NR Description: similar to hypothetical protein [Homo sapiens]
  misc_feature (1)..(273): Homolog of NCBI NO: 7512783 NR Description: hypothetical protein DKFZp564O092.1 - human
  misc_feature (1)..(178): Homolog of NCBI NO: 34906856 NR Description: P0470A12.5 [Oryza sativa (japonica
  misc_feature (1)..(227): Homolog of NCBI NO: 25372823 NR Description: protein F24B9.6 [imported] - Arabidopsis thaliana
  misc_feature (1)..(275): Homolog of NCBI NO: 18390818 NR Description: expressed protein [Arabidopsis thaliana]
MVKEGLYPTADGFSYLEVKNLLLLNYCQSLVYYLLRKAKGLSIEDHPVVRSVVEIRLFLEKIRPIDKKQQYQIQKLMQASENAIRSDILNKEPVASNKSEDASKYRPNPDMLVSKVDLTSQADNEYYQPVKFAPTSMDLEKSSKHERNALRREKEILKQAKQSDYLRTLMNDMEERPEEIRDFEGASREVDRYIAKMDERARQEEELFTRVPLTKQERKREKYLKKSRNGLQGLTESFYDEIKTLPFEDKTGEQVVGSSNGSRTNNRLKKRKRKH

SEQ ID NO: 51543 - DNA, 1177 bp, Glycine max
  misc_feature (1)..(1177): Ceres Seq. ID no. 15171426
attattttgcattcccctaagttggtgcagtagaagtaaccagtccctagtagaccctagtcgtgtcccagacgggccagagtcagtttccaacaccaacacagcagcaaccctcaaacgccacctagggttagggtttctgcaattccccaatctctatcttccaaaaattagggttttttcaagccatggcggacggctactggaaccggcaacaggcgtttctgcctcactccggcatgctcaaacggccgcgttccgactacggtaatgagatgcataatcatattgctcgtgatgatgaccgtactggtcaccgaatgctaaaggacacacaaacaattggatctgcttatgaccgctaccttcagagtgggcaactttcttcatttacttctggggaagtcagtacagttggtggtcttgggttggctaggggtggtggtggtggattatcaggccattcactagctgatcctgctgtcatggggcgtcatgggggtagtggttcagatctagcaccaaatggacggggtgttaattatggtggtcagctaccagtagatgcggtttccagacctggacctgagacaggatctctacctccagatgcttcaagtactttatatgttgaaggtctcccttctgatagcaccagaagggaagtagctcatattttccgcccttttgttggatatagagaagttagacttgtgagcaaagaatcgaaacatcgtggtggagatcctcattacctttgttttgtggactttgcaaatccagcttgtgcagcaaccgctatgagtgccttgcaaggttataaagttgatgaactcaatcccgagtccagtcacttgcggcttcagttttctcggtatcctggtccaagaagtggacctgcttttcgcagtaaaagatgatctggttcacataagccatctaggttttatgctcatcagaatgtctgtggttcttcgttttgggggcgatactccacatgcaattttattcacccctctggacacaatccttattagagcccttgaaatgcataaattattaacaggccgagatcaaagtacaatttcaattagcaaaaaaggatttttagttcatgtattcaattactctgccgtaccattatttgctaaactttagtatattcacctggtgtctg

SEQ ID NO: 51544 - protein, 243 aa, Glycine max
  peptide (1)..(243): Ceres Seq. ID no. 15171427
  misc_feature (146)..(214): Pfam Name: RNA recognition motif. (a.k.a. RRM, RBD, or RNP domain) Pfam Description: RNA recognition motif. (a.k.a. RRM, RBD, or RNP
  misc_feature (132)..(229): Homolog of NCBI NO: 12845642 NR Description: unnamed protein product [Mus musculus]
  misc_feature (131)..(236): Homolog of NCBI NO: 15218968 NR Description: hypothetical protein [Arabidopsis thaliana]
  misc_feature (100)..(236): Homolog of NCBI NO: 25513502 NR Description: F16F4.3 protein - Arabidopsis thaliana
  misc_feature (24)..(146): Homolog of NCBI NO: 15218968 NR Description: hypothetical protein [Arabidopsis thaliana]
  misc_feature (29)..(159): Homolog of NCBI NO: 25513502 NR Description: F16F4.3 protein - Arabidopsis thaliana
  misc_feature (163)..(236): Homolog of NCBI NO: 25553563 NR Description: OSJNBa0038F22.13 [Oryza sativa (japonica
  misc_feature (19)..(165): Homolog of NCBI NO: 25553563 NR Description: OSJNBa0038F22.13 [Oryza sativa (japonica
  misc_feature (79)..(236): Homolog of NCBI NO: 26450151 NR Description: unknown protein [Arabidopsis thaliana]
  misc_feature (1)..(236): Homolog of NCBI NO: 30699215 NR Description: expressed protein [Arabidopsis thaliana]
  misc_feature (1)..(241): Homolog of NCBI NO: 23304837 NR Description: RNA-binding protein [Medicago truncatula]
MADGYWNRQQAFLPHSGMLKRPRSDYGNEMHNHIARDDDRTGHRMLKDTQTIGSAYDRYLQSGQLSSFTSGEVSTVGGLGLARGGGGGLSGHSLADPAVMGRHGGSGSDLAPNGRGVNYGGQLPVDAVSRPGPETGSLPPDASSTLYVEGLPSDSTRREVAHIFRPFVGYREVRLVSKESKHRGGDPHYLCFVDFANPACAATAMSALQGYKVDELNPESSHLRLQFSRYPGPRSGPAFRSKR

SEQ ID NO: 51545 - protein, 226 aa, Glycine max
  peptide (1)..(226): Ceres Seq. ID no. 15171428
  misc_feature (129)..(197): Pfam Name: RNA recognition motif. (a.k.a. RRM, RBD, or RNP domain) Pfam Description: RNA recognition motif. (a.k.a. RRM, RBD, or RNP
  misc_feature (115)..(212): Homolog of NCBI NO: 12845642 NR Description: unnamed protein product [Mus musculus]
  misc_feature (114)..(219): Homolog of NCBI NO: 15218968 NR Description: hypothetical protein [Arabidopsis thaliana]
  misc_feature (83)..(219): Homolog of NCBI NO: 25513502 NR Description: F16F4.3 protein - Arabidopsis thaliana
  misc_feature (7)..(129): Homolog of NCBI NO: 15218968 NR Description: hypothetical protein [Arabidopsis thaliana]
  misc_feature (12)..(142): Homolog of NCBI NO: 25513502 NR Description: F16F4.3 protein - Arabidopsis thaliana
  misc_feature (146)..(219): Homolog of NCBI NO: 25553563 NR Description: OSJNBa0038F22.13 [Oryza sativa (japonica
  misc_feature (2)..(148): Homolog of NCBI NO: 25553563 NR Description: OSJNBa0038F22.13 [Oryza sativa (japonica
  misc_feature (62)..(219): Homolog of NCBI NO: 26450151 NR Description: unknown protein [Arabidopsis thaliana]
  misc_feature (1)..(219): Homolog of NCBI NO: 30699215 NR Description: expressed protein [Arabidopsis thaliana]
  misc_feature (1)..(224): Homolog of NCBI NO: 23304837 NR Description: RNA-binding protein [Medicago truncatula]
MLKRPRSDYGNEMHNHIARDDDRTGHRMLKDTQTIGSAYDRYLQSGQLSSFTSGEVSTVGGLGLARGGGGGLSGHSLADPAVMGRHGGSGSDLAPNGRGVNYGGQLPVDAVSRPGPETGSLPPDASSTLYVEGLPSDSTRREVAHIFRPFVGYREVRLVSKESKHRGGDPHYLCFVDFANPACAATAMSALQGYKVDELNPESSHLRLQFSRYPGPRSGPAFRSKR

SEQ ID NO: 51546 - protein, 214 aa, Glycine max
  peptide (1)..(214): Ceres Seq. ID no. 15171429
  misc_feature (117)..(185): Pfam Name: RNA recognition motif. (a.k.a. RRM, RBD, or RNP domain) Pfam Description: RNA recognition motif. (a.k.a. RRM, RBD, or RNP
  misc_feature (103)..(200): Homolog of NCBI NO: 12845642 NR Description: unnamed protein product [Mus musculus]
  misc_feature (102)..(207): Homolog of NCBI NO: 15218968 NR Description: hypothetical protein [Arabidopsis thaliana]
  misc_feature (71)..(207): Homolog of NCBI NO: 25513502 NR Description: F16F4.3 protein - Arabidopsis thaliana
  misc_feature (1)..(117): Homolog of NCBI NO: 15218968 NR Description: hypothetical protein [Arabidopsis thaliana]
  misc_feature (1)..(130): Homolog of NCBI NO: 25513502 NR Description: F16F4.3 protein - Arabidopsis thaliana
  misc_feature (134)..(207): Homolog of NCBI NO: 25553563 NR Description: OSJNBa0038F22.13 [Oryza sativa (japonica
  misc_feature (1)..(136): Homolog of NCBI NO: 25553563 NR Description: OSJNBa0038F22.13 [Oryza sativa (japonica
  misc_feature (50)..(207): Homolog of NCBI NO: 26450151 NR Description: unknown protein [Arabidopsis thaliana]
  misc_feature (1)..(207): Homolog of NCBI NO: 30699215 NR Description: expressed protein [Arabidopsis thaliana]
  misc_feature (1)..(212): Homolog of NCBI NO: 23304837 NR Description: RNA-binding protein [Medicago truncatula]
MHNHIARDDDRTGHRMLKDTQTIGSAYDRYLQSGQLSSFTSGEVSTVGGLGLARGGGGGLSGHSLADPAVMGRHGGSGSDLAPNGRGVNYGGQLPVDAVSRPGPETGSLPPDASSTLYVEGLPSDSTRREVAHIFRPFVGYREVRLVSKESKHRGGDPHYLCFVDFANPACAATAMSALQGYKVDELNPESSHLRLQFSRYPGPRSGPAFRSKR

SEQ ID NO: 51547 - DNA, 1277 bp, Glycine max
  misc_feature (1)..(1277): Ceres Seq. ID no. 15177842
ctgaacacatttcatttttggatttttatacttccttctttcttttacactgcacacacacacagaggtattttcacttctctcgctttcattttgcgatgcgtcgattaaaaattgaacaaccttcactgactcgttcagcgttgggttattgactttgatggttccaaattgtgttctgtttagagacaacaccgctaaccaaacgcctttctctcaacttcaacgtctttgctatttaaatttaaatcactgcacaacctattgcagtgtacctcattcttcgtttggttttggtttcaatttgcgtcgcacaagttgacgtttcctcggatacacaatgataggatcttttattacaagggcacttgtgatggtttttggctatgccttccctgcctatgaatgctataaagcagttgaaaagaataggccagaaattgaacaacttcgtttttggtgccagtactggattttggtagctgttttgtcagtatgtgagcggattgctgatgcttttatatcatgggtcccaatgtatagtgaagctaagttggcatttgtcatatacttgtggtacccgaaaacaaagggaacaacatatgtgtatgattccttctttagaccatatgttgcgaaacatgagacagaaattgaccgcaacttgttggaactaaggacaagggcaggagatactgcagttttgtattggcaaaaagctgctagttatggccagactagaatatttgaaattttgcagtatgttgctgcacagtcaacaccttcgccacgccctgctcagcaacaaccagctatgagggtgcgtcaagccgcaactagtaatagccaaccagcatctgcgacagaaccacaagctgagaatccatcttctcctacttctagttcatccagtcagcaacagaaggaagtagcagaggaggagttgggttcttcacaagtgcctaaagcaccttatactgtagcaggtttaagtagccagaagtctaatcctatacctgaaacggccaatcaatcggtacctgaagaggatgagccaatgcagattgaagcagcagcaccttcatcctcttctgcaaatgaaaatgagaaccctcccttggaagatacaataatggaagaaagcattagggtaacgcgtggtagactaagaaaaaatcgatcagctcgaatccgttagatatcattgttttcaagttttagcctggaaaacatgggtagatggataatagtgggtgtggaatagtaaagttgtgtgt

SEQ ID NO: 51548 - protein, 285 aa, Glycine max
  peptide (1)..(285): Ceres Seq. ID no. 15177843
  misc_feature (3)..(98): Pfam Name: TB2/DP1, HVA22 family Pfam Description: TB2/DP1, HVA22 family
  misc_feature (183)..(282): Homolog of NCBI NO: 37531658 NR Description: putative Magnaporthe grisea pathogenicity protein
  misc_feature (1)..(146): Homolog of NCBI NO: 37531658 NR Description: putative Magnaporthe grisea pathogenicity protein
  misc_feature (12)..(254): Homolog of NCBI NO: 25513732 NR Description: T20H2.26 protein - Arabidopsis thaliana
  misc_feature (1)..(254): Homolog of NCBI NO: 21553483 NR Description: pathogenicity protein PATH531-like protein
  misc_feature (1)..(254): Homolog of NCBI NO: 18394805 NR Description: expressed protein [Arabidopsis thaliana]
  misc_feature (154)..(282): Homolog of NCBI NO: 20502988 NR Description: Putative InsB from Escherichia coli
  misc_feature (1)..(152): Homolog of NCBI NO: 20502988 NR Description: Putative InsB from Escherichia coli
  misc_feature (5)..(285): Homolog of NCBI NO: 9759014 NR Description: gene_id:K16E1.3~unknown protein [Arabidopsis
  misc_feature (1)..(285): Homolog of NCBI NO: 18422223 NR Description: expressed protein [Arabidopsis thaliana]
  misc_feature (1)..(285): Homolog of NCBI NO: 21553813 NR Description: unknown [Arabidopsis thaliana]
MIGSFITRALVMVFGYAFPAYECYKAVEKNRPEIEQLRFWCQYWILVAVLSVCERIADAFISWVPMYSEAKLAFVIYLWYPKTKGTTYVYDSFFRPYVAKHETEIDRNLLELRTRAGDTAVLYWQKAASYGQTRIFEILQYVAAQSTPSPRPAQQQPAMRVRQAATSNSQPASATEPQAENPSSPTSSSSSQQQKEVAEEELGSSQVPKAPYTVAGLSSQKSNPIPETANQSVPEEDEPMQIEAAAPSSSSANENENPPLEDTIMEESIRVTRGRLRKNRSARIR

SEQ ID NO: 51549 - protein, 274 aa, Glycine max
  peptide (1)..(274): Ceres Seq. ID no. 15177844
  misc_feature (1)..(87): Pfam Name: TB2/DP1, HVA22 family Pfam Description: TB2/DP1, HVA22 family
  misc_feature (172)..(271): Homolog of NCBI NO: 37531658 NR Description: putative Magnaporthe grisea pathogenicity protein
  misc_feature (1)..(135): Homolog of NCBI NO: 37531658 NR Description: putative Magnaporthe grisea pathogenicity protein
  misc_feature (1)..(243): Homolog of NCBI NO: 25513732 NR Description: T20H2.26 protein - Arabidopsis thaliana
  misc_feature (1)..(243): Homolog of NCBI NO: 21553483 NR Description: pathogenicity protein PATH531-like protein
  misc_feature (1)..(243): Homolog of NCBI NO: 18394805 NR Description: expressed protein [Arabidopsis thaliana]
  misc_feature (143)..(271): Homolog of NCBI NO: 20502988 NR Description: Putative InsB from Escherichia coli
  misc_feature (1)..(141): Homolog of NCBI NO: 20502988 NR Description: Putative InsB from Escherichia coli
  misc_feature (1)..(274): Homolog of NCBI NO: 9759014 NR Description: gene_id:K16E1.3~unknown protein [Arabidopsis
  misc_feature (1)..(274): Homolog of NCBI NO: 18422223 NR Description: expressed protein [Arabidopsis thaliana]
  misc_feature (1)..(274): Homolog of NCBI NO: 21553813 NR Description: unknown [Arabidopsis thaliana]
MVFGYAFPAYECYKAVEKNRPEIEQLRFWCQYWILVAVLSVCERIADAFISWVPMYSEAKLAFVIYLWYPKTKGTTYVYDSFFRPYVAKHETEIDRNLLELRTRAGDTAVLYWQKAASYGQTRIFEILQYVAAQSTPSPRPAQQQPAMRVRQAATSNSQPASATEPQAENPSSPTSSSSSQQQKEVAEEELGSSQVPKAPYTVAGLSSQKSNPIPETANQSVPEEDEPMQIEAAAPSSSSANENENPPLEDTIMEESIRVTRGRLRKNRSARIR

SEQ ID NO: 51550 - protein, 220 aa, Glycine max
  peptide (1)..(220): Ceres Seq. ID no. 15177845
  misc_feature (118)..(217): Homolog of NCBI NO: 37531658 NR Description: putative Magnaporthe grisea pathogenicity protein
  misc_feature (1)..(81): Homolog of NCBI NO: 37531658 NR Description: putative Magnaporthe grisea pathogenicity protein
  misc_feature (1)..(189): Homolog of NCBI NO: 25513732 NR Description: T20H2.26 protein - Arabidopsis thaliana
  misc_feature (1)..(189): Homolog of NCBI NO: 21553483 NR Description: pathogenicity protein PATH531-like protein
  misc_feature (1)..(189): Homolog of NCBI NO: 18394805 NR Description: expressed protein [Arabidopsis thaliana]
  misc_feature (89)..(217): Homolog of NCBI NO: 20502988 NR Description: Putative InsB from Escherichia coli
  misc_feature (1)..(87): Homolog of NCBI NO: 20502988 NR Description: Putative InsB from Escherichia coli
  misc_feature (1)..(220): Homolog of NCBI NO: 9759014 NR Description: gene_id:K16E1.3~unknown protein [Arabidopsis
  misc_feature (1)..(220): Homolog of NCBI NO: 18422223 NR Description: expressed protein [Arabidopsis thaliana]
  misc_feature (1)..(220): Homolog of NCBI NO: 21553813 NR Description: unknown [Arabidopsis thaliana]
MYSEAKLAFVIYLWYPKTKGTTYVYDSFFRPYVAKHETEIDRNLLELRTRAGDTAVLYWQKAASYGQTRIFEILQYVAAQSTPSPRPAQQQPAMRVRQAATSNSQPASATEPQAENPSSPTSSSSSQQQKEVAEEELGSSQVPKAPYTVAGLSSQKSNPIPETANQSVPEEDEPMQIEAAAPSSSSANENENPPLEDTIMEESIRVTRGRLRKNRSARIR

SEQ ID NO: 51551 - DNA, 1381 bp, Glycine max
  misc_feature (1)..(1381): Ceres Seq. ID no. 14311576
agagaactctattctcctccatcaacgcaaccaccaccatcgtgtttaggtcattcttctctctttccgtaccctaaaaccgaaaaaattgttccttttacttttctcctctcacacacattcccacttcccccttttcttccaccgttatgtcgggtagaaaccgcggacaaccccttcctccgccgcacgcggcgggaatatcgccgccgctccacgatccgctgtacggcccgcgggcccaccaccaccaccatcatcatcatcatctagtgggccccgtcccgccccacccccaccaccttctagaagacttccgcgactcgcagctagggctgggcccaacgcgcggcgggtccatcccattgcacccggcggcggcgatcatcgaggagcgccttgccgcccagcatcaggacatccagggtctgctgggcgacaaccagcgcctcgccgccacccacgttgccctcaagcaggagctcgaggccgcccgccacgagctccagcgcgtggcgcacttccgcgagtcgctccgggccgataccgaggcccgcatgcgcgagctctacgacaaggcggcccagctcgaggccgagcttcgtggcgctgaggccgcccgcaccgagctcctccaggtccgctccgacgtcaaggagctcaccgccgtccgccaggacctgtccggacaggtgcaggccatgacgcaggacttggcccgcatgaccgcagacgcgaaacgggttccggcgctgagggctgatgttgaggccatgaaacaagagttgcagtgtgcaagggctgccattgagtatgagaagaagggatttgcagaaaactatgaacatggtcaagtgatggagaagaaattggttgcgatggctcgggagatggagaagcttcgtgcggagattgccaatgcagagaaaagagcacgggctgctgcagcggctgggaatccaggtcaagggtataatgcaaattatggcactgctgatgttggatatgctggaaatccttaccctggcatttatggcatgaatccagtacagcctggagtggagaattttcctcagtatggacctgggcctgctgcttggggcgcatatgacatgcagcgagttcaaggacaccgataaattcctgttgaggaatcttataactggtatcttgggttgcaactatctagatgattgattcagggttttaagagttatctactcatgaacgtcatggaatttgtctattagatggtccttgaagttgtacttatattaaaaagctcatatgtaggttgatggtgcagtagatgatgtttatctacggtgtcaaataaaggacattttgctttatattatctttttattgtgatgtggctgtc

SEQ ID NO: 51552 - protein, 329 aa, Glycine max
  peptide (1)..(329): Ceres Seq. ID no. 14311577
  misc_feature (77)..(268): Homolog of NCBI NO: 7487478 NR Description: hypothetical protein At2g30120 [imported] -
  misc_feature (69)..(326): Homolog of NCBI NO: 38605778 NR Description: OSJNBa0044K18.21 [Oryza sativa (japonica
  misc_feature (79)..(289): Homolog of NCBI NO: 25405799 NR Description: myosin-like protein, 97843-94399
  misc_feature (79)..(289): Homolog of NCBI NO: 18405242 NR Description: myosin -related [Arabidopsis thaliana]
  misc_feature (70)..(329): Homolog of NCBI NO: 25404669 NR Description: hypothetical protein F5A8.8 [imported] -
  misc_feature (35)..(329): Homolog of NCBI NO: 30697468 NR Description: expressed protein [Arabidopsis thaliana]
  misc_feature (28)..(319): Homolog of NCBI NO: 28876008 NR Description: hypothetical protein [Oryza sativa (japonica
  misc_feature (3)..(329): Homolog of NCBI NO: 33146484 NR Description: myosin-like protein [Oryza sativa (japonica
  misc_feature (1)..(299): Homolog of NCBI NO: 9294396 NR Description: gb|AAD10662.1~gene_id:MIE1.26~similar to unknown
  misc_feature (1)..(326): Homolog of NCBI NO: 18400511 NR Description: expressed protein [Arabidopsis thaliana]
MSGRNRGQPLPPPHAAGISPPLHDPLYGPRAHHHHHHHHHLVGPVPPHPHHLLEDFRDSQLGLGPTRGGSIPLHPAAAIIEERLAAQHQDIQGLLGDNQRLAATHVALKQELEAARHELQRVAHFRESLRADTEARMRELYDKAAQLEAELRGAEAARTELLQVRSDVKELTAVRQDLSGQVQAMTQDLARMTADAKRVPALRADVEAMKQELQCARAAIEYEKKGFAENYEHGQVMEKKLVAMAREMEKLRAEIANAEKRARAAAAAGNPGQGYNANYGTADVGYAGNPYPGIYGMNPVQPGVENFPQYGPGPAAWGAYDMQRVQGHR

SEQ ID NO: 51553 - protein, 193 aa, Glycine max
  peptide (1)..(193): Ceres Seq. ID no. 14311578
  misc_feature (1)..(132): Homolog of NCBI NO: 7487478 NR Description: hypothetical protein At2g30120 [imported] -
  misc_feature (1)..(190): Homolog of NCBI NO: 38605778 NR Description: OSJNBa0044K18.21 [Oryza sativa (japonica
  misc_feature (1)..(153): Homolog of NCBI NO: 25405799 NR Description: myosin-like protein, 97843-94399
  misc_feature (1)..(153): Homolog of NCBI NO: 18405242 NR Description: myosin -related [Arabidopsis thaliana]
  misc_feature (1)..(193): Homolog of NCBI NO: 25404669 NR Description: hypothetical protein F5A8.8 [imported] -
  misc_feature (1)..(193): Homolog of NCBI NO: 30697468 NR Description: expressed protein [Arabidopsis thaliana]
  misc_feature (1)..(183): Homolog of NCBI NO: 28876008 NR Description: hypothetical protein [Oryza sativa (japonica
  misc_feature (1)..(193): Homolog of NCBI NO: 33146484 NR Description: myosin-like protein [Oryza sativa (japonica
  misc_feature (1)..(163): Homolog of NCBI NO: 9294396 NR Description: gb|AAD10662.1~gene_id:MIE1.26~similar to unknown
  misc_feature (1)..(190): Homolog of NCBI NO: 18400511 NR Description: expressed protein [Arabidopsis thaliana]
MRELYDKAAQLEAELRGAEAARTELLQVRSDVKELTAVRQDLSGQVQAMTQDLARMTADAKRVPALRADVEAMKQELQCARAAIEYEKKGFAENYEHGQVMEKKLVAMAREMEKLRAEIANAEKRARAAAAAGNPGQGYNANYGTADVGYAGNPYPGIYGMNPVQPGVENFPQYGPGPAAWGAYDMQRVQGHR

SEQ ID NO: 51554 - DNA, 1249 bp, Glycine max
  misc_feature (1)..(1249): Ceres Seq. ID no. 14315083
aaagattaccgttctcacttaaaccaataaacaaacccacccaatcactaaagcaaccttcttgattatcctaaagccgcagcgcaagcaatcactctttttctttctcataataatgcaaattcttccccactctgcagcaacaaattctcatttgcaaaccccataaaggcatatcatctttatactttaccgggatctgtgtctccttttatttttccccaagacaaagtagacattgtcttccactcacttcaaaaaagagagtgagagagagaaactttgtggtctgtgttctgtgaaactgaagtgttcttcctcaatcattgtcttttacagtcaaattcagcgtctaagatctcatttcaaaaaaatttccgcttgttaaagttggtttctcactcacaagtcacaagtcacaccctttatttacttcagcatccaacaaagtgttccttacttgttctgttcaatgactcagatcttcaaatgtgagtgttgtagcatcattgcatgagtcacccatcaaacattgttcaagtaactgtttttagtttattttgtaaatgagggtgtggagggttcacccacaagagcaaaagctttgtccaaatggtgttttgaggtgggttttggtttggatgagtgtttgttttcttgtgttcacggttggtccaccgtctcgctcgagggtgaggaagagtgtatcttctcaactttcttgtcctccatgtgattgtttctgctcttcagctgaatatctcctcgatcctctaggactggtcaacagctcaatttccaattgtggtaaacatgatccgattttgaatgaggaaatgaacaagggtctactgacaatgctatctgaggagctaaatttgcagaaaattgtggccaacgagaccatggaacacaccaaacagttaataatggatgccaggaaaaccttttcacattaccagaaggaagcagaaaagtgcaacattggggtggaaacttgtgaagaagcaagggagagggcagaggcagagctcattgaagaacacaagctgacaacattatgggaaaatcgtgcaagtgaatatgggtgggtggaatgactgaagaacacactgaaggagtttagttaaccattgctacattatgttatgttaccccttaattgtatcatagcttttatagccaatacacagatctcttgtgatgatttcaaccaggttaacaattctattgaaacaagttttgtgcc

SEQ ID NO: 51555 - protein, 177 aa, Glycine max
  peptide (1)..(177): Ceres Seq. ID no. 14315084
  misc_feature (19)..(175): Pfam Name: Protein of unknown function (DUF1068) Pfam Description: Protein of unknown function (DUF1068)
  misc_feature (33)..(177): Homolog of NCBI NO: 25364108 NR Description: hypothetical protein [imported] - Arabidopsis
  misc_feature (1)..(175): Homolog of NCBI NO: 25407700 NR Description: hypothetical protein AT4g30990 [imported] -
  misc_feature (23)..(175): Homolog of NCBI NO: 25364110 NR Description: hypothetical protein At2g24290 [imported] -
  misc_feature (23)..(175): Homolog of NCBI NO: 18400504 NR Description: expressed protein [Arabidopsis thaliana]
  misc_feature (33)..(177): Homolog of NCBI NO: 18390477 NR Description: expressed protein [Arabidopsis thaliana]
  misc_feature (23)..(177): Homolog of NCBI NO: 21553781 NR Description: unknown [Arabidopsis thaliana]
  misc_feature (23)..(177): Homolog of NCBI NO: 18403016 NR Description: expressed protein [Arabidopsis thaliana]
  misc_feature (19)..(175): Homolog of NCBI NO: 18417716 NR Description: expressed protein [Arabidopsis thaliana]
  misc_feature (18)..(177): Homolog of NCBI NO: 27922919 NR Description: unknown protein [Phytophthora sojae]
  misc_feature (20)..(175): Homolog of NCBI NO: 38345038 NR Description: OSJNBa0029H02.22 [Oryza sativa (japonica
MRVWRVHPQEQKLCPNGVLRWVLVWMSVCFLVFTVGPPSRSRVRKSVSSQLSCPPCDCFCSSAEYLLDPLGLVNSSISNCGKHDPILNEEMNKGLLTMLSEELNLQKIVANETMEHTKQLIMDARKTFSHYQKEAEKCNIGVETCEEARERAEAELIEEHKLTTLWENRASEYGWVE

SEQ ID NO: 51556 - protein, 152 aa, Glycine max
  peptide (1)..(152): Ceres Seq. ID no. 14315085
  misc_feature (1)..(150): Pfam Name: Protein of unknown function (DUF1068) Pfam Description: Protein of unknown function (DUF1068)
  misc_feature (8)..(152): Homolog of NCBI NO: 25364108 NR Description: hypothetical protein [imported] - Arabidopsis
  misc_feature (1)..(150): Homolog of NCBI NO: 25407700 NR Description: hypothetical protein AT4g30990 [imported] -
  misc_feature (1)..(150): Homolog of NCBI NO: 25364110 NR Description: hypothetical protein At2g24290 [imported] -
  misc_feature (1)..(150): Homolog of NCBI NO: 18400504 NR Description: expressed protein [Arabidopsis thaliana]
  misc_feature (8)..(152): Homolog of NCBI NO: 18390477 NR Description: expressed protein [Arabidopsis thaliana]
  misc_feature (1)..(152): Homolog of NCBI NO: 21553781 NR Description: unknown [Arabidopsis thaliana]
  misc_feature (1)..(152): Homolog of NCBI NO: 18403016 NR Description: expressed protein [Arabidopsis thaliana]
  misc_feature (1)..(150): Homolog of NCBI NO: 18417716 NR Description: expressed protein [Arabidopsis thaliana]
  misc_feature (1)..(152): Homolog of NCBI NO: 27922919 NR Description: unknown protein [Phytophthora sojae]
  misc_feature (1)..(150): Homolog of NCBI NO: 38345038 NR Description: OSJNBa0029H02.22 [Oryza sativa (japonica
MSVCFLVFTVGPPSRSRVRKSVSSQLSCPPCDCFCSSAEYLLDPLGLVNSSISNCGKHDPILNEEMNKGLLTMLSEELNLQKIVANETMEHTKQLIMDARKTFSHYQKEAEKCNIGVETCEEARERAEAELIEEHKLTTLWENRASEYGWVE

SEQ ID NO: 51557 - DNA, 942 bp, Glycine max
  misc_feature (1)..(942): Ceres Seq. ID no. 14315090
attcaccccactttcttttttcgttcacagcttggcttccctttaggcaaagcttgatccttcaagccttttaaggtacacaggtactcattgtgctcttttcttcttaattagaaatttttatgggcatcatttatctaacagcttgagtcaaaataggtagcatcctttggccaaaattggaagaaacatgagcgataaaaaaggaagcacttcaaaccatggcttgaatttgaacatacccccaccaagggttgccaatcagatacctgattcaccaactcgattaccaatagcgccaccaacatcaccaacaagctcatgtgtgtccagcgaactaagccaagatgacaacagcagcagcagcagcagaaaaaacaacaaccgcggctgcactcggagccctgaagacatttccatggtgctagtagggtgttctcgctgccttatgtatatgatggtcaatgagggtgaacccaagtgccccaaatgcaaaagcaccactttgattcattttcttaattacaacaacatcccataaggaggggacacaatgctatgctaccttgctgtgatttctgtattttgtgccgcaagtaggataagttagcttaaaaaaaaaaaggaatctcctttttaggacatttcttttatcttatgttttctatctttttcctaaacctttctttatgagttgtgctgcttgcgctccactttttccctttatctcctattcttaggaaggaaatcacaaaagagtttaagtgtaagtagcactacatgtcagggaggttacttttaataaatggttgtctcaccaagtttaccatcttaaatataaggttaggaaatttcctccatcagtatggctaattaacatatcatgtaaacctgattacataaaataagagaatgaatcgcaaggtatttcaattatctacc

SEQ ID NO: 51558 - protein, 116 aa, Glycine max
  peptide (1)..(116): Ceres Seq. ID no. 14315091
  misc_feature (40)..(111): Homolog of NCBI NO: 32488708 NR Description: OSJNBa0088H09.9 [Oryza sativa (japonica
  misc_feature (32)..(114): Homolog of NCBI NO: 32479729 NR Description: OJ991214_12.5 [Oryza sativa (japonica
  misc_feature (27)..(113): Homolog of NCBI NO: 18399295 NR Description: expressed protein [Arabidopsis thaliana]
  misc_feature (13)..(113): Homolog of NCBI NO: 15239988 NR Description: B-type cyclin -related [Arabidopsis thaliana]
MSDKKGSTSNHGLNLNIPPPRVANQIPDSPTRLPIAPPTSPTSSCVSSELSQDDNSSSSSRKNNNRGCTRSPEDISMVLVGCSRCLMYMMVNEGEPKCPKCKSTTLIHFLNYNNIP

SEQ ID NO: 51559 - DNA, 1745 bp, Glycine max
  misc_feature (1)..(1745): Ceres Seq. ID no. 14311535
atcatcatcactctcatcttcttcttcttttcaagataacatctctgaagtgatctttcatggagagagagattgaacattgtgacaaggtgatgagccaaagcagcatggatgcttgtcccaaatcagggcctggttatgcttcaccactagcagccatttctggtcccagagagactctcctttatgtcactgctatctactcaggaacaggaagggataagcctgactttctggccacagtggatgtggatccaagctctccaacgtattcaaaagttatccataggctacctgtaccttatttaggtgatgaactgcaccattttgggtggaattcatgcagctcttgctatggagatccaacagcagttcggcgatatctgattttgccttcactggtatcaggccgcatttatgtggttgacacaaaagcaaatccaaggtctccatctttgcacaaagttgttgagccagaagacattataagtaagactggattagcttatgcacacacatctcattgccttgcttctggtgacgtgttgatctcatttcttggagacaaagatggaaatgcagaaggaagtggatttcttctccttgatcatgaatttaatttgaaaggaaggtgggagaaacctgggcacagtccatcatttgggtatgacttctggtaccaaccacagcataagactatgattagctcatcatggggtgctcctgctgctttcaccaaaggttttaatttacagcatgtctctgatggtctttatgggaggcatctacatgtatacagctggcctgggggtgaactgagacaaacattggaccttggtgagtcagggcttctacccttggaggtaagatttctgcatgatccttctaaagatacaggtttcgttgggtgtgcattgtcaagtaacatggtacgctttttcaagactgaagatgaatcatggagtcatgaggttgcaatatcagtgaaaccattgaaagtgcaaaactggattcttccagaaatgccagggcttataactgattttctgatatctctcgatgatcggtttctgtactttgtgaattggcttcatggtgatataagacaatataacattgaggaccctaaaaatcctgtacggactggccaagtatgggttgggggactgctacagaaaggaagccctatagtagctataactgaagatggtaatacttggcattctgatgttccagacatcctgggaaataagttgagagctggccctcagatgattcagttgagtttggatggtaagcggctatatgttacaaactcactcttcagtgcatgggataaacaattttatccagagcttgtagagaaaggatcccacatgttacagattgatgttgatactgaaaatggtggtctgaaaattaaccctaacttttttgttgactttggagctgagcctggaggttcctgccttgcacatgagatgagatatcctggtggtgactgcacttcagatatatggatttgatagctatgccacttgaggccaggctacaagcaatatccatgtgaataaattccttagtcctagaatgaatagaggtgggctaatgttataaataaataatagatgcatatgcatgatggtttcattgtaataaagttatattttcatgtagttttcagtacttcctcatttacatcttcctaaacagagttctctgtaaaataaatcttgctcacctcc

SEQ ID NO: 51560 - protein, 488 aa, Glycine max
  peptide (1)..(488): Ceres Seq. ID no. 14311536
  misc_feature (21)..(488): Pfam Name: 56kDa selenium binding protein (SBP56) Pfam Description: 56kDa selenium binding protein (SBP56)
MEREIEHCDKVMSQSSMDACPKSGPGYASPLAAISGPRETLLYVTAIYSGTGRDKPDFLATVDVDPSSPTYSKVIHRLPVPYLGDELHHFGWNSCSSCYGDPTAVRRYLILPSLVSGRIYVVDTKANPRSPSLHKVVEPEDIISKTGLAYAHTSHCLASGDVLISFLGDKDGNAEGSGFLLLDHEFNLKGRWEKPGHSPSFGYDFWYQPQHKTMISSSWGAPAAFTKGFNLQHVSDGLYGRHLHVYSWPGGELRQTLDLGESGLLPLEVRFLHDPSKDTGFVGCALSSNMVRFFKTEDESWSHEVAISVKPLKVQNWILPEMPGLITDFLISLDDRFLYFVNWLHGDIRQYNIEDPKNPVRTGQVWVGGLLQKGSPIVAITEDGNTWHSDVPDILGNKLRAGPQMIQLSLDGKRLYVTNSLFSAWDKQFYPELVEKGSHMLQIDVDTENGGLKINPNFFVDFGAEPGGSCLAHEMRYPGGDCTSDIWI

SEQ ID NO: 51561 - protein, 477 aa, Glycine max
  peptide (1)..(477): Ceres Seq. ID no. 14311537
  misc_feature (10)..(477): Pfam Name: 56kDa selenium binding protein (SBP56) Pfam Description: 56kDa selenium binding protein (SBP56)
MSQSSMDACPKSGPGYASPLAAISGPRETLLYVTAIYSGTGRDKPDFLATVDVDPSSPTYSKVIHRLPVPYLGDELHHFGWNSCSSCYGDPTAVRRYLILPSLVSGRIYVVDTKANPRSPSLHKVVEPEDIISKTGLAYAHTSHCLASGDVLISFLGDKDGNAEGSGFLLLDHEFNLKGRWEKPGHSPSFGYDFWYQPQHKTMISSSWGAPAAFTKGFNLQHVSDGLYGRHLHVYSWPGGELRQTLDLGESGLLPLEVRFLHDPSKDTGFVGCALSSNMVRFFKTEDESWSHEVAISVKPLKVQNWILPEMPGLITDFLISLDDRFLYFVNWLHGDIRQYNIEDPKNPVRTGQVWVGGLLQKGSPIVAITEDGNTWHSDVPDILGNKLRAGPQMIQLSLDGKRLYVTNSLFSAWDKQFYPELVEKGSHMLQIDVDTENGGLKINPNFFVDFGAEPGGSCLAHEMRYPGGDCTSDIWI

SEQ ID NO: 51562 - protein, 472 aa, Glycine max
  peptide (1)..(472): Ceres Seq. ID no. 14311538
  misc_feature (5)..(472): Pfam Name: 56kDa selenium binding protein (SBP56) Pfam Description: 56kDa selenium binding protein (SBP56)
MDACPKSGPGYASPLAAISGPRETLLYVTAIYSGTGRDKPDFLATVDVDPSSPTYSKVIHRLPVPYLGDELHHFGWNSCSSCYGDPTAVRRYLILPSLVSGRIYVVDTKANPRSPSLHKVVEPEDIISKTGLAYAHTSHCLASGDVLISFLGDKDGNAEGSGFLLLDHEFNLKGRWEKPGHSPSFGYDFWYQPQHKTMISSSWGAPAAFTKGFNLQHVSDGLYGRHLHVYSWPGGELRQTLDLGESGLLPLEVRFLHDPSKDTGFVGCALSSNMVRFFKTEDESWSHEVAISVKPLKVQNWILPEMPGLITDFLISLDDRFLYFVNWLHGDIRQYNIEDPKNPVRTGQVWVGGLLQKGSPIVAITEDGNTWHSDVPDILGNKLRAGPQMIQLSLDGKRLYVTNSLFSAWDKQFYPELVEKGSHMLQIDVDTENGGLKINPNFFVDFGAEPGGSCLAHEMRYPGGDCTSDIWI

SEQ ID NO: 51563 - DNA, 1009 bp, Glycine max
  misc_feature (1)..(1009): Ceres Seq. ID no. 14312715
attctcttcttaatcccacaccatctaattagttcattctcttccttttctttttctttttattcgccgaatctattcaattgctataatattataaactctgatctgatcgatcagtcgcgttgtatgtctcaacggagaagttcgccggtggttgtcgcccggaagaataagccgccgcatccgtcgccgtcgccccgtcgtaggacgaagagcaagtcgaggcctatcaagatcctgaagcgctgttcgtcggcgcctctactttcacgccgtgataacgacgatggtgacgttgaccttgacggtgacgaccattattcgaggacgagcggaggaggctcgtttttccgccctaaaaccttttcggatgcctttctgtcttccccttctcccttttcctctccacggattcacaccaaacagataataaaggggtacaagtacgacaaagaagcaaaggtggtagttaatgtgaccgttgagggaagtccagggccagtccaaacgatggttaaactggggtccagtgtggaggatactatcaagcgtgtggtcgataaatatacagaagaaggcaggagcccccagatcgatgctaatatggcttcttcattccaattgcatcactcctatttcagtctccatagtttggacaaatcagaagtcattgcggatgtgggtagtagaagtttttatctgcggaagaataatgatgcatcatctactttgacttcttcatttcattggggaagtgctcccgaattagccacacatacttccactccatccatagcaaatcctccgttgttgatcccatctttcattgcccgcaggatttgcaaaattgtcagaagagctcaccgcctttggaagattttggtttgctctcagtgaggacattcaaaatcctaccccccccccccagtcaattataggaaaaagcaacgattttttttctgttgcttttcaacccttcatttccacattttatattcgatctacatat

SEQ ID NO: 51564 - protein, 298 aa, Glycine max
  peptide (1)..(298): Ceres Seq. ID no. 14312716
  misc_feature (153)..(241): Homolog of NCBI NO: 38347592 NR Description: OSJNBa0042I15.5 [Oryza sativa (japonica
  misc_feature (111)..(234): Homolog of NCBI NO: 18401542 NR Description: expressed protein [Arabidopsis thaliana]
  misc_feature (151)..(263): Homolog of NCBI NO: 10279678 NR Description: hypothetical protein [Catharanthus roseus]
  misc_feature (68)..(294): Homolog of NCBI NO: 15235787 NR Description: selenium-binding protein-related [Arabidopsis
ILFLIPHHLISSFSSFSFSFYSPNLFNCYNIINSDLIDQSRCMSQRRSSPVVVARKNKPPHPSPSPRRRTKSKSRPIKILKRCSSAPLLSRRDNDDGDVDLDGDDHYSRTSGGGSFFRPKTFSDAFLSSPSPFSSPRIHTKQIIKGYKYDKEAKVVVNVTVEGSPGPVQTMVKLGSSVEDTIKRVVDKYTEEGRSPQIDANMASSFQLHHSYFSLHSLDKSEVIADVGSRSFYLRKNNDASSTLTSSFHWGSAPELATHTSTPSIANPPLLIPSFIARRICKIVRRAHRLWKILVCSQ

SEQ ID NO: 51565 - protein, 256 aa, Glycine max
  peptide (1)..(256): Ceres Seq. ID no. 14312717
  misc_feature (111)..(199): Homolog of NCBI NO: 38347592 NR Description: OSJNBa0042I15.5 [Oryza sativa (japonica
  misc_feature (69)..(192): Homolog of NCBI NO: 18401542 NR Description: expressed protein [Arabidopsis thaliana]
  misc_feature (109)..(221): Homolog of NCBI NO: 10279678 NR Description: hypothetical protein [Catharanthus roseus]
  misc_feature (26)..(252): Homolog of NCBI NO: 15235787 NR Description: selenium-binding protein-related [Arabidopsis
MSQRRSSPVVVARKNKPPHPSPSPRRRTKSKSRPIKILKRCSSAPLLSRRDNDDGDVDLDGDDHYSRTSGGGSFFRPKTFSDAFLSSPSPFSSPRIHTKQIIKGYKYDKEAKVVVNVTVEGSPGPVQTMVKLGSSVEDTIKRVVDKYTEEGRSPQIDANMASSFQLHHSYFSLHSLDKSEVIADVGSRSFYLRKNNDASSTLTSSFHWGSAPELATHTSTPSIANPPLLIPSFIARRICKIVRRAHRLWKILVCSQ

SEQ ID NO: 51566 - DNA, 1181 bp, Glycine max
  misc_feature (1)..(1181): Ceres Seq. ID no. 14311812
ttttttctctctccttctactctccccctctttctcattttccggtgacatggagtccaagtggggtggcgcccccgccagcatcatggcggcgaatttcgacgacttcaagtggatcgcctccatgttcgatcccggaaacgacgacgtcaagcccttctccgacgcagctttccaaaaccaggatgcagtaactgcattttcaacttgtggtggagtaacagatgatacccttgttcgttcccaaaacctcactcccattcaatccaccatttctgcaactattgattctcagtcttccttttgtggtaccgttgggagcccagtgtctgctaacaaaccaaacgtgagagataatcaagtaaaaggggtcgccaccactacaagtggttcctcacgtgagccatctgatgaggatgatgaagcaggtccttgtgaacaaagcacaaacgctattgatatgaagcgccttagaaggaaggtttctaatagagagtctgcaaggaggtccaggagaagaaaacaagcccatttggctgacctggagtggcaagttgaacggctgagactggaaaatgcaaacctatttaagcagcttacagatgccagccaacaatttcgtgacgctgatacgaataaccgagtcctaaaatcagatgtcgaagctttgagagctaaggtgaaattagctgaggatatggtcactcgtggcacactcacccctatcaacaaccagattcttcaaaatcagagttcactaaacaccccacctcaactcaacacaaataatctacaccgcatgacacatgtttcgccaaccatcaccgtccgtgggaatgatgatgcttcatatggaggtggaattacagttagtggacaaaattcacctcttggtgggcttggaaacttggataatattccttgcagcgatttcaatagtggaatcaatagtaataatgctgtgagctctatgactagcatgtggccttaacgttattcttattgcaccacatgacttgtgttgtagtagtactgtccggttagatccaactttatgcatgtcttggttttattagatttgtggttatattgtggaaaatattatataggtaacaaaaatgtggtatctacgtgtaagaatccatctagaatatttagcatggtgtgtgttaaatggtttc

SEQ ID NO: 51567 - protein, 329 aa, Glycine max
  peptide (1)..(329): Ceres Seq. ID no. 14311813
  misc_feature (152)..(212): Pfam Name: bZIP transcription factor Pfam Description: bZIP transcription factor
  misc_feature (110)..(285): Homolog of NCBI NO: 7489563 NR Description: probable transcription activator 2 - rice plasmid
  misc_feature (56)..(240): Homolog of NCBI NO: 7489562 NR Description: probable transcription activator - rice
  misc_feature (53)..(285): Homolog of NCBI NO: 13365772 NR Description: RISBZ4 [Oryza sativa]
  misc_feature (76)..(310): Homolog of NCBI NO: 18420842 NR Description: bZIP protein, G/HBF-1-related [Arabidopsis
FFSLLLLSPSFSFSGDMESKWGGAPASIMAANFDDFKWIASMFDPGNDDVKPFSDAAFQNQDAVTAFSTCGGVTDDTLVRSQNLTPIQSTISATIDSQSSFCGTVGSPVSANKPNVRDNQVKGVATTTSGSSREPSDEDDEAGPCEQSTNAIDMKRLRRKVSNRESARRSRRRKQAHLADLEWQVERLRLENANLFKQLTDASQQFRDADTNNRVLKSDVEALRAKVKLAEDMVTRGTLTPINNQILQNQSSLNTPPQLNTNNLHRMTHVSPTITVRGNDDASYGGGITVSGQNSPLGGLGNLDNIPCSDFNSGINSNNAVSSMTSMWP

SEQ ID NO: 51568 - protein, 313 aa, Glycine max
  peptide (1)..(313): Ceres Seq. ID no. 14311814
  misc_feature (136)..(196): Pfam Name: bZIP transcription factor Pfam Description: bZIP transcription factor
  misc_feature (94)..(269): Homolog of NCBI NO: 7489563 NR Description: probable transcription activator 2 - rice plasmid
  misc_feature (40)..(224): Homolog of NCBI NO: 7489562 NR Description: probable transcription activator - rice
  misc_feature (37)..(269): Homolog of NCBI NO: 13365772 NR Description: RISBZ4 [Oryza sativa]
  misc_feature (60)..(294): Homolog of NCBI NO: 18420842 NR Description: bZIP protein, G/HBF-1-related [Arabidopsis
MESKWGGAPASIMAANFDDFKWIASMFDPGNDDVKPFSDAAFQNQDAVTAFSTCGGVTDDTLVRSQNLTPIQSTISATIDSQSSFCGTVGSPVSANKPNVRDNQVKGVATTTSGSSREPSDEDDEAGPCEQSTNAIDMKRLRRKVSNRESARRSRRRKQAHLADLEWQVERLRLENANLFKQLTDASQQFRDADTNNRVLKSDVEALRAKVKLAEDMVTRGTLTPINNQILQNQSSLNTPPQLNTNNLHRMTHVSPTITVRGNDDASYGGGITVSGQNSPLGGLGNLDNIPCSDFNSGINSNNAVSSMTSMWP

SEQ ID NO: 51569 - protein, 301 aa, Glycine max
  peptide (1)..(301): Ceres Seq. ID no. 14311815
  misc_feature (124)..(184): Pfam Name: bZIP transcription factor Pfam Description: bZIP transcription factor
  misc_feature (82)..(257): Homolog of NCBI NO: 7489563 NR Description: probable transcription activator 2 - rice plasmid
  misc_feature (28)..(212): Homolog of NCBI NO: 7489562 NR Description: probable transcription activator - rice
  misc_feature (25)..(257): Homolog of NCBI NO: 13365772 NR Description: RISBZ4 [Oryza sativa]
  misc_feature (48)..(282): Homolog of NCBI NO: 18420842 NR Description: bZIP protein, G/HBF-1-related [Arabidopsis
MAANFDDFKWIASMFDPGNDDVKPFSDAAFQNQDAVTAFSTCGGVTDDTLVRSQNLTPIQSTISATIDSQSSFCGTVGSPVSANKPNVRDNQVKGVATTTSGSSREPSDEDDEAGPCEQSTNAIDMKRLRRKVSNRESARRSRRRKQAHLADLEWQVERLRLENANLFKQLTDASQQFRDADTNNRVLKSDVEALRAKVKLAEDMVTRGTLTPINNQILQNQSSLNTPPQLNTNNLHRMTHVSPTITVRGNDDASYGGGITVSGQNSPLGGLGNLDNIPCSDFNSGINSNNAVSSMTSMWP

SEQ ID NO: 51570 - DNA, 1416 bp, Glycine max
  misc_feature (1)..(1416): Ceres Seq. ID no. 15171289
ccaatgctccaccgcaataactcagccacagccacaacacacaaacacaaacccttcgttcctctctcgttcccttcttcaattcgatcaaacacagaatagtacttttttattatgatggccgtggcccgaaaggaaatggaccggatcaagggcccgtggagcccggaggaggacgaggctcttcagaagctcgtggagcggcatgggcccagaaactggtccctcatcagcaggtccattccgggccggtctgggaaatcgtgcaggctccgatggtgcaaccagctgtcgccacaggtcgagcaccgggccttcacgccggaagaggacgagaccataattagggcccatgctcggttcggtaacaagtgggccaccatagcccgcctcctctcgggccgcaccgataacgccatcaagaatcactggaactcaacgcttaaacgcaagtgcgcgtccttcatgaccgccgatgaagccgccgccggcggcttcagcccgaggccgctcaagcgatcgttcagcgccggcacggcggtgcctcctccaggaagcccctcaggatccgacgtgagcgagtccagcgctgctcccggcgtggtctctgtctctgtctctccttcacaagtgtttcgccccgtgccggttcggccggttgtcgaaacggcgtcgtcgcaagacgacgccgatgccgacgccgaggatgctggacctactacctcgctgtcgctgtctcttcccggggtggagtcatcggaaatctctaatcgcacctcgacggttccggtgatgccggtgcacaccgtggctgcggcggctccggttccgttaccggcgccggaggttggattaggagcgttgaatttgaatgcggagtttatggcggtgatgcatgagatgataaggaaggaggtgaggagttacatggagcagcagaatgggatgatgtgttttcagggtatggaaatgatggaagggtttaggaacgtgtcggtgaagagaattgggattagcagggtggattcgtaattattattattattattattattatgacctaattagtgttttcacaaaatgaggtttatgaagaactatgatcaagggaagagaaaaaaaaaaaaggaagctgttttcctttttttattttatttttagggaataataatattggttagtgtacagtgggaacgggacgagagaagccaagagtagtagcctggaatggaatgatggaaagtgaaatttcatggcaaatttgaaatttctttggcttgtttctgagcctctttggatgatcctgtgcttcaggtttatttagtttggaaaaaaacataaatgaggggttagatgcgaaaaaagaaagagaggggttggatttaaaaatgaatggaatatcctcaaattttcaag

SEQ ID NO: 51571 - protein, 305 aa, Glycine max
  peptide (1)..(305): Ceres Seq. ID no. 15171290
  misc_feature (13)..(59): Pfam Name: Myb-like DNA-binding domain Pfam Description: Myb-like DNA-binding domain
  misc_feature (6)..(258): Homolog of NCBI NO: 27529846 NR Description: Myb-like protein [Nicotiana tabacum]
  misc_feature (6)..(304): Homolog of NCBI NO: 15235484 NR Description: myb DNA-binding protein (AtMYB73) [Arabidopsis
  misc_feature (1)..(304): Homolog of NCBI NO: 15227806 NR Description: MYB family transcription factor [Arabidopsis
  misc_feature (1)..(304): Homolog of NCBI NO: 21593586 NR Description: putative MYB family transcription factor
  misc_feature (10)..(304): Homolog of NCBI NO: 2129648 NR Description: myb-related protein, 33.3K - Arabidopsis thaliana
  misc_feature (11)..(304): Homolog of NCBI NO: 9954114 NR Description: tuber-specific and sucrose-responsive element
  misc_feature (10)..(304): Homolog of NCBI NO: 21592897 NR Description: myb-related protein, 33.3K [Arabidopsis thaliana]
  misc_feature (10)..(304): Homolog of NCBI NO: 15240708 NR Description: myb family transcription factor [Arabidopsis
  misc_feature (10)..(304): Homolog of NCBI NO: 15450393 NR Description: AT5g67300/K8K14_2 [Arabidopsis thaliana]
  misc_feature (9)..(243): Homolog of NCBI NO: 9954112 NR Description: tuber-specific and sucrose-responsive element
MMAVARKEMDRIKGPWSPEEDEALQKLVERHGPRNWSLISRSIPGRSGKSCRLRWCNQLSPQVEHRAFTPEEDETIIRAHARFGNKWATIARLLSGRTDNAIKNHWNSTLKRKCASFMTADEAAAGGFSPRPLKRSFSAGTAVPPPGSPSGSDVSESSAAPGVVSVSVSPSQVFRPVPVRPVVETASSQDDADADAEDAGPTTSLSLSLPGVESSEISNRTSTVPVMPVHTVAAAAPVPLPAPEVGLGALNLNAEFMAVMHEMIRKEVRSYMEQQNGMMCFQGMEMMEGFRNVSVKRIGISRVDS

SEQ ID NO: 51572 - protein, 304 aa, Glycine max
  peptide (1)..(304): Ceres Seq. ID no. 15171291
  misc_feature (12)..(58): Pfam Name: Myb-like DNA-binding domain Pfam Description: Myb-like DNA-binding domain
  misc_feature (5)..(257): Homolog of NCBI NO: 27529846 NR Description: Myb-like protein [Nicotiana tabacum]
  misc_feature (5)..(303): Homolog of NCBI NO: 15235484 NR Description: myb DNA-binding protein (AtMYB73) [Arabidopsis
  misc_feature (1)..(303): Homolog of NCBI NO: 15227806 NR Description: MYB family transcription factor [Arabidopsis
  misc_feature (1)..(303): Homolog of NCBI NO: 21593586 NR Description: putative MYB family transcription factor
  misc_feature (9)..(303): Homolog of NCBI NO: 2129648 NR Description: myb-related protein, 33.3K - Arabidopsis thaliana
  misc_feature (10)..(303): Homolog of NCBI NO: 9954114 NR Description: tuber-specific and sucrose-responsive element
  misc_feature (9)..(303): Homolog of NCBI NO: 21592897 NR Description: myb-related protein, 33.3K [Arabidopsis thaliana]
  misc_feature (9)..(303): Homolog of NCBI NO: 15240708 NR Description: myb family transcription factor [Arabidopsis
  misc_feature (9)..(303): Homolog of NCBI NO: 15450393 NR Description: AT5g67300/K8K14_2 [Arabidopsis thaliana]
  misc_feature (8)..(242): Homolog of NCBI NO: 9954112 NR Description: tuber-specific and sucrose-responsive element
MAVARKEMDRIKGPWSPEEDEALQKLVERHGPRNWSLISRSIPGRSGKSCRLRWCNQLSPQVEHRAFTPEEDETIIRAHARFGNKWATIARLLSGRTDNAIKNHWNSTLKRKCASFMTADEAAAGGFSPRPLKRSFSAGTAVPPPGSPSGSDVSESSAAPGVVSVSVSPSQVFRPVPVRPVVETASSQDDADADAEDAGPTTSLSLSLPGVESSEISNRTSTVPVMPVHTVAAAAPVPLPAPEVGLGALNLNAEFMAVMHEMIRKEVRSYMEQQNGMMCFQGMEMMEGFRNVSVKRIGISRVDS

SEQ ID NO: 51573 - protein, 297 aa, Glycine max
  peptide (1)..(297): Ceres Seq. ID no. 15171292
  misc_feature (5)..(51): Pfam Name: Myb-like DNA-binding domain Pfam Description: Myb-like DNA-binding domain
  misc_feature (1)..(250): Homolog of NCBI NO: 27529846 NR Description: Myb-like protein [Nicotiana tabacum]
  misc_feature (1)..(296): Homolog of NCBI NO: 15235484 NR Description: myb DNA-binding protein (AtMYB73) [Arabidopsis
  misc_feature (1)..(296): Homolog of NCBI NO: 15227806 NR Description: MYB family transcription factor [Arabidopsis
  misc_feature (1)..(296): Homolog of NCBI NO: 21593586 NR Description: putative MYB family transcription factor
  misc_feature (2)..(296): Homolog of NCBI NO: 2129648 NR Description: myb-related protein, 33.3K - Arabidopsis thaliana
  misc_feature (3)..(296): Homolog of NCBI NO: 9954114 NR Description: tuber-specific and sucrose-responsive element
  misc_feature (2)..(296): Homolog of NCBI NO: 21592897 NR Description: myb-related protein, 33.3K [Arabidopsis thaliana]
  misc_feature (2)..(296): Homolog of NCBI NO: 15240708 NR Description: myb family transcription factor [Arabidopsis
  misc_feature (2)..(296): Homolog of NCBI NO: 15450393 NR Description: AT5g67300/K8K14_2 [Arabidopsis thaliana]
  misc_feature (1)..(235): Homolog of NCBI NO: 9954112 NR Description: tuber-specific and sucrose-responsive element
MDRIKGPWSPEEDEALQKLVERHGPRNWSLISRSIPGRSGKSCRLRWCNQLSPQVEHRAFTPEEDETIIRAHARFGNKWATIARLLSGRTDNAIKNHWNSTLKRKCASFMTADEAAAGGFSPRPLKRSFSAGTAVPPPGSPSGSDVSESSAAPGVVSVSVSPSQVFRPVPVRPVVETASSQDDADADAEDAGPTTSLSLSLPGVESSEISNRTSTVPVMPVHTVAAAAPVPLPAPEVGLGALNLNAEFMAVMHEMIRKEVRSYMEQQNGMMCFQGMEMMEGFRNVSVKRIGISRVDS

SEQ ID NO: 51574 - DNA, 1429 bp, Glycine max
  misc_feature (1)..(1429): Ceres Seq. ID no. 14311870
atgaagatgtgtccacgactccgaaattcctatggcattggtgtgatctccttagttctgatattggtatcagtaaatgtaaaggtagcgagtggggtgtactatgccataaattgcagaaagcatagtgcagttttgacagattttggtggggttggtgatggcataacatccaacacaaaggcctttcaatctgcaataagcaaacttagccaatatgcatctgatggaggtgcaatgcttgttgtgccacctgggaaatggctaaccggaccctttaatctcacaagccattttactctttttctcgactttggtgctgttattcttgcatctcaggatgaatcagaatggccccaacttcctgtattaccttcatatggaagaggaagagatgctcccggaggaaggtttagcagtctaatttttggaactcacctcacagatgttgttataactggtaacaatggtctaattgatgggcaaggagcttattggtggaacaagttccatcagggtcaattgactctcactaggccatatttgatagagatcatgtactctgatcaaatccagatatcatttctcactttggtcaactcgcctacctggtttgtccatccagtatacagtagtaacataataataaaagggctaaccattaaagcaccagtggactctcccaacacagatgggataaacccagattcatgttcaaacattaggattgaagattgcaacattacttccggtgatgattgcattgcggtaaaaagtggctgggatgagtatggaattagatttggaatgccaacccaacacttaatcattaggaggattacttgtgtatcccctgatagtgctatgattgctttagggagtgaaatgtctggtggaatctatgatgttagagctgaagatctcactgccatcaacactgaagcagcagttagaatcaaaacagcaattggtagaggtggatatgtgaaaaacatatttgtcaaaggaatgaatctcaacaccatgaaatatgtattttggattactggcacttatggagaccaccctgaccctggctatgatcccaaagcactaccttacattaccgggataaattatagagacgttgttgcaacgaatgtcacaaagtccgcaagacttgaaggaatttccaatgatcctttcacaggaatctgcatttctaatgtgagtattcaagtgagtgaacaacagaagaagcttcaatggaattgcagtaacatttctggagttacaagcaatgtcactccttacccttgtgcattgctgccagagaaagggcaattggagtgtccttttccaactgacacacttcccattgacaatgttcagctcaagtcttgtaactaataacatggctatatttgaattctgatcactagttttcatt

SEQ ID NO: 51575 - protein, 462 aa, Glycine max
  peptide (1)..(462): Ceres Seq. ID no. 14311871
  misc_feature (77)..(433): Pfam Name: Glycosyl hydrolases family 28 Pfam Description: Glycosyl hydrolases family 28
  misc_feature (31)..(440): Homolog of NCBI NO: 15236625 NR Description: polygalacturonase, putative [Arabidopsis
  misc_feature (40)..(444): Homolog of NCBI NO: 11263971 NR Description: hypothetical protein T17J13.70 - Arabidopsis
  misc_feature (40)..(444): Homolog of NCBI NO: 18412253 NR Description: polygalacturonase, putative [Arabidopsis
  misc_feature (29)..(436): Homolog of NCBI NO: 40714685 NR Description: putative polygalacturonase
  misc_feature (33)..(461): Homolog of NCBI NO: 34897760 NR Description: ESTs AU029388(E30287),D49277(S16474) correspond a region of the predicted gene.~Similar to Arabidopsis thaliana
  misc_feature (34)..(462): Homolog of NCBI NO: 15224072 NR Description: polygalacturonase, putative [Arabidopsis
  misc_feature (34)..(461): Homolog of NCBI NO: 15236514 NR Description: polygalacturonase, putative [Arabidopsis
  misc_feature (13)..(462): Homolog of NCBI NO: 15233124 NR Description: polygalacturonase, putative [Arabidopsis
  misc_feature (7)..(461): Homolog of NCBI NO: 15229058 NR Description: polygalacturonase, putative [Arabidopsis
  misc_feature (28)..(461): Homolog of NCBI NO: 30692538 NR Description: polygalacturonase-like protein [Fragaria x
MKMCPRLRNSYGIGVISLVLILVSVNVKVASGVYYAINCRKHSAVLTDFGGVGDGITSNTKAFQSAISKLSQYASDGGAMLVVPPGKWLTGPFNLTSHFTLFLDFGAVILASQDESEWPQLPVLPSYGRGRDAPGGRFSSLIFGTHLTDVVITGNNGLIDGQGAYWWNKFHQGQLTLTRPYLIEIMYSDQIQISFLTLVNSPTWFVHPVYSSNIIIKGLTIKAPVDSPNTDGINPDSCSNIRIEDCNITSGDDCIAVKSGWDEYGIRFGMPTQHLIIRRITCVSPDSAMIALGSEMSGGIYDVRAEDLTAINTEAAVRIKTAIGRGGYVKNIFVKGMNLNTMKYVFWITGTYGDHPDPGYDPKALPYITGINYRDVVATNVTKSARLEGISNDPFTGICISNVSIQVSEQQKKLQWNCSNISGVTSNVTPYPCALLPEKGQLECPFPTDTLPIDNVQLKSCN

SEQ ID NO: 51576 - protein, 460 aa, Glycine max
  peptide (1)..(460): Ceres Seq. ID no. 14311872
  misc_feature (75)..(431): Pfam Name: Glycosyl hydrolases family 28 Pfam Description: Glycosyl hydrolases family 28
  misc_feature (29)..(438): Homolog of NCBI NO: 15236625 NR Description: polygalacturonase, putative [Arabidopsis
  misc_feature (38)..(442): Homolog of NCBI NO: 11263971 NR Description: hypothetical protein T17J13.70 - Arabidopsis
  misc_feature (38)..(442): Homolog of NCBI NO: 18412253 NR Description: polygalacturonase, putative [Arabidopsis
  misc_feature (27)..(434): Homolog of NCBI NO: 40714685 NR Description: putative polygalacturonase
  misc_feature (31)..(459): Homolog of NCBI NO: 34897760 NR Description: ESTs AU029388(E30287),D49277(S16474) correspond a region of the predicted gene.~Similar to Arabidopsis thaliana
  misc_feature (32)..(460): Homolog of NCBI NO: 15224072 NR Description: polygalacturonase, putative [Arabidopsis
  misc_feature (32)..(459): Homolog of NCBI NO: 15236514 NR Description: polygalacturonase, putative [Arabidopsis
  misc_feature (11)..(460): Homolog of NCBI NO: 15233124 NR Description: polygalacturonase, putative [Arabidopsis
  misc_feature (5)..(459): Homolog of NCBI NO: 15229058 NR Description: polygalacturonase, putative [Arabidopsis
  misc_feature (26)..(459): Homolog of NCBI NO: 30692538 NR Description: polygalacturonase-like protein [Fragaria x
MCPRLRNSYGIGVISLVLILVSVNVKVASGVYYAINCRKHSAVLTDFGGVGDGITSNTKAFQSAISKLSQYASDGGAMLVVPPGKWLTGPFNLTSHFTLFLDFGAVILASQDESEWPQLPVLPSYGRGRDAPGGRFSSLIFGTHLTDVVITGNNGLIDGQGAYWWNKFHQGQLTLTRPYLIEIMYSDQIQISFLTLVNSPTWFVHPVYSSNIIIKGLTIKAPVDSPNTDGINPDSCSNIRIEDCNITSGDDCIAVKSGWDEYGIRFGMPTQHLIIRRITCVSPDSAMIALGSEMSGGIYDVRAEDLTAINTEAAVRIKTAIGRGGYVKNIFVKGMNLNTMKYVFWITGTYGDHPDPGYDPKALPYITGINYRDVVATNVTKSARLEGISNDPFTGICISNVSIQVSEQQKKLQWNCSNISGVTSNVTPYPCALLPEKGQLECPFPTDTLPIDNVQLKSCN

SEQ ID NO: 51577 - protein, 383 aa, Glycine max
  peptide (1)..(383): Ceres Seq. ID no. 14311873
  misc_feature (1)..(354): Pfam Name: Glycosyl hydrolases family 28 Pfam Description: Glycosyl hydrolases family 28
  misc_feature (1)..(361): Homolog of NCBI NO: 15236625 NR Description: polygalacturonase, putative [Arabidopsis
  misc_feature (1)..(365): Homolog of NCBI NO: 11263971 NR Description: hypothetical protein T17J13.70 - Arabidopsis
  misc_feature (1)..(365): Homolog of NCBI NO: 18412253 NR Description: polygalacturonase, putative [Arabidopsis
  misc_feature (1)..(357): Homolog of NCBI NO: 40714685 NR Description: putative polygalacturonase
  misc_feature (1)..(382): Homolog of NCBI NO: 34897760 NR Description: ESTs AU029388(E30287),D49277(S16474) correspond a region of the predicted gene.~Similar to Arabidopsis thaliana
  misc_feature (1)..(383): Homolog of NCBI NO: 15224072 NR Description: polygalacturonase, putative [Arabidopsis
  misc_feature (1)..(382): Homolog of NCBI NO: 15236514 NR Description: polygalacturonase, putative [Arabidopsis
  misc_feature (1)..(383): Homolog of NCBI NO: 15233124 NR Description: polygalacturonase, putative [Arabidopsis
  misc_feature (1)..(382): Homolog of NCBI NO: 15229058 NR Description: polygalacturonase, putative [Arabidopsis
  misc_feature (1)..(382): Homolog of NCBI NO: 30692538 NR Description: polygalacturonase-like protein [Fragaria x
MLVVPPGKWLTGPFNLTSHFTLFLDFGAVILASQDESEWPQLPVLPSYGRGRDAPGGRFSSLIFGTHLTDVVITGNNGLIDGQGAYWWNKFHQGQLTLTRPYLIEIMYSDQIQISFLTLVNSPTWFVHPVYSSNIIIKGLTIKAPVDSPNTDGINPDSCSNIRIEDCNITSGDDCIAVKSGWDEYGIRFGMPTQHLIIRRITCVSPDSAMIALGSEMSGGIYDVRAEDLTAINTEAAVRIKTAIGRGGYVKNIFVKGMNLNTMKYVFWITGTYGDHPDPGYDPKALPYITGINYRDVVATNVTKSARLEGISNDPFTGICISNVSIQVSEQQKKLQWNCSNISGVTSNVTPYPCALLPEKGQLECPFPTDTLPIDNVQLKSCN

SEQ ID NO: 51578 - DNA, 1140 bp, Glycine max
  misc_feature (1)..(1140): Ceres Seq. ID no. 15171366
aaaacccaaaacctcttcttcttactctcttacgttaattcttcgttgtctatgatggcattggatatgattgatgttgttcccaggacgaggatggaagaagaaaatatagcaatacaagaagcagcttccgctgggttaaagagcatggagcatctcattcgtctcctttctccttcttcttctcttcacaacaaccttaataatctcaatctcaaccacctcgactgctccgaaatcaccggcttcactgtctccaagttcaaacaagtcatcaaccttctcaaccgcaccggccacgcccgcttccgccgctctccaccccaagcccaagcccaagcccaaactaatcctcaaccacaacctcagatccaacaacaagggttcagtttagatttcgtgaagcccaccattctaaactcaaagcccatcaacaaagacgaaactttgactctttcaacaacctcttcttccttcatgtcctccgtcaccaacgacgccagcgtctccaacggcaagatcggacctttcctccctccctccgccgccaaaccccctctctcctccgcccaccggaaaaagtgccgcgacgccgccgcagcactctccgccaaaccctcctgccactgctccaagaaaaggaaatcacgcgtgaaacgaacgattcgggtgccggcgataagctcaaagatcgcagatatcccaccggacgagtattcgtggagaaaatacggtcaaaaaccgatcaagggctcaccttaccctcgagggtactacaagtgcagcaccgtgagagggtgtccggcgaggaagcacgtggagcgagcgcaggatgaccccaagatgctaatagtgacttacgagggtgagcaccgtcacgtgctgccgttaacttccgctgccggcgttagtttcggccattgagttaatcgacggcgtcttttggaaacttggcgggggacgttaaatgagcgtcggatcgtgaagtaacggcggatgcgaacaaggatcgattcggttcgaggacggaaaaagaaaagtggcaactaaagtcaactttcgcgttgtggaatgattttgttgacgaggacttttgtgtaaatttgaccccaagtaaagtagtgcaggtctcaaagaatg

SEQ ID NO: 51579 - protein, 307 aa, Glycine max
  peptide (1)..(307): Ceres Seq. ID no. 15171367
  misc_feature (235)..(295): Pfam Name: WRKY DNA -binding domain Pfam Description: WRKY DNA -binding domain
  misc_feature (30)..(151): Homolog of NCBI NO: 10798760 NR Description: WRKY transcription factor Nt-SubD48 [Nicotiana
  misc_feature (131)..(300): Homolog of NCBI NO: 10798760 NR Description: WRKY transcription factor Nt-SubD48 [Nicotiana
  misc_feature (75)..(293): Homolog of NCBI NO: 4894963 NR Description: DNA-binding protein WRKY3 [Avena sativa]
  misc_feature (19)..(301): Homolog of NCBI NO: 38346908 NR Description: OSJNBb0015N08.8 [Oryza sativa (japonica
  misc_feature (24)..(169): Homolog of NCBI NO: 25348152 NR Description: probable WRKY-type DNA binding protein
  misc_feature (24)..(169): Homolog of NCBI NO: 18400580 NR Description: WRKY family transcription factor [Arabidopsis
  misc_feature (148)..(293): Homolog of NCBI NO: 25348152 NR Description: probable WRKY-type DNA binding protein
  misc_feature (148)..(293): Homolog of NCBI NO: 18400580 NR Description: WRKY family transcription factor [Arabidopsis
  misc_feature (24)..(126): Homolog of NCBI NO: 4760596 NR Description: DNA-binding protein NtWRKY3 [Nicotiana tabacum]
  misc_feature (150)..(295): Homolog of NCBI NO: 4760596 NR Description: DNA-binding protein NtWRKY3 [Nicotiana tabacum]
KTQNLFFLLSYVNSSLSMMALDMIDVVPRTRMEEENIAIQEAASAGLKSMEHLIRLLSPSSSLHNNLNNLNLNHLDCSEITGFTVSKFKQVINLLNRTGHARFRRSPPQAQAQAQTNPQPQPQIQQQGFSLDFVKPTILNSKPINKDETLTLSTTSSSFMSSVTNDASVSNGKIGPFLPPSAAKPPLSSAHRKKCRDAAAALSAKPSCHCSKKRKSRVKRTIRVPAISSKIADIPPDEYSWRKYGQKPIKGSPYPRGYYKCSTVRGCPARKHVERAQDDPKMLIVTYEGEHRHVLPLTSAAGVSFGH

SEQ ID NO: 51580 - protein, 290 aa, Glycine max
  peptide (1)..(290): Ceres Seq. ID no. 15171368
  misc_feature (218)..(278): Pfam Name: WRKY DNA -binding domain Pfam Description: WRKY DNA -binding domain
  misc_feature (13)..(134): Homolog of NCBI NO: 10798760 NR Description: WRKY transcription factor Nt-SubD48 [Nicotiana
  misc_feature (114)..(283): Homolog of NCBI NO: 10798760 NR Description: WRKY transcription factor Nt-SubD48 [Nicotiana
  misc_feature (58)..(276): Homolog of NCBI NO: 4894963 NR Description: DNA-binding protein WRKY3 [Avena sativa]
  misc_feature (2)..(284): Homolog of NCBI NO: 38346908 NR Description: OSJNBb0015N08.8 [Oryza sativa (japonica
  misc_feature (7)..(152): Homolog of NCBI NO: 25348152 NR Description: probable WRKY-type DNA binding protein
  misc_feature (7)..(152): Homolog of NCBI NO: 18400580 NR Description: WRKY family transcription factor [Arabidopsis
  misc_feature (131)..(276): Homolog of NCBI NO: 25348152 NR Description: probable WRKY-type DNA binding protein
  misc_feature (131)..(276): Homolog of NCBI NO: 18400580 NR Description: WRKY family transcription factor [Arabidopsis
  misc_feature (7)..(109): Homolog of NCBI NO: 4760596 NR Description: DNA-binding protein NtWRKY3 [Nicotiana tabacum]
  misc_feature (133)..(278): Homolog of NCBI NO: 4760596 NR Description: DNA-binding protein NtWRKY3 [Nicotiana tabacum]
MMALDMIDVVPRTRMEEENIAIQEAASAGLKSMEHLIRLLSPSSSLHNNLNNLNLNHLDCSEITGFTVSKFKQVINLLNRTGHARFRRSPPQAQAQAQTNPQPQPQIQQQGFSLDFVKPTILNSKPINKDETLTLSTTSSSFMSSVTNDASVSNGKIGPFLPPSAAKPPLSSAHRKKCRDAAAALSAKPSCHCSKKRKSRVKRTIRVPAISSKIADIPPDEYSWRKYGQKPIKGSPYPRGYYKCSTVRGCPARKHVERAQDDPKMLIVTYEGEHRHVLPLTSAAGVSFGH

SEQ ID NO: 51581 - protein, 289 aa, Glycine max
  peptide (1)..(289): Ceres Seq. ID no. 15171369
  misc_feature (217)..(277): Pfam Name: WRKY DNA -binding domain Pfam Description: WRKY DNA -binding domain
  misc_feature (12)..(133): Homolog of NCBI NO: 10798760 NR Description: WRKY transcription factor Nt-SubD48 [Nicotiana
  misc_feature (113)..(282): Homolog of NCBI NO: 10798760 NR Description: WRKY transcription factor Nt-SubD48 [Nicotiana
  misc_feature (57)..(275): Homolog of NCBI NO: 4894963 NR Description: DNA-binding protein WRKY3 [Avena sativa]
  misc_feature (1)..(283): Homolog of NCBI NO: 38346908 NR Description: OSJNBb0015N08.8 [Oryza sativa (japonica
  misc_feature (6)..(151): Homolog of NCBI NO: 25348152 NR Description: probable WRKY-type DNA binding protein
  misc_feature (6)..(151): Homolog of NCBI NO: 18400580 NR Description: WRKY family transcription factor [Arabidopsis
  misc_feature (130)..(275): Homolog of NCBI NO: 25348152 NR Description: probable WRKY-type DNA binding protein
  misc_feature (130)..(275): Homolog of NCBI NO: 18400580 NR Description: WRKY family transcription factor [Arabidopsis
  misc_feature (6)..(108): Homolog of NCBI NO: 4760596 NR Description: DNA-binding protein NtWRKY3 [Nicotiana tabacum]
  misc_feature (132)..(277): Homolog of NCBI NO: 4760596 NR Description: DNA-binding protein NtWRKY3 [Nicotiana tabacum]
MALDMIDVVPRTRMEEENIAIQEAASAGLKSMEHLIRLLSPSSSLHNNLNNLNLNHLDCSEITGFTVSKFKQVINLLNRTGHARFRRSPPQAQAQAQTNPQPQPQIQQQGFSLDFVKPTILNSKPINKDETLTLSTTSSSFMSSVTNDASVSNGKIGPFLPPSAAKPPLSSAHRKKCRDAAAALSAKPSCHCSKKRKSRVKRTIRVPAISSKIADIPPDEYSWRKYGQKPIKGSPYPRGYYKCSTVRGCPARKHVERAQDDPKMLIVTYEGEHRHVLPLTSAAGVSFGH

SEQ ID NO: 51582 - DNA, 1332 bp, Glycine max
  misc_feature (1)..(1332): Ceres Seq. ID no. 15171378
aacattgttttcaattgtagaacctgaaaggaaggatatggtcattgtaaggtcactctcaatattattttcccttcccattgcttacactctctcttcttgtaatttaaatcaaaccttccaccccaattctcccccagagctcagaatcttcagctctacttcttcttccagaaaacaaagagatattcattcaaaaatcacctatctcatccctctcttgacccctccaacatgaagaacactaacagcaacacaaaactaatccttctccacccatatatccagaaacaaggaagctcaaaccgcttatggcttctagccttcatatccttcttcaccttagttttccttgccacactcatttacacaagagacacaacctcatctaccactaccactacctcttccacccctttatctagtttcaccaacacccttttatcatccactgtaataaacaccctcctccactatgcctcaaaatccaacgacacctttcacatgccccactcagacctcaaaaccatctccgacatgctccgaaagtgtccctcgccatgcaacttcctcgtcttcggcctcacccacgagaccctcctttggaaagccctcaaccacaacggaagaaccgtcttcatcgacgaaaaccggtactacgccgcgtatttcgaagaaaaacaccccgaaatcgatgcttacgacgtggcatacacgactaaaaggagtgagttgaaggagctgatagcttcggcgaaagaacaagtaggaaatgaatgcaggccagtgcagaatcttctgttttctgagtgcaagttgggtctcaatgaccttccgaaccatgtttatgaagtggattgggatgtgatattggtggatggaccgaggggggattggccggacgctcccggaagaatgtcgccgatcttcaccgccggcgttcttgcccggagcaaaaagggtgggaacccgaagacgcatgtgtttgtgcatgacttctcggggaaagtggagaaggtttctgggaatgagtttctgtgcaaggaaaatttggtggaggctactcatagtttgggacactatgtgctggaaaaaatggacgagagtagcgttcagtattgtaagaatcactcatcaggattcgcttcttcttcgtcttagttggtgtctttaatgttgctctctatatatatcgaccatctgggtatttatatagttgcactgtttacttctggagcttgtaaaagataattctttctttctttcttctttttctcgtttttcgttttctggcactgaagattgtaatttcttcaagaaggtcatgcttcc

SEQ ID NO: 51583 - protein, 308 aa, Glycine max
  peptide (1)..(308): Ceres Seq. ID no. 15171379
  misc_feature (52)..(296): Pfam Name: Protein of unknown function (DUF579) Pfam Description: Protein of unknown function (DUF579)
  misc_feature (68)..(285): Homolog of NCBI NO: 18398986 NR Description: expressed protein [Arabidopsis thaliana]
  misc_feature (28)..(292): Homolog of NCBI NO: 15217566 NR Description: hypothetical protein [Arabidopsis thaliana]
  misc_feature (23)..(296): Homolog of NCBI NO: 25354648 NR Description: hypothetical protein F14O23.3 [imported] -
  misc_feature (23)..(296): Homolog of NCBI NO: 18409879 NR Description: expressed protein [Arabidopsis thaliana]
  misc_feature (22)..(308): Homolog of NCBI NO: 32488916 NR Description: OSJNBb0059K02.7 [Oryza sativa (japonica
  misc_feature (22)..(308): Homolog of NCBI NO: 10241434 NR Description: putative protein [Oryza sativa (indica
  misc_feature (1)..(298): Homolog of NCBI NO: 18397819 NR Description: expressed protein [Arabidopsis thaliana]
  misc_feature (5)..(307): Homolog of NCBI NO: 15240242 NR Description: hypothetical protein [Arabidopsis thaliana]
  misc_feature (1)..(308): Homolog of NCBI NO: 15229700 NR Description: expressed protein [Arabidopsis thaliana]
  misc_feature (1)..(308): Homolog of NCBI NO: 21593034 NR Description: unknown [Arabidopsis thaliana]
MKNTNSNTKLILLHPYIQKQGSSNRLWLLAFISFFTLVFLATLIYTRDTTSSTTTTTSSTPLSSFTNTLLSSTVINTLLHYASKSNDTFHMPHSDLKTISDMLRKCPSPCNFLVFGLTHETLLWKALNHNGRTVFIDENRYYAAYFEEKHPEIDAYDVAYTTKRSELKELIASAKEQVGNECRPVQNLLFSECKLGLNDLPNHVYEVDWDVILVDGPRGDWPDAPGRMSPIFTAGVLARSKKGGNPKTHVFVHDFSGKVEKVSGNEFLCKENLVEATHSLGHYVLEKMDESSVQYCKNHSSGFASSSS

SEQ ID NO: 51584 - protein, 218 aa, Glycine max
  peptide (1)..(218): Ceres Seq. ID no. 15171380
  misc_feature (1)..(206): Pfam Name: Protein of unknown function (DUF579) Pfam Description: Protein of unknown function (DUF579)
  misc_feature (1)..(195): Homolog of NCBI NO: 18398986 NR Description: expressed protein [Arabidopsis thaliana]
  misc_feature (1)..(202): Homolog of NCBI NO: 15217566 NR Description: hypothetical protein [Arabidopsis thaliana]
  misc_feature (1)..(206): Homolog of NCBI NO: 25354648 NR Description: hypothetical protein F14O23.3 [imported] -
  misc_feature (1)..(206): Homolog of NCBI NO: 18409879 NR Description: expressed protein [Arabidopsis thaliana]
  misc_feature (1)..(218): Homolog of NCBI NO: 32488916 NR Description: OSJNBb0059K02.7 [Oryza sativa (japonica
  misc_feature (1)..(218): Homolog of NCBI NO: 10241434 NR Description: putative protein [Oryza sativa (indica
  misc_feature (1)..(208): Homolog of NCBI NO: 18397819 NR Description: expressed protein [Arabidopsis thaliana]
  misc_feature (1)..(217): Homolog of NCBI NO: 15240242 NR Description: hypothetical protein [Arabidopsis thaliana]
  misc_feature (1)..(218): Homolog of NCBI NO: 15229700 NR Description: expressed protein [Arabidopsis thaliana]
  misc_feature (1)..(218): Homolog of NCBI NO: 21593034 NR Description: unknown [Arabidopsis thaliana]
MPHSDLKTISDMLRKCPSPCNFLVFGLTHETLLWKALNHNGRTVFIDENRYYAAYFEEKHPEIDAYDVAYTTKRSELKELIASAKEQVGNECRPVQNLLFSECKLGLNDLPNHVYEVDWDVILVDGPRGDWPDAPGRMSPIFTAGVLARSKKGGNPKTHVFVHDFSGKVEKVSGNEFLCKENLVEATHSLGHYVLEKMDESSVQYCKNHSSGFASSSS

SEQ ID NO: 51585 - protein, 207 aa, Glycine max
  peptide (1)..(207): Ceres Seq. ID no. 15171381
  misc_feature (1)..(195): Pfam Name: Protein of unknown function (DUF579) Pfam Description: Protein of unknown function (DUF579)
  misc_feature (1)..(184): Homolog of NCBI NO: 18398986 NR Description: expressed protein [Arabidopsis thaliana]
  misc_feature (1)..(191): Homolog of NCBI NO: 15217566 NR Description: hypothetical protein [Arabidopsis thaliana]
  misc_feature (1)..(195): Homolog of NCBI NO: 25354648 NR Description: hypothetical protein F14O23.3 [imported] -
  misc_feature (1)..(195): Homolog of NCBI NO: 18409879 NR Description: expressed protein [Arabidopsis thaliana]
  misc_feature (1)..(207): Homolog of NCBI NO: 32488916 NR Description: OSJNBb0059K02.7 [Oryza sativa (japonica
  misc_feature (1)..(207): Homolog of NCBI NO: 10241434 NR Description: putative protein [Oryza sativa (indica
  misc_feature (1)..(197): Homolog of NCBI NO: 18397819 NR Description: expressed protein [Arabidopsis thaliana]
  misc_feature (1)..(206): Homolog of NCBI NO: 15240242 NR Description: hypothetical protein [Arabidopsis thaliana]
  misc_feature (1)..(207): Homolog of NCBI NO: 15229700 NR Description: expressed protein [Arabidopsis thaliana]
  misc_feature (1)..(207): Homolog of NCBI NO: 21593034 NR Description: unknown [Arabidopsis thaliana]
MLRKCPSPCNFLVFGLTHETLLWKALNHNGRTVFIDENRYYAAYFEEKHPEIDAYDVAYTTKRSELKELIASAKEQVGNECRPVQNLLFSECKLGLNDLPNHVYEVDWDVILVDGPRGDWPDAPGRMSPIFTAGVLARSKKGGNPKTHVFVHDFSGKVEKVSGNEFLCKENLVEATHSLGHYVLEKMDESSVQYCKNHSSGFASSSS

SEQ ID NO: 51586 - DNA, 1168 bp, Glycine max
  misc_feature (1)..(1168): Ceres Seq. ID no. 15169979
aacttgtcggggtttggatttttttcattccgcataggttccgttttccaaacaatgagtttgagtatgagcttgtgcggtaattacagtcttcagcttcaaaatcgcagaatcgtaagctgcaatcttcaccaggatggcaggcatattgttcccatcaatacgcaccaaaaaccttccaaacctgaaaagtgtcttcggtccaaatggaagattaatggcaataacattgggacatgcattggagtcatgacagtggcacacttggttgctccagtcgctgcaaaagctgaagtggctgcttctatttatgctttggctgatggaagcctcggtgactggtttggaggctttctattttcagctggacagcaggccaatgaagctgttcagggccaattaacctctctcagtttcactagtttggctgtaatttatggggctgggcttgttaccagcctttctccctgtacacttagtgtcttaccactgacccttggttacattggggcatttggctctggcaaaagcagagcacaggttgtaggagattccattgcattctccttaggccttgcaaccacgttagcactgttgggtgtaggagcttcatttgcaggaaaggcttatggacagattggccaaggattacctttggcagcttctggtttggctataattatgggtctgaatcttcttgagatcattgaattacggctcccctcattctttgacagttttgatccacgtgcagcagctgccaatttcccatccagtgtgcaagcatacctcgccgggcttacatttgccttagctgcctcaccttgtagtacacctgtcttggccacccttctgggatatgttgctgcatccaaggacccggtgattggaggcagcttacttttaacatacacaactggctatgtttctcctttactcttggctgcttcttttgctggagcactacagagcttgctctcattccgcaagttctcggcatggatcaatcctataagcggagcaatgctgttaggtggtggtgtatatacgttcttagataggctgttcccagtcacaatggtgatgtagaaaatctcttggctcttaacatgctgtgatattttacattaacagttcaatgtatatatgtcatacaagtattcaattc

SEQ ID NO: 51587 - protein, 362 aa, Glycine max
  peptide (1)..(362): Ceres Seq. ID no. 15169980
  misc_feature (145)..(352): Pfam Name: Cytochrome C biogenesis protein transmembrane region Pfam Description: Cytochrome C biogenesis protein transmembrane
NLSGFGFFSFRIGSVFQTMSLSMSLCGNYSLQLQNRRIVSCNLHQDGRHIVPINTHQKPSKPEKCLRSKWKINGNNIGTCIGVMTVAHLVAPVAAKAEVAASIYALADGSLGDWFGGFLFSAGQQANEAVQGQLTSLSFTSLAVIYGAGLVTSLSPCTLSVLPLTLGYIGAFGSGKSRAQVVGDSIAFSLGLATTLALLGVGASFAGKAYGQIGQGLPLAASGLAIIMGLNLLEIIELRLPSFFDSFDPRAAAANFPSSVQAYLAGLTFALAASPCSTPVLATLLGYVAASKDPVIGGSLLLTYTTGYVSPLLLAASFAGALQSLLSFRKFSAWINPISGAMLLGGGVYTFLDRLFPVTMVM

SEQ ID NO: 51588 - protein, 344 aa, Glycine max
  peptide (1)..(344): Ceres Seq. ID no. 15169981
  misc_feature (127)..(334): Pfam Name: Cytochrome C biogenesis protein transmembrane region Pfam Description: Cytochrome C biogenesis protein transmembrane
MSLSMSLCGNYSLQLQNRRIVSCNLHQDGRHIVPINTHQKPSKPEKCLRSKWKINGNNIGTCIGVMTVAHLVAPVAAKAEVAASIYALADGSLGDWFGGFLFSAGQQANEAVQGQLTSLSFTSLAVIYGAGLVTSLSPCTLSVLPLTLGYIGAFGSGKSRAQVVGDSIAFSLGLATTLALLGVGASFAGKAYGQIGQGLPLAASGLAIIMGLNLLEIIELRLPSFFDSFDPRAAAANFPSSVQAYLAGLTFALAASPCSTPVLATLLGYVAASKDPVIGGSLLLTYTTGYVSPLLLAASFAGALQSLLSFRKFSAWINPISGAMLLGGGVYTFLDRLFPVTMVM

SEQ ID NO: 51589 - protein, 340 aa, Glycine max
  peptide (1)..(340): Ceres Seq. ID no. 15169982
  misc_feature (123)..(330): Pfam Name: Cytochrome C biogenesis protein transmembrane region Pfam Description: Cytochrome C biogenesis protein transmembrane
MSLCGNYSLQLQNRRIVSCNLHQDGRHIVPINTHQKPSKPEKCLRSKWKINGNNIGTCIGVMTVAHLVAPVAAKAEVAASIYALADGSLGDWFGGFLFSAGQQANEAVQGQLTSLSFTSLAVIYGAGLVTSLSPCTLSVLPLTLGYIGAFGSGKSRAQVVGDSIAFSLGLATTLALLGVGASFAGKAYGQIGQGLPLAASGLAIIMGLNLLEIIELRLPSFFDSFDPRAAAANFPSSVQAYLAGLTFALAASPCSTPVLATLLGYVAASKDPVIGGSLLLTYTTGYVSPLLLAASFAGALQSLLSFRKFSAWINPISGAMLLGGGVYTFLDRLFPVTMVM

SEQ ID NO: 51590 - DNA, 2040 bp, Glycine max
  misc_feature (1)..(2040): Ceres Seq. ID no. 15171446
ctcttcatcaacgcacagcttcttcttcttctcatgccttcatagcttcctctcctctccctctttttccacatcttgtttcctaccccagcttctctttctctctgtttcgtccactctcttcatctgcacctgctacattgatggaggtggtcaaagcaattgccaagcacgaacctgcagctcctgaaagtgttgctatcagagctgatcagaagagttatagttacaagcaactcatcacatcggcacagaagatatctaatctcttgtgtggcagtgatgcacagacaggaaatctcggtggagctcgaataggaattgtagccaaaccttctgctgaatttgttgctggaatacttgggatttggcttagtggaggtgttgctgttccgcttgcaaccagctatccagaagtagagctcttgtatgtgattaataattcggatgtatctgcaatactgagtactgaggatcatactgaaataatgcaaagcgtagccaataaaagctcttctcagttttttcatcttccacctgttctcaacaagtcttctgagaaaagcagagataaacattcacagaatgggggaattcatacagataaaattttgttggataagtttggaagatcaagtgaagatccagcactgattttgtacactagtgggacaacgggtaaacctaagggagttgttcatacacacagaagcatcatttcccaggtacaaactttgacaaaagcttgggagtactcatctgctgaccagtttctgcattgtctaccactacatcatgttcatgggcttttcaatggtttaatggcccctctctatgcaggttccacggttgagtttttgccaaaatttagtgtgagaggagtttggcagagatggcgtgagtcatatccaaccgatggttctaaggctgaagaggctataactgtgttcactggagttccaactatctatgcccgattgatacaaggttatcatgcaatggatcctgagctacaagctgcttcagtatctgctgcaaagaacttgcgtcttatgatgtgtgggtcctctgcacttccactgcctgttatgcaagaatgggaagccatcactgggcatcgcttattggaacgatatggcatgactgaatttgttatggcattgtcgaatccattgaaaggtgagcgcaagcctggaaccgttggcaaaccatttcctggtatacaggtcaagattattgcagatgaagagagtgtgaatggaaatactggaatgggtgagctttgcattaaaagcccttcattgtttaaagaatattggaaacttcctgaggtaacgaaggaatcatttactgatgatggattctttaagactggagatgcagttactacagatgaagatggatatttcatcattctaggacgtactaatgctgatataatcaaggctggtggatataagctgtctgcattagaaattgaatcggttataatagagcatccagctgtctcagaatgttgcgttttaggcctaccagacaaagactatggagagattgttagtgcaatcgttgtgccagaggccgatgttaaacgaaaacaagatcaagaatcaaagcctgttctaagcctagaagaattatccaactgggccaaagacaaaattgcaccttacaagattccaactcagctaatcgtgtgggataaactccctcgcaatgccatggggaaggtaaataaaaaagagctgaagaagctgcttgtttcagaacagtgaacaccatttgatcatttattcatattcactaggcaaagttaatttattgaaaccagtttaagatggtggcaatctcaaataaaattgcaccaattattgagtgaaatagaaacctttatattatgacatttataagttgaataagttttagcatattattagggggaagataaaggagaaagtatagcataattttagcattttagctgtatgaaggcgattgattgaatgtgtttaataagaagtatttattgtattgaaaatg

SEQ ID NO: 51591 - protein, 590 aa, Glycine max
  peptide (1)..(590): Ceres Seq. ID no. 15171447
  misc_feature (102)..(507): Pfam Name: AMP-binding enzyme Pfam Description: AMP-binding enzyme
  misc_feature (56)..(582): Homolog of NCBI NO: 40747505 NR Description: hypothetical protein AN0562.2 [Aspergillus
  misc_feature (441)..(586): Homolog of NCBI NO: 34909750 NR Description: hypothetical protein~similar to Arabidopsis
  misc_feature (97)..(242): Homolog of NCBI NO: 34909750 NR Description: hypothetical protein~similar to Arabidopsis
  misc_feature (62)..(179): Homolog of NCBI NO: 37520691 NR Description: probable long chain fatty acid CoA ligase
  misc_feature (216)..(590): Homolog of NCBI NO: 37520691 NR Description: probable long chain fatty acid CoA ligase
  misc_feature (63)..(174): Homolog of NCBI NO: 23127962 NR Description: hypothetical protein [Nostoc punctiforme]
  misc_feature (216)..(585): Homolog of NCBI NO: 23127962 NR Description: hypothetical protein [Nostoc punctiforme]
  misc_feature (48)..(590): Homolog of NCBI NO: 18401035 NR Description: AMP-dependent synthetase and ligase family
  misc_feature (48)..(590): Homolog of NCBI NO: 21536867 NR Description: putative long-chain acyl-CoA synthetase
  misc_feature (9)..(590): Homolog of NCBI NO: 9294464 NR Description: long-chain-fatty-acid-CoA ligase-like protein
LHQRTASSSSHAFIASSPLPLFPHLVSYPSFSFSLFRPLSSSAPATLMEVVKAIAKHEPAAPESVAIRADQKSYSYKQLITSAQKISNLLCGSDAQTGNLGGARIGIVAKPSAEFVAGILGIWLSGGVAVPLATSYPEVELLYVINNSDVSAILSTEDHTEIMQSVANKSSSQFFHLPPVLNKSSEKSRDKHSQNGGIHTDKILLDKFGRSSEDPALILYTSGTTGKPKGVVHTHRSIISQVQTLTKAWEYSSADQFLHCLPLHHVHGLFNGLMAPLYAGSTVEFLPKFSVRGVWQRWRESYPTDGSKAEEAITVFTGVPTIYARLIQGYHAMDPELQAASVSAAKNLRLMMCGSSALPLPVMQEWEAITGHRLLERYGMTEFVMALSNPLKGERKPGTVGKPFPGIQVKIIADEESVNGNTGMGELCIKSPSLFKEYWKLPEVTKESFTDDGFFKTGDAVTTDEDGYFIILGRTNADIIKAGGYKLSALEIESVIIEHPAVSECCVLGLPDKDYGEIVSAIVVPEADVKRKQDQESKPVLSLEELSNWAKDKIAPYKIPTQLIVWDKLPRNAMGKVNKKELKKLLVSEQ

SEQ ID NO: 51592 - protein, 543 aa, Glycine max
  peptide (1)..(543): Ceres Seq. ID no. 15171448
  misc_feature (55)..(460): Pfam Name: AMP-binding enzyme Pfam Description: AMP-binding enzyme
  misc_feature (9)..(535): Homolog of NCBI NO: 40747505 NR Description: hypothetical protein AN0562.2 [Aspergillus
  misc_feature (394)..(539): Homolog of NCBI NO: 34909750 NR Description: hypothetical protein~similar to Arabidopsis
  misc_feature (50)..(195): Homolog of NCBI NO: 34909750 NR Description: hypothetical protein~similar to Arabidopsis
  misc_feature (15)..(132): Homolog of NCBI NO: 37520691 NR Description: probable long chain fatty acid CoA ligase
  misc_feature (169)..(543): Homolog of NCBI NO: 37520691 NR Description: probable long chain fatty acid CoA ligase
  misc_feature (16)..(127): Homolog of NCBI NO: 23127962 NR Description: hypothetical protein [Nostoc punctiforme]
  misc_feature (169)..(538): Homolog of NCBI NO: 23127962 NR Description: hypothetical protein [Nostoc punctiforme]
  misc_feature (1)..(543): Homolog of NCBI NO: 18401035 NR Description: AMP-dependent synthetase and ligase family
  misc_feature (1)..(543): Homolog of NCBI NO: 21536867 NR Description: putative long-chain acyl-CoA synthetase
  misc_feature (1)..(543): Homolog of NCBI NO: 9294464 NR Description: long-chain-fatty-acid-CoA ligase-like protein
MEVVKAIAKHEPAAPESVAIRADQKSYSYKQLITSAQKISNLLCGSDAQTGNLGGARIGIVAKPSAEFVAGILGIWLSGGVAVPLATSYPEVELLYVINNSDVSAILSTEDHTEIMQSVANKSSSQFFHLPPVLNKSSEKSRDKHSQNGGIHTDKILLDKFGRSSEDPALILYTSGTTGKPKGVVHTHRSIISQVQTLTKAWEYSSADQFLHCLPLHHVHGLFNGLMAPLYAGSTVEFLPKFSVRGVWQRWRESYPTDGSKAEEAITVFTGVPTIYARLIQGYHAMDPELQAASVSAAKNLRLMMCGSSALPLPVMQEWEAITGHRLLERYGMTEFVMALSNPLKGERKPGTVGKPFPGIQVKIIADEESVNGNTGMGELCIKSPSLFKEYWKLPEVTKESFTDDGFFKTGDAVTTDEDGYFIILGRTNADIIKAGGYKLSALEIESVIIEHPAVSECCVLGLPDKDYGEIVSAIVVPEADVKRKQDQESKPVLSLEELSNWAKDKIAPYKIPTQLIVWDKLPRNAMGKVNKKELKKLLVSEQ

SEQ ID NO: 51593 - protein, 428 aa, Glycine max
  peptide (1)..(428): Ceres Seq. ID no. 15171449
  misc_feature (1)..(345): Pfam Name: AMP-binding enzyme Pfam Description: AMP-binding enzyme
  misc_feature (1)..(420): Homolog of NCBI NO: 40747505 NR Description: hypothetical protein AN0562.2 [Aspergillus
  misc_feature (279)..(424): Homolog of NCBI NO: 34909750 NR Description: hypothetical protein~similar to Arabidopsis
  misc_feature (1)..(80): Homolog of NCBI NO: 34909750 NR Description: hypothetical protein~similar to Arabidopsis
  misc_feature (1)..(17): Homolog of NCBI NO: 37520691 NR Description: probable long chain fatty acid CoA ligase
  misc_feature (54)..(428): Homolog of NCBI NO: 37520691 NR Description: probable long chain fatty acid CoA ligase
  misc_feature (1)..(12): Homolog of NCBI NO: 23127962 NR Description: hypothetical protein [Nostoc punctiforme]
  misc_feature (54)..(423): Homolog of NCBI NO: 23127962 NR Description: hypothetical protein [Nostoc punctiforme]
  misc_feature (1)..(428): Homolog of NCBI NO: 18401035 NR Description: AMP-dependent synthetase and ligase family
  misc_feature (1)..(428): Homolog of NCBI NO: 21536867 NR Description: putative long-chain acyl-CoA synthetase
  misc_feature (1)..(428): Homolog of NCBI NO: 9294464 NR Description: long-chain-fatty-acid-CoA ligase-like protein
MQSVANKSSSQFFHLPPVLNKSSEKSRDKHSQNGGIHTDKILLDKFGRSSEDPALILYTSGTTGKPKGVVHTHRSIISQVQTLTKAWEYSSADQFLHCLPLHHVHGLFNGLMAPLYAGSTVEFLPKFSVRGVWQRWRESYPTDGSKAEEAITVFTGVPTIYARLIQGYHAMDPELQAASVSAAKNLRLMMCGSSALPLPVMQEWEAITGHRLLERYGMTEFVMALSNPLKGERKPGTVGKPFPGIQVKIIADEESVNGNTGMGELCIKSPSLFKEYWKLPEVTKESFTDDGFFKTGDAVTTDEDGYFIILGRTNADIIKAGGYKLSALEIESVIIEHPAVSECCVLGLPDKDYGEIVSAIVVPEADVKRKQDQESKPVLSLEELSNWAKDKIAPYKIPTQLIVWDKLPRNAMGKVNKKELKKLLVSEQ

SEQ ID NO: 51594 - DNA, 803 bp, Glycine max
  misc_feature (1)..(803): Ceres Seq. ID no. 12612361
cctagaacatcctaatcaaaaatcaaaatcacattttgtctctctccatttcttgtgttgtatatatcatccaatgaagagagatcaaattgcgatgtgttaggagaatagctgtatgagtataaatatgaagacgtagaaagtatggtcttgaatattattttactaaacctcttctcatcaatctatctatctcatgtggacaagcgagtgctccatgttccgcaggctcctctgcacctctcttccccgtctttcaaaaccccaatcttcaagctccttaaccattctcaactcctcactcacccaaaaacaaaaacaaaagcccttatctccccaaaccatcaaatccttctcctcttccaaaatgggggacgcgcgaagacccttattcgtcccaatccccactttggaaaaagcagaacgctccgacctcctccgcgccctagaagcttccatgggctcccctttcagctccgagcctctctctccaaaccctaaccctctaatcatcgtcatcagcggccccagcggcgtcggcaaggacaccctcatcgcgcgcctccgcgactcccgccgcgccctccacttcgttgtcaccgccaccacgcgcccccgccgccccgccgaggtcgacgggaaggactacatcttcgtctccnaggaggagtttctcgggatggtggagcgggaggagctgctggagtacgcgctggtctacggtgactacnagggcgtgccgaagcagcagattcgggagtgtctcgcgcaaggctgcgacgtcgttttgagggttgatattc

SEQ ID NO: 51595 - protein, 202 aa, Glycine max
  peptide (1)..(202): Ceres Seq. ID no. 12612362
  misc_feature (138)..(201): Pfam Name: Guanylate kinase Pfam Description: Guanylate kinase
  misc_feature (104)..(201): Homolog of NCBI NO: 23109761 NR Description: hypothetical protein [Novosphingobium
  misc_feature (104)..(201): Homolog of NCBI NO: 15673881 NR Description: guanylate kinase (EC 2.7.4.8) [Lactococcus lactis
  misc_feature (104)..(201): Homolog of NCBI NO: 28210904 NR Description: guanylate kinase [Clostridium tetani E88]
  misc_feature (104)..(201): Homolog of NCBI NO: 20807954 NR Description: Guanylate kinase [Thermoanaerobacter
  misc_feature (104)..(201): Homolog of NCBI NO: 15615075 NR Description: guanylate kinase [Bacillus halodurans]
  misc_feature (98)..(201): Homolog of NCBI NO: 22297598 NR Description: guanylate kinase [Thermosynechococcus elongatus
  misc_feature (98)..(201): Homolog of NCBI NO: 37521190 NR Description: guanylate kinase [Gloeobacter violaceus]
  misc_feature (91)..(201): Homolog of NCBI NO: 22969911 NR Description: hypothetical protein [Chloroflexus aurantiacus]
  misc_feature (72)..(201): Homolog of NCBI NO: 6862924 NR Description: putative guanylate kinase [Arabidopsis thaliana]
  misc_feature (43)..(201): Homolog of NCBI NO: 18397500 NR Description: putative guanylate kinase
  misc_feature (156)..(156): Xaa is any aa, unknown or other
  misc_feature (179)..(179): Xaa is any aa, unknown or other
MWTSECSMFRRLLCTSLPRLSKPQSSSSLTILNSSLTQKQKQKPLSPQTIKSFSSSKMGDARRPLFVPIPTLEKAERSDLLRALEASMGSPFSSEPLSPNPNPLIIVISGPSGVGKDTLIARLRDSRRALHFVVTATTRPRRPAEVDGKDYIFVSXEEFLGMVEREELLEYALVYGDYXGVPKQQIRECLAQGCDVVLRVDI

SEQ ID NO: 51596 - protein, 195 aa, Glycine max
  peptide (1)..(195): Ceres Seq. ID no. 12612363
  misc_feature (131)..(194): Pfam Name: Guanylate kinase Pfam Description: Guanylate kinase
  misc_feature (97)..(194): Homolog of NCBI NO: 23109761 NR Description: hypothetical protein [Novosphingobium
  misc_feature (97)..(194): Homolog of NCBI NO: 15673881 NR Description: guanylate kinase (EC 2.7.4.8) [Lactococcus lactis
  misc_feature (97)..(194): Homolog of NCBI NO: 28210904 NR Description: guanylate kinase [Clostridium tetani E88]
  misc_feature (97)..(194): Homolog of NCBI NO: 20807954 NR Description: Guanylate kinase [Thermoanaerobacter
  misc_feature (97)..(194): Homolog of NCBI NO: 15615075 NR Description: guanylate kinase [Bacillus halodurans]
  misc_feature (91)..(194): Homolog of NCBI NO: 22297598 NR Description: guanylate kinase [Thermosynechococcus elongatus
  misc_feature (91)..(194): Homolog of NCBI NO: 37521190 NR Description: guanylate kinase [Gloeobacter violaceus]
  misc_feature (84)..(194): Homolog of NCBI NO: 22969911 NR Description: hypothetical protein [Chloroflexus aurantiacus]
  misc_feature (65)..(194): Homolog of NCBI NO: 6862924 NR Description: putative guanylate kinase [Arabidopsis thaliana]
  misc_feature (36)..(194): Homolog of NCBI NO: 18397500 NR Description: putative guanylate kinase
  misc_feature (149)..(149): Xaa is any aa, unknown or other
  misc_feature (172)..(172): Xaa is any aa, unknown or other
MFRRLLCTSLPRLSKPQSSSSLTILNSSLTQKQKQKPLSPQTIKSFSSSKMGDARRPLFVPIPTLEKAERSDLLRALEASMGSPFSSEPLSPNPNPLIIVISGPSGVGKDTLIARLRDSRRALHFVVTATTRPRRPAEVDGKDYIFVSXEEFLGMVEREELLEYALVYGDYXGVPKQQIRECLAQGCDVVLRVDI

SEQ ID NO: 51597 - protein, 145 aa, Glycine max
  peptide (1)..(145): Ceres Seq. ID no. 12612364
  misc_feature (81)..(144): Pfam Name: Guanylate kinase Pfam Description: Guanylate kinase
  misc_feature (47)..(144): Homolog of NCBI NO: 23109761 NR Description: hypothetical protein [Novosphingobium
  misc_feature (47)..(144): Homolog of NCBI NO: 15673881 NR Description: guanylate kinase (EC 2.7.4.8) [Lactococcus lactis
  misc_feature (47)..(144): Homolog of NCBI NO: 28210904 NR Description: guanylate kinase [Clostridium tetani E88]
  misc_feature (47)..(144): Homolog of NCBI NO: 20807954 NR Description: Guanylate kinase [Thermoanaerobacter
  misc_feature (47)..(144): Homolog of NCBI NO: 15615075 NR Description: guanylate kinase [Bacillus halodurans]
  misc_feature (41)..(144): Homolog of NCBI NO: 22297598 NR Description: guanylate kinase [Thermosynechococcus elongatus
  misc_feature (41)..(144): Homolog of NCBI NO: 37521190 NR Description: guanylate kinase [Gloeobacter violaceus]
  misc_feature (34)..(144): Homolog of NCBI NO: 22969911 NR Description: hypothetical protein [Chloroflexus aurantiacus]
  misc_feature (15)..(144): Homolog of NCBI NO: 6862924 NR Description: putative guanylate kinase [Arabidopsis thaliana]
  misc_feature (1)..(144): Homolog of NCBI NO: 18397500 NR Description: putative guanylate kinase
  misc_feature (99)..(99): Xaa is any aa, unknown or other
  misc_feature (122)..(122): Xaa is any aa, unknown or other
MGDARRPLFVPIPTLEKAERSDLLRALEASMGSPFSSEPLSPNPNPLIIVISGPSGVGKDTLIARLRDSRRALHFVVTATTRPRRPAEVDGKDYIFVSXEEFLGMVEREELLEYALVYGDYXGVPKQQIRECLAQGCDVVLRVDI

SEQ ID NO: 51598 - DNA, 1486 bp, Glycine max
  misc_feature (1)..(1486): Ceres Seq. ID no. 15177361
aaaccgaatatttcaaaacttgttctactttttattatcactgttgcatttatttcagatatttagtatttgcctacaagtttgttctttagtttaaacacagacaagacgactctttatggcggctataaccaatttgaacttttcttccttgtgtaaaaaaaggttttgtgtgcgtttgtgcgtgttggagttggctttttgaagtgggtgcatgctgaagttatatgtgtatgtgaaagatgaagaacaatagagataaagaaaagggtaacgacgttgaccagagttacagacagcatcacacgttgtcaatgccaatgatgttttctggtttgaacagagagaaggagatgtcagccatgatctctgctttgacacatgtggtttgtggagaagatgagcatcatggtgctgattactctcttcttaatcacaatattaataatactaatagtgcagttgttggtgatgatgattttactgtaacatcaaatatggcttctggttctatgccaccttcttctacttgttcatctcaaggtggcaactctgttctcaagagaagacgggaatatgataatacaaatgatttctcacgtggaggttcattccctgctatttcaacaattgctgaaagttcaagcacggtaacaagaagaacggcgaatacagtatacgattacgaatacagaacagagaacgtgaaagtagtggaggaagaaccgaggagaaaatacagaggagtgagacagaggccatggggaaaatgggctgcggaaataagagaccctttcaaagctactagggtgtggttaggaacatttgaaaccgctgaggacgcagccagagcctacgatcaagcttcattgcgtttcagaggcaacaaagccaaactcaacttccctgaaaacgttagactcagacaacaacaagaacctccgttgaacttgaaccctccaccacctaatcatggggctattttgtcaattccttcaaccactgttcacactgaggctcttcagggttcacttggttcaagcaatttttatgagcattcttattcgcatcttcatgagtttcccgtgagtctctacgatcagattgcagagtcaacatctactactatggcttctcatcatcttcaatttttgccgccagcttcttcctcaactatgactatgacatctccgcaggcaccaccttcgatttatcctacgcatccagcggcatggtcttctggttatagttataatagctcttcttctgcttcggggtgatgtaaattgcgttttatttcaagtctctctcgtttttgccccttgtattgtatcattgttactctcctctgttttttgcatttgcaccacgaccatttccatccaggagtggttttttgtgaccatgttattatgatcaagcaaatcatataattcacagttaacagtttagtatctgtgtataatagagttttatttatcctccc

SEQ ID NO: 51599 - protein, 345 aa, Glycine max
  peptide (1)..(345): Ceres Seq. ID no. 15177362
  misc_feature (163)..(227): Pfam Name: AP2 domain Pfam Description: AP2 domain
  misc_feature (159)..(244): Homolog of NCBI NO: 33519168 NR Description: AP2 domain-containing protein AP29
  misc_feature (128)..(251): Homolog of NCBI NO: 15226153 NR Description: AP2 domain transcription factor family
  misc_feature (159)..(245): Homolog of NCBI NO: 38347164 NR Description: OSJNBa0039C07.10 [Oryza sativa (japonica
  misc_feature (159)..(338): Homolog of NCBI NO: 15240604 NR Description: AP2 domain transcription factor family
  misc_feature (160)..(287): Homolog of NCBI NO: 15218275 NR Description: AP2 domain transcription factor RAP2.6
  misc_feature (160)..(287): Homolog of NCBI NO: 2281637 NR Description: AP2 domain containing protein RAP2.6 [Arabidopsis
  misc_feature (161)..(320): Homolog of NCBI NO: 34221731 NR Description: putative AP2 domain transcription factor
  misc_feature (158)..(320): Homolog of NCBI NO: 15240610 NR Description: putative protein; protein id: At5g50080.1
  misc_feature (76)..(263): Homolog of NCBI NO: 34908616 NR Description: P0677H08.8 [Oryza sativa (japonica
  misc_feature (24)..(304): Homolog of NCBI NO: 15238232 NR Description: AP2 domain transcription factor, putative
MKNNRDKEKGNDVDQSYRQHHTLSMPMMFSGLNREKEMSAMISALTHVVCGEDEHHGADYSLLNHNINNTNSAVVGDDDFTVTSNMASGSMPPSSTCSSQGGNSVLKRRREYDNTNDFSRGGSFPAISTIAESSSTVTRRTANTVYDYEYRTENVKVVEEEPRRKYRGVRQRPWGKWAAEIRDPFKATRVWLGTFETAEDAARAYDQASLRFRGNKAKLNFPENVRLRQQQEPPLNLNPPPPNHGAILSIPSTTVHTEALQGSLGSSNFYEHSYSHLHEFPVSLYDQIAESTSTTMASHHLQFLPPASSSTMTMTSPQAPPSIYPTHPAAWSSGYSYNSSSSASG

SEQ ID NO: 51600 - protein, 321 aa, Glycine max
  peptide (1)..(321): Ceres Seq. ID no. 15177363
  misc_feature (139)..(203): Pfam Name: AP2 domain Pfam Description: AP2 domain
  misc_feature (135)..(220): Homolog of NCBI NO: 33519168 NR Description: AP2 domain-containing protein AP29
  misc_feature (104)..(227): Homolog of NCBI NO: 15226153 NR Description: AP2 domain transcription factor family
  misc_feature (135)..(221): Homolog of NCBI NO: 38347164 NR Description: OSJNBa0039C07.10 [Oryza sativa (japonica
  misc_feature (135)..(314): Homolog of NCBI NO: 15240604 NR Description: AP2 domain transcription factor family
  misc_feature (136)..(263): Homolog of NCBI NO: 15218275 NR Description: AP2 domain transcription factor RAP2.6
  misc_feature (136)..(263): Homolog of NCBI NO: 2281637 NR Description: AP2 domain containing protein RAP2.6 [Arabidopsis
  misc_feature (137)..(296): Homolog of NCBI NO: 34221731 NR Description: putative AP2 domain transcription factor
  misc_feature (134)..(296): Homolog of NCBI NO: 15240610 NR Description: putative protein; protein id: At5g50080.1
  misc_feature (52)..(239): Homolog of NCBI NO: 34908616 NR Description: P0677H08.8 [Oryza sativa (japonica
  misc_feature (1)..(280): Homolog of NCBI NO: 15238232 NR Description: AP2 domain transcription factor, putative
MPMMFSGLNREKEMSAMISALTHVVCGEDEHHGADYSLLNHNINNTNSAVVGDDDFTVTSNMASGSMPPSSTCSSQGGNSVLKRRREYDNTNDFSRGGSFPAISTIAESSSTVTRRTANTVYDYEYRTENVKVVEEEPRRKYRGVRQRPWGKWAAEIRDPFKATRVWLGTFETAEDAARAYDQASLRFRGNKAKLNFPENVRLRQQQEPPLNLNPPPPNHGAILSIPSTTVHTEALQGSLGSSNFYEHSYSHLHEFPVSLYDQIAESTSTTMASHHLQFLPPASSSTMTMTSPQAPPSIYPTHPAAWSSGYSYNSSSSASG

SEQ ID NO: 51601 - protein, 319 aa, Glycine max
  peptide (1)..(319): Ceres Seq. ID no. 15177364
  misc_feature (137)..(201): Pfam Name: AP2 domain Pfam Description: AP2 domain
  misc_feature (133)..(218): Homolog of NCBI NO: 33519168 NR Description: AP2 domain-containing protein AP29
  misc_feature (102)..(225): Homolog of NCBI NO: 15226153 NR Description: AP2 domain transcription factor family
  misc_feature (133)..(219): Homolog of NCBI NO: 38347164 NR Description: OSJNBa0039C07.10 [Oryza sativa (japonica
  misc_feature (133)..(312): Homolog of NCBI NO: 15240604 NR Description: AP2 domain transcription factor family
  misc_feature (134)..(261): Homolog of NCBI NO: 15218275 NR Description: AP2 domain transcription factor RAP2.6
  misc_feature (134)..(261): Homolog of NCBI NO: 2281637 NR Description: AP2 domain containing protein RAP2.6 [Arabidopsis
  misc_feature (135)..(294): Homolog of NCBI NO: 34221731 NR Description: putative AP2 domain transcription factor
  misc_feature (132)..(294): Homolog of NCBI NO: 15240610 NR Description: putative protein; protein id: At5g50080.1
  misc_feature (50)..(237): Homolog of NCBI NO: 34908616 NR Description: P0677H08.8 [Oryza sativa (japonica
  misc_feature (1)..(278): Homolog of NCBI NO: 15238232 NR Description: AP2 domain transcription factor, putative
MMFSGLNREKEMSAMISALTHVVCGEDEHHGADYSLLNHNINNTNSAVVGDDDFTVTSNMASGSMPPSSTCSSQGGNSVLKRRREYDNTNDFSRGGSFPAISTIAESSSTVTRRTANTVYDYEYRTENVKVVEEEPRRKYRGVRQRPWGKWAAEIRDPFKATRVWLGTFETAEDAARAYDQASLRFRGNKAKLNFPENVRLRQQQEPPLNLNPPPPNHGAILSIPSTTVHTEALQGSLGSSNFYEHSYSHLHEFPVSLYDQIAESTSTTMASHHLQFLPPASSSTMTMTSPQAPPSIYPTHPAAWSSGYSYNSSSSASG

SEQ ID NO: 51602 - DNA, 1573 bp, Glycine max
  misc_feature (1)..(1573): Ceres Seq. ID no. 15171450
acatcctaatcgaaaaaaaaacttgttaacgattttcaactcatgccggctaatttttgctcacaacactctctgcacgtccattcatcacccttaactcaacaaagtcacctttttttgcttcaaagaaaacccagaaggcatatccccttttgtccactttggaccactccataaagttgcaaactcaacatcttgctaccctttattaataattcaaaacaaaaccctctttatggcattctttttatttcactcttagatgcttctttgttaggtttgaatcaatcaaattgactggcctgctgctaacttttttttggccccatttataccctctgctgtaccctcttgtttctcttatcaaacccccattttctcttttctcttttttttgccttctggggggttccaaattccatagtttcctcagaggttgaatgaaatggcagttgatctttgctcagaaaactgtgtggctgcttcctcttcctcttcttctgtgagtccaagaatctcattctcacatgacttctcccaatctgatgtcatccctgttgagcaactcccttttagatcaaactcttctggcttgaatcccaccattgattttgatttttgtgtcagtgagagttttgagcttgagtcatcttcagccgatgagcttttctcacatgggaggatccttcccactgaggtcaagagaaagaataatgctgttccacctatgaagcaattagcaccaaagagtacttctccattgcctcctccttatgctgctcctaacggtgtctccactagtaaaaacttgaagaaagagattaaccccaaagaaagcaagtgtttgaatgatgaagtgtatgagaagcaaagttcaaagtcttccttttggatcttcaagagaagtagtagttgtggaagtggacctagaaggagcttttgtcctttgccacttctatctagaagcaattcaactggatcatcaaccccaagtgttaagaggagtcatcctctttcaaaggagggtactgttaacaacaatattaaacagaaacattcttccacaaggttgatgccaaacggttatcttcatcatcatcatcatcaaaagcctccattgaattacaagagtactcatcatggatcttatggtaacagtgttagagtcaatcctgtcctcaatgttccacctgcaaacctatttggtttggcttcaatcttctccaacaatagagacaagagcaagaagtagttttagtttacttgcaaaccggtggggtctatcttcttttttccatgtacttcttaggtttacaattgccatgtgaactagcaaaattgaggtatagcctataggtaaaattttgaaaggtaaatggtttgcatcatgaagacaaattggtacaaagagatgtatgtgaaggtgatggacacgaatgatacaatgcaagcacatgttttggggcacaaaatgactggtaactgttgttttcgtggctgtaccttgcctgttttttgttcctctgcttttgttctttggactatgtgtaaatacattgactttgattgctgc

SEQ ID NO: 51603 - protein, 268 aa, Glycine max
  peptide (1)..(268): Ceres Seq. ID no. 15171451
  misc_feature (1)..(249): Homolog of NCBI NO: 30697661 NR Description: expressed protein [Arabidopsis thaliana]
  misc_feature (1)..(249): Homolog of NCBI NO: 25404728 NR Description: hypothetical protein T22E19.4 [imported] -
  misc_feature (1)..(268): Homolog of NCBI NO: 18408679 NR Description: expressed protein [Arabidopsis thaliana]
MAVDLCSENCVAASSSSSSVSPRISFSHDFSQSDVIPVEQLPFRSNSSGLNPTIDFDFCVSESFELESSSADELFSHGRILPTEVKRKNNAVPPMKQLAPKSTSPLPPPYAAPNGVSTSKNLKKEINPKESKCLNDEVYEKQSSKSSFWIFKRSSSCGSGPRRSFCPLPLLSRSNSTGSSTPSVKRSHPLSKEGTVNNNIKQKHSSTRLMPNGYLHHHHHQKPPLNYKSTHHGSYGNSVRVNPVLNVPPANLFGLASIFSNNRDKSKK

SEQ ID NO: 51604 - protein, 174 aa, Glycine max
  peptide (1)..(174): Ceres Seq. ID no. 15171452
  misc_feature (1)..(155): Homolog of NCBI NO: 30697661 NR Description: expressed protein [Arabidopsis thaliana]
  misc_feature (1)..(155): Homolog of NCBI NO: 25404728 NR Description: hypothetical protein T22E19.4 [imported] -
  misc_feature (1)..(174): Homolog of NCBI NO: 18408679 NR Description: expressed protein [Arabidopsis thaliana]
MKQLAPKSTSPLPPPYAAPNGVSTSKNLKKEINPKESKCLNDEVYEKQSSKSSFWIFKRSSSCGSGPRRSFCPLPLLSRSNSTGSSTPSVKRSHPLSKEGTVNNNIKQKHSSTRLMPNGYLHHHHHQKPPLNYKSTHHGSYGNSVRVNPVLNVPPANLFGLASIFSNNRDKSKK

SEQ ID NO: 51605 - DNA, 1382 bp, Glycine max
  misc_feature (1)..(1382): Ceres Seq. ID no. 14311934
atttttaaaacatatgtgtcccctcatccaagctgtgtctcccttctctctcttatattaatcactcactcacacattcgccacttccacacagcatagatcacctttccttttttcccacagaaaaaaacaccacctttctttttccgactaaaggttcgccggaaaatgcctctatcctcctcttcctcctccgccgtagactccgccgtctccggcgagatcatgctctttggcgttagagtcgtggtggactccatgcggaagagtgtgagtatgaacaacctctcgcagtacgagcttcctcgcgacgctgccaacgccaaagacgacgccgcaggatacgcctccgccgatgatgcagctccgatcaactccgacaagaaccgcgaccgcaagcgagggattccatggactaaggaagagcacaagctattcttggtggggttgcagaaagtggggaaaggtgattggagagggatctcaaggaactatgtcaaaacgaggacgccaacacaggttgctagccatgctcagaagtactttctccgccgcaccaacctcaatcgccgtcgccggagatccagcctctttgacatcaccaccgactcggtctctacaacccctatggaggaaggagtacagatccagcatcaagataatgtgtctctctttcatccagtgtaccctgtaacccctgaaggaagcaacatgaatggatttccaaagatgtccatgtatccaaaggatgttggttctggagtcatgtcagttcaagctgggaatccaatggaaacactcactttgggacaaggaaatgtggaacagaatgggccaagtactaagctagtttgtacaacccctattgttccagatcatagaggctccacagtgtctgatatcactgcaagtttgagttccattgatccaccaacactgtctctggggttatctttgtcatccagtccaagacaaacatcatcatcaatacatgcagctttacatgcactgccatacttcaacaatcaagatagcatcataagtgctgcttgaaaaagataaacatatatctgtggcccattatctatagctactttggattcacagagatgtttatcactaatctactttctctttttggcgggagaaatataaaacatgttaaaggaaaagatgatgaattagatccttctgaaggcaaggtaataagtcatgagaccaatttgatccttctgttccttgtacagaccatggaaaggtcctgtcatgtttttgtttattgtttattggccacttttatgtttgtagttactataactgaaaataaccaagtacttcctgttaatttttaatgaatataaatctggactatatcaaagcat

SEQ ID NO: 51606 - protein, 294 aa, Glycine max
  peptide (1)..(294): Ceres Seq. ID no. 14311935
  misc_feature (79)..(126): Pfam Name: Myb-like DNA-binding domain Pfam Description: Myb-like DNA-binding domain
  misc_feature (19)..(178): Homolog of NCBI NO: 24850307 NR Description: transcription factor MYBS3
  misc_feature (19)..(174): Homolog of NCBI NO: 37536856 NR Description: putative Myb-related protein
  misc_feature (19)..(166): Homolog of NCBI NO: 15238083 NR Description: Myb-related transcription activator-like
  misc_feature (1)..(177): Homolog of NCBI NO: 15222521 NR Description: DNA binding protein MybSt1 -related [Arabidopsis
  misc_feature (1)..(64): Homolog of NCBI NO: 21593684 NR Description: Myb-related transcription activator, putative
  misc_feature (56)..(156): Homolog of NCBI NO: 21593684 NR Description: Myb-related transcription activator, putative
  misc_feature (1)..(64): Homolog of NCBI NO: 15221922 NR Description: myb family transcription factor [Arabidopsis
  misc_feature (56)..(156): Homolog of NCBI NO: 15221922 NR Description: myb family transcription factor [Arabidopsis
  misc_feature (4)..(193): Homolog of NCBI NO: 15221408 NR Description: myb family transcription factor [Arabidopsis
  misc_feature (3)..(294): Homolog of NCBI NO: 28629811 NR Description: transcription factor Myb1 [Malus xiaojinensis]
MPLSSSSSSAVDSAVSGEIMLFGVRVVVDSMRKSVSMNNLSQYELPRDAANAKDDAAGYASADDAAPINSDKNRDRKRGIPWTKEEHKLFLVGLQKVGKGDWRGISRNYVKTRTPTQVASHAQKYFLRRTNLNRRRRRSSLFDITTDSVSTTPMEEGVQIQHQDNVSLFHPVYPVTPEGSNMNGFPKMSMYPKDVGSGVMSVQAGNPMETLTLGQGNVEQNGPSTKLVCTTPIVPDHRGSTVSDITASLSSIDPPTLSLGLSLSSSPRQTSSSIHAALHALPYFNNQDSIISAA

SEQ ID NO: 51607 - protein, 275 aa, Glycine max
  peptide (1)..(275): Ceres Seq. ID no. 14311936
  misc_feature (60)..(107): Pfam Name: Myb-like DNA-binding domain Pfam Description: Myb-like DNA-binding domain
  misc_feature (1)..(159): Homolog of NCBI NO: 24850307 NR Description: transcription factor MYBS3
  misc_feature (1)..(155): Homolog of NCBI NO: 37536856 NR Description: putative Myb-related protein
  misc_feature (1)..(147): Homolog of NCBI NO: 15238083 NR Description: Myb-related transcription activator-like
  misc_feature (1)..(158): Homolog of NCBI NO: 15222521 NR Description: DNA binding protein MybSt1 -related [Arabidopsis
  misc_feature (1)..(45): Homolog of NCBI NO: 21593684 NR Description: Myb-related transcription activator, putative
  misc_feature (37)..(137): Homolog of NCBI NO: 21593684 NR Description: Myb-related transcription activator, putative
  misc_feature (1)..(45): Homolog of NCBI NO: 15221922 NR Description: myb family transcription factor [Arabidopsis
  misc_feature (37)..(137): Homolog of NCBI NO: 15221922 NR Description: myb family transcription factor [Arabidopsis
  misc_feature (1)..(174): Homolog of NCBI NO: 15221408 NR Description: myb family transcription factor [Arabidopsis
  misc_feature (1)..(275): Homolog of NCBI NO: 28629811 NR Description: transcription factor Myb1 [Malus xiaojinensis]
MLFGVRVVVDSMRKSVSMNNLSQYELPRDAANAKDDAAGYASADDAAPINSDKNRDRKRGIPWTKEEHKLFLVGLQKVGKGDWRGISRNYVKTRTPTQVASHAQKYFLRRTNLNRRRRRSSLFDITTDSVSTTPMEEGVQIQHQDNVSLFHPVYPVTPEGSNMNGFPKMSMYPKDVGSGVMSVQAGNPMETLTLGQGNVEQNGPSTKLVCTTPIVPDHRGSTVSDITASLSSIDPPTLSLGLSLSSSPRQTSSSIHAALHALPYFNNQDSIISAA

SEQ ID NO: 51608 - protein, 264 aa, Glycine max
  peptide (1)..(264): Ceres Seq. ID no. 14311937
  misc_feature (49)..(96): Pfam Name: Myb-like DNA-binding domain Pfam Description: Myb-like DNA-binding domain
  misc_feature (1)..(148): Homolog of NCBI NO: 24850307 NR Description: transcription factor MYBS3
  misc_feature (1)..(144): Homolog of NCBI NO: 37536856 NR Description: putative Myb-related protein
  misc_feature (1)..(136): Homolog of NCBI NO: 15238083 NR Description: Myb-related transcription activator-like
  misc_feature (1)..(147): Homolog of NCBI NO: 15222521 NR Description: DNA binding protein MybSt1 -related [Arabidopsis
  misc_feature (1)..(34): Homolog of NCBI NO: 21593684 NR Description: Myb-related transcription activator, putative
  misc_feature (26)..(126): Homolog of NCBI NO: 21593684 NR Description: Myb-related transcription activator, putative
  misc_feature (1)..(34): Homolog of NCBI NO: 15221922 NR Description: myb family transcription factor [Arabidopsis
  misc_feature (26)..(126): Homolog of NCBI NO: 15221922 NR Description: myb family transcription factor [Arabidopsis
  misc_feature (1)..(163): Homolog of NCBI NO: 15221408 NR Description: myb family transcription factor [Arabidopsis
  misc_feature (1)..(264): Homolog of NCBI NO: 28629811 NR Description: transcription factor Myb1 [Malus xiaojinensis]
MRKSVSMNNLSQYELPRDAANAKDDAAGYASADDAAPINSDKNRDRKRGIPWTKEEHKLFLVGLQKVGKGDWRGISRNYVKTRTPTQVASHAQKYFLRRTNLNRRRRRSSLFDITTDSVSTTPMEEGVQIQHQDNVSLFHPVYPVTPEGSNMNGFPKMSMYPKDVGSGVMSVQAGNPMETLTLGQGNVEQNGPSTKLVCTTPIVPDHRGSTVSDITASLSSIDPPTLSLGLSLSSSPRQTSSSIHAALHALPYFNNQDSIISAA

SEQ ID NO: 51609 - DNA, 1259 bp, Glycine max
  misc_feature (1)..(1259): Ceres Seq. ID no. 14311912
ataaaatctcattgtctccgaactcttctttcctcgtactccatcatttccttgttcttcttccttctcttcattctgtctctacccttcaacgcaactttctttcttttctattgagcttccaatattctcacgccttgcaatcgtagttgcaccctccaaactccttcccttttctttcatctaaaccagaaaccttttttccctcaaagagaggaatagagattaacaatcgtggatactgtgatatggttagttgtagagagagaactacaatttttgagaaatataattagggtgcgtgacaaacaatcgtggttcaggtacttgcagtaagagaacatattgtaaaactaaaagggaaaaatggccttagatcactttgaggagactgtgcaccaaaaaggaaattggaaatcttccagtgaaatcattgcagattctgatagaaatgcctctggtgactttgactgcaacatctgcctggagtgtgtgcaagatccagtggtgacactttgtggtcatctttattgctggccctgcatatacaaatggcttcattttcaaagcacctctttggatgatgaagaacaacagaggccacaatgtcctgtatgcaaatcagaagtttctcaatcctcccttgttccattatacggccgtggccaaaccacattaccttctaaagggaagccacgtcaagtaggcactgtcataccacaaagacctcatggtccaagaacacttaacactagaagtgtttcacaacctatttctcaaagttaccatccctatagtaatccttatcatcctcaacaacacttcaactcgattccaagcggttacacctcacctatgattagaacaactggttcaatagacaacacatttggaatctttggtgagatgatatatgcaagggtctttggtaaccacgtgtcaaacattcatacatacgccaattcgtacaatctttcggggaccagtaacccaaggatgagaagacatttaatgcaagttgataaatcactcagcagaataagttgtttcctcctttgctgcctagttttgtgtctgctcttattctgattgctacttcattttcatcattagttatagtgcatccttacatagaatacattcactcattgatccagatgtattctatgttagagaagctgcaaattgatgctgagttatgtgtaaattaccaatctctctacgagctatatgaagtgaataatgatattctcataccg

SEQ ID NO: 51610 - protein, 240 aa, Glycine max
  peptide (1)..(240): Ceres Seq. ID no. 14311913
  misc_feature (36)..(84): Pfam Name: Zinc finger, C3HC4 type (RING finger) Pfam Description: Zinc finger, C3HC4 type (RING finger)
  misc_feature (25)..(125): Homolog of NCBI NO: 18394721 NR Description: zinc finger (C3HC4-type RING finger) protein
  misc_feature (25)..(238): Homolog of NCBI NO: 21553849 NR Description: putative RING zinc finger protein [Arabidopsis
  misc_feature (18)..(238): Homolog of NCBI NO: 15224062 NR Description: zinc finger (C3HC4-type RING finger) protein
  misc_feature (34)..(240): Homolog of NCBI NO: 38346627 NR Description: OSJNBa0074L08.21 [Oryza sativa (japonica
  misc_feature (29)..(231): Homolog of NCBI NO: 7488309 NR Description: RING zinc finger protein F27G19.70 - Arabidopsis
  misc_feature (172)..(240): Homolog of NCBI NO: 15235242 NR Description: zinc finger (C3HC4-type RING finger) protein
  misc_feature (29)..(138): Homolog of NCBI NO: 15235242 NR Description: zinc finger (C3HC4-type RING finger) protein
  misc_feature (29)..(240): Homolog of NCBI NO: 30687607 NR Description: zinc finger (C3HC4-type RING finger) protein
  misc_feature (26)..(240): Homolog of NCBI NO: 15236326 NR Description: E3 ubiquitin ligase, RMA1 [Arabidopsis thaliana]
  misc_feature (6)..(240): Homolog of NCBI NO: 22795037 NR Description: putative RING protein [Populus x canescens]
MALDHFEETVHQKGNWKSSSEIIADSDRNASGDFDCNICLECVQDPVVTLCGHLYCWPCIYKWLHFQSTSLDDEEQQRPQCPVCKSEVSQSSLVPLYGRGQTTLPSKGKPRQVGTVIPQRPHGPRTLNTRSVSQPISQSYHPYSNPYHPQQHFNSIPSGYTSPMIRTTGSIDNTFGIFGEMIYARVFGNHVSNIHTYANSYNLSGTSNPRMRRHLMQVDKSLSRISCFLLCCLVLCLLLF

SEQ ID NO: 51611 - DNA, 1246 bp, Glycine max
  misc_feature (1)..(1246): Ceres Seq. ID no. 14311878
ttactccattcgtccttttccttttatttacaccacatagccccaccctcaccctcttacagaatgggaaggactccggtcaggtttgagagggtagcggcggcctttgacgctgacgtggcgcgtgtgaggctctgcaatagcagcgagaatgagcagcactcgccggaggactcggctgatttgtcagatctggtgaaatcgttcatggagagagggggagagggagaagatgcggttggtgttcgttcggatgatggggttgagaattttgattctgagaagagggagattttggagggaatatttgatgatgacgacggggatgccaaagaaaagattagaagagaagttcaacttgcatgggggcttgttgccgaaaaggataactcatcaccccaattcaaacaacagttgatgtctctcctacggtacagaggttttgatgctgggctctgcaaatgcaagtgggaaaaaaatacaagattcccagctggtgactatgagtacatcgacgtaaattttgcaggaaatcgctacattgttgaaatttcccttgtcacagaattcgaaatagctcgttccacagaccaatatgccgcgttacttgatgttttccctctaatatttgttggtaaaatggaagaactcaagcaggttgtgaggctaatgtgcactgctattaagggttctatgaaaagcatgaatatgtatatacctccgtggagaagaattgggtacatgcaagctaagtggtttagttcttacaaaagaataacggacgaggttgcaactaacagggcatcatcagcttttttcactacaaggtccattggatttgatgcaaggccagtgaaatcctacaattgcagggatgattatgggactaaacctgcattcagagtttgccatttgactactgcattttatgtggacagccctgggatgcaattatagtcaaatgctgcggcatgtgcattcatctaattgctttttggtgaattaatggtgttgataaatgagtgagtggaagtgccttagctcgggcataaaaagcgcttaagcaaagattttggtgcagtgttctggcggaattttgtttttattactagggatagtatcatagcaaggatgattggtaggagataataattagtgaaatcaatgtaaagtagataattggttggttggttgctccaaaatgtaatttctcttcaaattatatatattagtgatggttgtgttt

SEQ ID NO: 51612 - protein, 318 aa, Glycine max
  peptide (1)..(318): Ceres Seq. ID no. 14311879
  misc_feature (62)..(258): Pfam Name: Protein of unknown function (DUF506) Pfam Description: Protein of unknown function (DUF506)
  misc_feature (125)..(265): Homolog of NCBI NO: 28058790 NR Description: unknown protein [Arabidopsis thaliana]
  misc_feature (57)..(281): Homolog of NCBI NO: 18397919 NR Description: expressed protein [Arabidopsis thaliana]
  misc_feature (148)..(259): Homolog of NCBI NO: 18404867 NR Description: expressed protein [Arabidopsis thaliana]
  misc_feature (147)..(259): Homolog of NCBI NO: 25408622 NR Description: hypothetical protein At2g38820 [imported] -
  misc_feature (28)..(281): Homolog of NCBI NO: 15230824 NR Description: hypothetical protein [Arabidopsis thaliana]
  misc_feature (54)..(271): Homolog of NCBI NO: 34906052 NR Description: P0698H10.19 [Oryza sativa (japonica
  misc_feature (16)..(271): Homolog of NCBI NO: 30682929 NR Description: expressed protein [Arabidopsis thaliana]
  misc_feature (28)..(286): Homolog of NCBI NO: 15220778 NR Description: expressed protein [Arabidopsis thaliana]
  misc_feature (28)..(286): Homolog of NCBI NO: 7486102 NR Description: hypothetical protein F24O1.16 - Arabidopsis
  misc_feature (28)..(318): Homolog of NCBI NO: 15221175 NR Description: hypothetical protein [Arabidopsis thaliana]
LLHSSFSFYLHHIAPPSPSYRMGRTPVRFERVAAAFDADVARVRLCNSSENEQHSPEDSADLSDLVKSFMERGGEGEDAVGVRSDDGVENFDSEKREILEGIFDDDDGDAKEKIRREVQLAWGLVAEKDNSSPQFKQQLMSLLRYRGFDAGLCKCKWEKNTRFPAGDYEYIDVNFAGNRYIVEISLVTEFEIARSTDQYAALLDVFPLIFVGKMEELKQVVRLMCTAIKGSMKSMNMYIPPWRRIGYMQAKWFSSYKRITDEVATNRASSAFFTTRSIGFDARPVKSYNCRDDYGTKPAFRVCHLTTAFYVDSPGMQL

SEQ ID NO: 51613 - protein, 297 aa, Glycine max
  peptide (1)..(297): Ceres Seq. ID no. 14311880
  misc_feature (41)..(237): Pfam Name: Protein of unknown function (DUF506) Pfam Description: Protein of unknown function (DUF506)
  misc_feature (104)..(244): Homolog of NCBI NO: 28058790 NR Description: unknown protein [Arabidopsis thaliana]
  misc_feature (36)..(260): Homolog of NCBI NO: 18397919 NR Description: expressed protein [Arabidopsis thaliana]
  misc_feature (127)..(238): Homolog of NCBI NO: 18404867 NR Description: expressed protein [Arabidopsis thaliana]
  misc_feature (126)..(238): Homolog of NCBI NO: 25408622 NR Description: hypothetical protein At2g38820 [imported] -
  misc_feature (7)..(260): Homolog of NCBI NO: 15230824 NR Description: hypothetical protein [Arabidopsis thaliana]
  misc_feature (33)..(250): Homolog of NCBI NO: 34906052 NR Description: P0698H10.19 [Oryza sativa (japonica
  misc_feature (1)..(250): Homolog of NCBI NO: 30682929 NR Description: expressed protein [Arabidopsis thaliana]
  misc_feature (7)..(265): Homolog of NCBI NO: 15220778 NR Description: expressed protein [Arabidopsis thaliana]
  misc_feature (7)..(265): Homolog of NCBI NO: 7486102 NR Description: hypothetical protein F24O1.16 - Arabidopsis
  misc_feature (7)..(297): Homolog of NCBI NO: 15221175 NR Description: hypothetical protein [Arabidopsis thaliana]
MGRTPVRFERVAAAFDADVARVRLCNSSENEQHSPEDSADLSDLVKSFMERGGEGEDAVGVRSDDGVENFDSEKREILEGIFDDDDGDAKEKIRREVQLAWGLVAEKDNSSPQFKQQLMSLLRYRGFDAGLCKCKWEKNTRFPAGDYEYIDVNFAGNRYIVEISLVTEFEIARSTDQYAALLDVFPLIFVGKMEELKQVVRLMCTAIKGSMKSMNMYIPPWRRIGYMQAKWFSSYKRITDEVATNRASSAFFTTRSIGFDARPVKSYNCRDDYGTKPAFRVCHLTTAFYVDSPGMQL

SEQ ID NO: 51614 - protein, 249 aa, Glycine max
  peptide (1)..(249): Ceres Seq. ID no. 14311881
  misc_feature (1)..(189): Pfam Name: Protein of unknown function (DUF506) Pfam Description: Protein of unknown function (DUF506)
  misc_feature (56)..(196): Homolog of NCBI NO: 28058790 NR Description: unknown protein [Arabidopsis thaliana]
  misc_feature (1)..(212): Homolog of NCBI NO: 18397919 NR Description: expressed protein [Arabidopsis thaliana]
  misc_feature (79)..(190): Homolog of NCBI NO: 18404867 NR Description: expressed protein [Arabidopsis thaliana]
  misc_feature (78)..(190): Homolog of NCBI NO: 25408622 NR Description: hypothetical protein At2g38820 [imported] -
  misc_feature (1)..(212): Homolog of NCBI NO: 15230824 NR Description: hypothetical protein [Arabidopsis thaliana]
  misc_feature (1)..(202): Homolog of NCBI NO: 34906052 NR Description: P0698H10.19 [Oryza sativa (japonica
  misc_feature (1)..(202): Homolog of NCBI NO: 30682929 NR Description: expressed protein [Arabidopsis thaliana]
  misc_feature (1)..(217): Homolog of NCBI NO: 15220778 NR Description: expressed protein [Arabidopsis thaliana]
  misc_feature (1)..(217): Homolog of NCBI NO: 7486102 NR Description: hypothetical protein F24O1.16 - Arabidopsis
  misc_feature (1)..(249): Homolog of NCBI NO: 15221175 NR Description: hypothetical protein [Arabidopsis thaliana]
MERGGEGEDAVGVRSDDGVENFDSEKREILEGIFDDDDGDAKEKIRREVQLAWGLVAEKDNSSPQFKQQLMSLLRYRGFDAGLCKCKWEKNTRFPAGDYEYIDVNFAGNRYIVEISLVTEFEIARSTDQYAALLDVFPLIFVGKMEELKQVVRLMCTAIKGSMKSMNMYIPPWRRIGYMQAKWFSSYKRITDEVATNRASSAFFTTRSIGFDARPVKSYNCRDDYGTKPAFRVCHLTTAFYVDSPGMQL

SEQ ID NO: 51615 - DNA, 1493 bp, Glycine max
  misc_feature (1)..(1493): Ceres Seq. ID no. 14311938
gtccttcctttttctctccctcactcatccgttccgttggttcagaatattcatcaccatcgggcccagcaccaaaccccttcccctctcccccaaattagggtttctctctgggaatgtgattcagcgcgcggcagcatcaatggcggagaagagattcggcgtgatagggtacgctctggcgccgaagaagcagaacagcttcatccgcgactcgctggtgagcctagcgaaatcgcgagggattgagctcgtgcgcgtggactccgacaagcccctcgcggatcagggccccttcgactgcgtcctccacaagctctacggcgacgactggaagcgccagctccaggaattccacaccctctacccaaacgccgtcatcctcgacgcccccgaggcgatcgagcgcctccacaaccgaatctcgatgctgcaggtcgtgtcggagctccgaattgaggaccgacccgagacctttgggatccccaagcagattgtgatatacgacaaggccaccctcctggacccgcaggcctgggagagcctcaagtttcccgtgatagcgaagcctctcgttgccgacggcagcgccaagtcgcacaagatggcgctcgtgttcacgcgcgacgcactgaacaagctcaagccgccgatcgtgctgcaggagttcgtgaaccacggtggcgtgatcttcaaggtgtacgtggtgggcgagcacgtgcgctgcgtgaagcgcaagtccctccccgacgtgtccgacgaggagaaggcgctcggcggcgtttccgaggacctgatgtcgttctcgcaggtctccaacctcgccaccgtgaacgactgcgacggctattaccgtttgatgcatctcgacgacgacaccgaaatgccccccgacgccttcgtcgtcgacatcgctgggggcctcaggcgcgccctcaagctcaacctcttcaatttcgatgtcataagagacgctcgatacgggaaccgttatcttatcattgatatcaactatttccctgggtacgccaaaatgcccggctacgaggccgttttgacccagtttttctgcgaagtaatgctcaagaagaaacagcaagaggaacaacagcaagaagagggtaacgctcctaaggagaaagaggaatctcttcaagcttgagataattttgtcacacagatgttgttctgtcggtgtcggtgtttggtggtttttgggtaacccgaatttccccagtggacccattggttggcacgagttgcaaatttcgatttagggtgcagttggtacagtagggttgtttgtggctagttttttttaaccctcttcaacaacatgtatattcctttcaccattgctctctggagataggtaccttttcaaataccctcaacatttaggaaagttgtattttgcggcttaagattaccaagctagaaactgtttactttgtgttttttttactcaataacttcatttttcccattttgcc

SEQ ID NO: 51616 - protein, 386 aa, Glycine max
  peptide (1)..(386): Ceres Seq. ID no. 14311939
  misc_feature (50)..(358): Pfam Name: Inositol 1, 3, 4-trisphosphate 5/6-kinase Pfam Description: Inositol 1, 3, 4-trisphosphate 5/6-kinase
  misc_feature (55)..(186): Homolog of NCBI NO: 30689810 NR Description: expressed protein [Arabidopsis thaliana]
  misc_feature (183)..(365): Homolog of NCBI NO: 30689810 NR Description: expressed protein [Arabidopsis thaliana]
  misc_feature (55)..(363): Homolog of NCBI NO: 27311236 NR Description: Putative inositol 1,3,4-trisphosphate 5/6-kinase
  misc_feature (51)..(341): Homolog of NCBI NO: 7487925 NR Description: inositol 1,3,4-trisphosphate 5/6-kinase homolog
  misc_feature (27)..(363): Homolog of NCBI NO: 37530372 NR Description: putative inositol 1,3,4-trisphosphate 5/6-kinase
  misc_feature (51)..(369): Homolog of NCBI NO: 18413088 NR Description: inositol 1,3,4-trisphosphate 5/6-kinase-related
  misc_feature (50)..(363): Homolog of NCBI NO: 7487924 NR Description: inositol 1,3,4-trisphosphate 5/6-kinase (EC
  misc_feature (50)..(363): Homolog of NCBI NO: 15237403 NR Description: Inositol 1,3,4-Trisphosphate 5/6 kinase
  misc_feature (50)..(362): Homolog of NCBI NO: 37537118 NR Description: putative inositol 1,3,4-trisphosphate 5/6-kinase
  misc_feature (55)..(374): Homolog of NCBI NO: 27549256 NR Description: inositol phosphate kinase [Zea mays]
SFLFLSLTHPFRWFRIFITIGPSTKPLPLSPKLGFLSGNVIQRAAASMAEKRFGVIGYALAPKKQNSFIRDSLVSLAKSRGIELVRVDSDKPLADQGPFDCVLHKLYGDDWKRQLQEFHTLYPNAVILDAPEAIERLHNRISMLQVVSELRIEDRPETFGIPKQIVIYDKATLLDPQAWESLKFPVIAKPLVADGSAKSHKMALVFTRDALNKLKPPIVLQEFVNHGGVIFKVYVVGEHVRCVKRKSLPDVSDEEKALGGVSEDLMSFSQVSNLATVNDCDGYYRLMHLDDDTEMPPDAFVVDIAGGLRRALKLNLFNFDVIRDARYGNRYLIIDINYFPGYAKMPGYEAVLTQFFCEVMLKKKQQEEQQQEEGNAPKEKEESLQA

SEQ ID NO: 51617 - protein, 339 aa, Glycine max
  peptide (1)..(339): Ceres Seq. ID no. 14311940
  misc_feature (3)..(311): Pfam Name: Inositol 1, 3, 4-trisphosphate 5/6-kinase Pfam Description: Inositol 1, 3, 4-trisphosphate 5/6-kinase
  misc_feature (8)..(139): Homolog of NCBI NO: 30689810 NR Description: expressed protein [Arabidopsis thaliana]
  misc_feature (136)..(318): Homolog of NCBI NO: 30689810 NR Description: expressed protein [Arabidopsis thaliana]
  misc_feature (8)..(316): Homolog of NCBI NO: 27311236 NR Description: Putative inositol 1,3,4-trisphosphate 5/6-kinase
  misc_feature (4)..(294): Homolog of NCBI NO: 7487925 NR Description: inositol 1,3,4-trisphosphate 5/6-kinase homolog
  misc_feature (1)..(316): Homolog of NCBI NO: 37530372 NR Description: putative inositol 1,3,4-trisphosphate 5/6-kinase
  misc_feature (4)..(322): Homolog of NCBI NO: 18413088 NR Description: inositol 1,3,4-trisphosphate 5/6-kinase-related
  misc_feature (3)..(316): Homolog of NCBI NO: 7487924 NR Description: inositol 1,3,4-trisphosphate 5/6-kinase (EC
  misc_feature (3)..(316): Homolog of NCBI NO: 15237403 NR Description: Inositol 1,3,4-Trisphosphate 5/6 kinase
  misc_feature (3)..(315): Homolog of NCBI NO: 37537118 NR Description: putative inositol 1,3,4-trisphosphate 5/6-kinase
  misc_feature (8)..(327): Homolog of NCBI NO: 27549256 NR Description: inositol phosphate kinase [Zea mays]
MAEKRFGVIGYALAPKKQNSFIRDSLVSLAKSRGIELVRVDSDKPLADQGPFDCVLHKLYGDDWKRQLQEFHTLYPNAVILDAPEAIERLHNRISMLQVVSELRIEDRPETFGIPKQIVIYDKATLLDPQAWESLKFPVIAKPLVADGSAKSHKMALVFTRDALNKLKPPIVLQEFVNHGGVIFKVYVVGEHVRCVKRKSLPDVSDEEKALGGVSEDLMSFSQVSNLATVNDCDGYYRLMHLDDDTEMPPDAFVVDIAGGLRRALKLNLFNFDVIRDARYGNRYLIIDINYFPGYAKMPGYEAVLTQFFCEVMLKKKQQEEQQQEEGNAPKEKEESLQA

SEQ ID NO: 51618 - protein, 244 aa, Glycine max
  peptide (1)..(244): Ceres Seq. ID no. 14311941
  misc_feature (1)..(216): Pfam Name: Inositol 1, 3, 4-trisphosphate 5/6-kinase Pfam Description: Inositol 1, 3, 4-trisphosphate 5/6-kinase
  misc_feature (1)..(44): Homolog of NCBI NO: 30689810 NR Description: expressed protein [Arabidopsis thaliana]
  misc_feature (41)..(223): Homolog of NCBI NO: 30689810 NR Description: expressed protein [Arabidopsis thaliana]
  misc_feature (1)..(221): Homolog of NCBI NO: 27311236 NR Description: Putative inositol 1,3,4-trisphosphate 5/6-kinase
  misc_feature (1)..(199): Homolog of NCBI NO: 7487925 NR Description: inositol 1,3,4-trisphosphate 5/6-kinase homolog
  misc_feature (1)..(221): Homolog of NCBI NO: 37530372 NR Description: putative inositol 1,3,4-trisphosphate 5/6-kinase
  misc_feature (1)..(227): Homolog of NCBI NO: 18413088 NR Description: inositol 1,3,4-trisphosphate 5/6-kinase-related
  misc_feature (1)..(221): Homolog of NCBI NO: 7487924 NR Description: inositol 1,3,4-trisphosphate 5/6-kinase (EC
  misc_feature (1)..(221): Homolog of NCBI NO: 15237403 NR Description: Inositol 1,3,4-Trisphosphate 5/6 kinase
  misc_feature (1)..(220): Homolog of NCBI NO: 37537118 NR Description: putative inositol 1,3,4-trisphosphate 5/6-kinase
  misc_feature (1)..(232): Homolog of NCBI NO: 27549256 NR Description: inositol phosphate kinase [Zea mays]
MLQVVSELRIEDRPETFGIPKQIVIYDKATLLDPQAWESLKFPVIAKPLVADGSAKSHKMALVFTRDALNKLKPPIVLQEFVNHGGVIFKVYVVGEHVRCVKRKSLPDVSDEEKALGGVSEDLMSFSQVSNLATVNDCDGYYRLMHLDDDTEMPPDAFVVDIAGGLRRALKLNLFNFDVIRDARYGNRYLIIDINYFPGYAKMPGYEAVLTQFFCEVMLKKKQQEEQQQEEGNAPKEKEESLQA

SEQ ID NO: 51619 - DNA, 1427 bp, Glycine max
  misc_feature (1)..(1427): Ceres Seq. ID no. 14311543
aaccctctttggcgtggctaacaaaacgacgttttgagtaacgcggcagcgtgtgccgggagtgtcgtttaatcgcccgccaagacattttcctttttcatttcatcgctgagtccctaaagtgcagtgaaatggtccttcttcacctcccaaggttccctctctacctcgttaccttatctccctccctcactccccgagcctactccaaaaccaccctcttacggccacccaaatccactctcaccgcctcagaacccgtaggtgttaacccttccccaacagagctatccctcgagaagctcttcgttccgccggagaccaccgtgtccctcgaaagttccagagtcttgaacggttccaacattctgttgagtaactacgccaatgatgctctggtattgcaggccgagtttgtgaaaagcagcgtgaagaccgaggattgtccctccgatggacttgctgagttcgctctcgttggccgctccaacgtcggaaaatcctcgctcctcaactccctcgtgcgccgcaagaagctcgccttaacttcgaagaaacctggcaaaacgcaatgtataaaccattttcggattaataatagctggtacctggttgatttgcctggatatgggtatgcatctgcaccgcatgaacttaggatggattgggaaaaattcaccaaaaactatttccttaaccgctcaacgttagtttcagtattccttctaatagatgctagcattcctgctaaacaaattgatcttgactatgccagttggttgggtcagaatcagatcccaatgacattaatcttcaccaaatgtgacaagcggaaaaagaaaaagaatggaggcaaaagaccagaagaaaatgttaatgattttcaggatttgattcgaggtttcttccaatcagtgcctccatggatcatgaccagtagtgttaccaatcagggtcgtgatgagatactcctccatatggcccagctacggaactactggctcaagcactagttctgagaaacatgatatcgttagagcagatacgcatttccagatagacttgcttgattaccagctaatatggttatcaatttatctattttcctggtgtgccttctctgtattgcccaagtacctacaaggcctaaagctagtgacatgaaagctggataaagaaaactatttagaacaaagcttgatactgtactgtacaacaccatgcctgcgtgaggttctctactcccagccctgtacgattgttctaatgaagtttgttttggatgttcacaaatggttattatcacctgtaaattagtaatgatattttcattcaaataattggatacttccaaagtactattgtcgttgattttaaagaacttatatgtgagatttttgccactcccccgaagtgacacttcatag

SEQ ID NO: 51620 - protein, 293 aa, Glycine max
  peptide (1)..(293): Ceres Seq. ID no. 14311544
  misc_feature (11)..(239): Pfam Name: GTPase of unknown function Pfam Description: GTPase of unknown function
  misc_feature (90)..(288): Homolog of NCBI NO: 34762743 NR Description: GTP-binding protein
  misc_feature (90)..(280): Homolog of NCBI NO: 29346493 NR Description: putative GTP-binding protein
  misc_feature (89)..(280): Homolog of NCBI NO: 31194343 NR Description: ENSANGP00000000181 [Anopheles gambiae]
  misc_feature (73)..(290): Homolog of NCBI NO: 25306612 NR Description: probable nucleotide-binding protein
  misc_feature (73)..(167): Homolog of NCBI NO: 20330773 NR Description: Putative nucleotide binding protein
  misc_feature (168)..(290): Homolog of NCBI NO: 20330773 NR Description: Putative nucleotide binding protein
  misc_feature (21)..(290): Homolog of NCBI NO: 18400109 NR Description: nucleotide-binding protein -related [Arabidopsis
  misc_feature (1)..(293): Homolog of NCBI NO: 34910170 NR Description: putative GTP-binding protein
  misc_feature (14)..(293): Homolog of NCBI NO: 21592799 NR Description: putative GTP-binding protein [Arabidopsis
  misc_feature (14)..(293): Homolog of NCBI NO: 15239069 NR Description: GTP-binding protein -related [Arabidopsis
MVLLHLPRFPLYLVTLSPSLTPRAYSKTTLLRPPKSTLTASEPVGVNPSPTELSLEKLFVPPETTVSLESSRVLNGSNILLSNYANDALVLQAEFVKSSVKTEDCPSDGLAEFALVGRSNVGKSSLLNSLVRRKKLALTSKKPGKTQCINHFRINNSWYLVDLPGYGYASAPHELRMDWEKFTKNYFLNRSTLVSVFLLIDASIPAKQIDLDYASWLGQNQIPMTLIFTKCDKRKKKKNGGKRPEENVNDFQDLIRGFFQSVPPWIMTSSVTNQGRDEILLHMAQLRNYWLKH

SEQ ID NO: 51621 - DNA, 999 bp, Glycine max
  misc_feature (1)..(999): Ceres Seq. ID no. 14313302
accatgataggaactccaataagcaaaagccaattgatacgtgcatatcacaaaaactactcttacacaccaaaaaaatcctctatcaccaaactcacctataccctcaaactcaaggccctatagtccaagcaagtgagtgagtgttacaacttacacagcatggaatatagtcaatatactacttattcagcagaaggtgttgaggcagaaacttacacaagtagctgcaccaccccatcaagatcaaagaagagaaacaacaacaacacaagaaggttcagtgatgaacaaatcaaatcattggagaccatgtttgagtcagagacaaggcttgagcctagaaagaagttgcagcttgcaagagagcttggattgcagccaaggcaagttgctatatggtttcagaacaagagggctagatggaagtcaaagcaacttgagagagactatggcatactccaatccaattataacactttggcttcacgttttgaagctctgaagaaggaaaaacaaacattactaattcagttgcagaagctgaatcatctaatgcagaagccaatggagccaagtcagagatgcacacaagttgaagcagcaaacagcatggacagtgaatcagaaaatggaggcaccatgaaatgtaaagctgagggaaagccaagcccatcatcattggaaagatcagaacatgtacttggtgttctgtctgatgatgacactagcataaaggtggaagactttaacctagaagatgaacatggccttctgaattttgttgagcatgctgatggttccttgacttcaccagaagattggagtgcttttgaatccaatgatctatttggccaatcaaccactgatgattaccaatggtgggacttctggtcctgaatgaaacagaataaccaaaattttgtggaggaaatatatatatatatatatatatatatatatatatatatatatgatgaatgcttcatgtttggttcc

SEQ ID NO: 51622 - protein, 245 aa, Glycine max
  peptide (1)..(245): Ceres Seq. ID no. 14313303
  misc_feature (35)..(90): Pfam Name: Homeobox domain Pfam Description: Homeobox domain
  misc_feature (38)..(227): Homolog of NCBI NO: 29367373 NR Description: homeodomain leucine zipper protein-like protein
  misc_feature (38)..(227): Homolog of NCBI NO: 21741304 NR Description: OSJNBb0103I08.6 [Oryza sativa (japonica
  misc_feature (38)..(228): Homolog of NCBI NO: 22651698 NR Description: homeodomain protein Hfi22 [Nicotiana tabacum]
  misc_feature (38)..(135): Homolog of NCBI NO: 5006857 NR Description: homeodomain leucine zipper protein [Oryza sativa]
  misc_feature (14)..(243): Homolog of NCBI NO: 37147908 NR Description: HD-ZIP [Capsicum annuum]
  misc_feature (15)..(197): Homolog of NCBI NO: 5031277 NR Description: homeobox leucine zipper protein [Prunus armeniaca]
  misc_feature (9)..(227): Homolog of NCBI NO: 15226424 NR Description: homeobox-leucine zipper protein ATHB-7 (HD-ZIP
  misc_feature (2)..(227): Homolog of NCBI NO: 629527 NR Description: homeotic protein Athb-7 - Arabidopsis thaliana
  misc_feature (21)..(245): Homolog of NCBI NO: 11357332 NR Description: homeobox-leucine zipper protein ATHB-12
  misc_feature (21)..(245): Homolog of NCBI NO: 15228625 NR Description: homeobox-leucine zipper protein ATHB-12 (HD-Zip
MEYSQYTTYSAEGVEAETYTSSCTTPSRSKKRNNNNTRRFSDEQIKSLETMFESETRLEPRKKLQLARELGLQPRQVAIWFQNKRARWKSKQLERDYGILQSNYNTLASRFEALKKEKQTLLIQLQKLNHLMQKPMEPSQRCTQVEAANSMDSESENGGTMKCKAEGKPSPSSLERSEHVLGVLSDDDTSIKVEDFNLEDEHGLLNFVEHADGSLTSPEDWSAFESNDLFGQSTTDDYQWWDFWS

SEQ ID NO: 51623 - protein, 195 aa, Glycine max
  peptide (1)..(195): Ceres Seq. ID no. 14313304
  misc_feature (41)..(85): Pfam Name: Homeobox associated leucine zipper Pfam Description: Homeobox associated leucine zipper
  misc_feature (1)..(177): Homolog of NCBI NO: 29367373 NR Description: homeodomain leucine zipper protein-like protein
  misc_feature (1)..(177): Homolog of NCBI NO: 21741304 NR Description: OSJNBb0103I08.6 [Oryza sativa (japonica
  misc_feature (1)..(178): Homolog of NCBI NO: 22651698 NR Description: homeodomain protein Hfi22 [Nicotiana tabacum]
  misc_feature (1)..(85): Homolog of NCBI NO: 5006857 NR Description: homeodomain leucine zipper protein [Oryza sativa]
  misc_feature (1)..(193): Homolog of NCBI NO: 37147908 NR Description: HD-ZIP [Capsicum annuum]
  misc_feature (1)..(147): Homolog of NCBI NO: 5031277 NR Description: homeobox leucine zipper protein [Prunus armeniaca]
  misc_feature (1)..(177): Homolog of NCBI NO: 15226424 NR Description: homeobox-leucine zipper protein ATHB-7 (HD-ZIP
  misc_feature (1)..(177): Homolog of NCBI NO: 629527 NR Description: homeotic protein Athb-7 - Arabidopsis thaliana
  misc_feature (1)..(195): Homolog of NCBI NO: 11357332 NR Description: homeobox-leucine zipper protein ATHB-12
  misc_feature (1)..(195): Homolog of NCBI NO: 15228625 NR Description: homeobox-leucine zipper protein ATHB-12 (HD-Zip
MFESETRLEPRKKLQLARELGLQPRQVAIWFQNKRARWKSKQLERDYGILQSNYNTLASRFEALKKEKQTLLIQLQKLNHLMQKPMEPSQRCTQVEAANSMDSESENGGTMKCKAEGKPSPSSLERSEHVLGVLSDDDTSIKVEDFNLEDEHGLLNFVEHADGSLTSPEDWSAFESNDLFGQSTTDDYQWWDFWS

SEQ ID NO: 51624 - DNA, 1221 bp, Glycine max
  misc_feature (1)..(1221): Ceres Seq. ID no. 15177858
cattacggaaaaactttgtgcttgtgtacgagttacttgatgaagttattgattttggttatgttcaaacaacatctactgaattgttgaagtcctatgttttcaatgagccgcttgtaattgatgctgcacgtctgccacctcttggacctgctgcaatttttacgcaaggaacaaaaagaatgccagggatagctgtcacaaaatctgttgttgctacagagcctgggggtagaaagagggaagagatttttgtagacataattgagaaaatcagcatcactttcagctccagtggatatatactgacttctgagattgatggcaccatacaaatgaagagctatctttctggcaatcctgaaattcgattagcacttaatgatgacctctccattggaagaagccagggatcagctttcggttataggagctcatctggctcaggaacagttatattagatgactgtaatttccatgaatctgttcgtcttgatagttttgatatagacagaactctatccctggtaccaccggatggtgaatttccagtcatgaactaccgtttgacacaggaatttagtcctccttttcgtattaatgctttgattgaagaagcagggtcacttaaggcagaagtaattcttaaagtaagtgccgagtttccctcaagtgtaacagctaacactatcaaagtgcagatgccactaccaaaatgtacctccagagttagttttgagctggaacctggagctgtaggacaaacaactgattttaaggaagcaaataagaggctagaatggagtttaagaaagatcgtcgggggatcggagcacactctacatgcaaaactaaccttttctcaggaatctcacgttaatataacaaaagaatcaggacctgtgagcatgacatttactataccaatgcataacgtttcacggcttcaggtaaagtatttgcagatagcaaagaaatctgcaacgcatgaaccataccggtgggttagatatgttacacaggcgaattcctacgtcgctcgtatatgatgccgttaagaacactgtcccctcccccgctctttgtttttctattttgttttcctgctcttattgctctttacacacatgctttgtttatttacttattctttatttgtaaattacactctaagtttacattctaagtcgaatatagatgacgttttcagtttgcctgatt

SEQ ID NO: 51625 - protein, 348 aa, Glycine max
  peptide (1)..(348): Ceres Seq. ID no. 15177859
  misc_feature (2)..(348): Pfam Name: Adaptor complexes medium subunit family Pfam Description: Adaptor complexes medium subunit family
  misc_feature (1)..(348): Homolog of NCBI NO: 1703328 NR Description: CLATHRIN COAT ASSEMBLY PROTEIN AP50 (CLATHRIN ASSOCIATED PROTEIN AP50) (PLASMA MEMBRANE ADAPTOR AP-2 50 KD (HA2 50 KD SUBUNIT) (CLATHRIN ASSEMBLY PROTEIN COMPLEX 2 MEDIUM
  misc_feature (1)..(347): Homolog of NCBI NO: 40742339 NR Description: conserved hypothetical protein [Aspergillus
  misc_feature (1)..(347): Homolog of NCBI NO: 32419759 NR Description: hypothetical protein [Neurospora crassa]
  misc_feature (1)..(347): Homolog of NCBI NO: 15237475 NR Description: AP47/50p (gb|AAB88283.1) [Arabidopsis thaliana]
  misc_feature (1)..(348): Homolog of NCBI NO: 33468662 NR Description: SI:zC237L4.1 (novel protein similar to human and
  misc_feature (1)..(348): Homolog of NCBI NO: 23508393 NR Description: clathrin coat assembly protein, putative
  misc_feature (1)..(271): Homolog of NCBI NO: 34906796 NR Description: contains EST D40457(S2456)~similar to clathrin
  misc_feature (2)..(271): Homolog of NCBI NO: 30686572 NR Description: clathrin coat assembly like protein [Arabidopsis
  misc_feature (1)..(348): Homolog of NCBI NO: 33146629 NR Description: putative clathrin-adaptor medium chain apm 4
  misc_feature (2)..(348): Homolog of NCBI NO: 15233859 NR Description: clathrin coat assembly like protein [Arabidopsis
LRKNFVLVYELLDEVIDFGYVQTTSTELLKSYVFNEPLVIDAARLPPLGPAAIFTQGTKRMPGIAVTKSVVATEPGGRKREEIFVDIIEKISITFSSSGYILTSEIDGTIQMKSYLSGNPEIRLALNDDLSIGRSQGSAFGYRSSSGSGTVILDDCNFHESVRLDSFDIDRTLSLVPPDGEFPVMNYRLTQEFSPPFRINALIEEAGSLKAEVILKVSAEFPSSVTANTIKVQMPLPKCTSRVSFELEPGAVGQTTDFKEANKRLEWSLRKIVGGSEHTLHAKLTFSQESHVNITKESGPVSMTFTIPMHNVSRLQVKYLQIAKKSATHEPYRWVRYVTQANSYVARI

SEQ ID NO: 51626 - protein, 288 aa, Glycine max
  peptide (1)..(288): Ceres Seq. ID no. 15177860
  misc_feature (1)..(288): Pfam Name: Adaptor complexes medium subunit family Pfam Description: Adaptor complexes medium subunit family
  misc_feature (1)..(288): Homolog of NCBI NO: 1703328 NR Description: CLATHRIN COAT ASSEMBLY PROTEIN AP50 (CLATHRIN ASSOCIATED PROTEIN AP50) (PLASMA MEMBRANE ADAPTOR AP-2 50 KD (HA2 50 KD SUBUNIT) (CLATHRIN ASSEMBLY PROTEIN COMPLEX 2 MEDIUM
  misc_feature (1)..(287): Homolog of NCBI NO: 40742339 NR Description: conserved hypothetical protein [Aspergillus
  misc_feature (1)..(287): Homolog of NCBI NO: 32419759 NR Description: hypothetical protein [Neurospora crassa]
  misc_feature (1)..(287): Homolog of NCBI NO: 15237475 NR Description: AP47/50p (gb|AAB88283.1) [Arabidopsis thaliana]
  misc_feature (1)..(288): Homolog of NCBI NO: 33468662 NR Description: SI:zC237L4.1 (novel protein similar to human and
  misc_feature (1)..(288): Homolog of NCBI NO: 23508393 NR Description: clathrin coat assembly protein, putative
  misc_feature (1)..(211): Homolog of NCBI NO: 34906796 NR Description: contains EST D40457(S2456)~similar to clathrin
  misc_feature (1)..(211): Homolog of NCBI NO: 30686572 NR Description: clathrin coat assembly like protein [Arabidopsis
  misc_feature (1)..(288): Homolog of NCBI NO: 33146629 NR Description: putative clathrin-adaptor medium chain apm 4
  misc_feature (1)..(288): Homolog of NCBI NO: 15233859 NR Description: clathrin coat assembly like protein [Arabidopsis
MPGIAVTKSVVATEPGGRKREEIFVDIIEKISITFSSSGYILTSEIDGTIQMKSYLSGNPEIRLALNDDLSIGRSQGSAFGYRSSSGSGTVILDDCNFHESVRLDSFDIDRTLSLVPPDGEFPVMNYRLTQEFSPPFRINALIEEAGSLKAEVILKVSAEFPSSVTANTIKVQMPLPKCTSRVSFELEPGAVGQTTDFKEANKRLEWSLRKIVGGSEHTLHAKLTFSQESHVNITKESGPVSMTFTIPMHNVSRLQVKYLQIAKKSATHEPYRWVRYVTQANSYVARI

SEQ ID NO: 51627 - protein, 237 aa, Glycine max
  peptide (1)..(237): Ceres Seq. ID no. 15177861
  misc_feature (1)..(237): Pfam Name: Adaptor complexes medium subunit family Pfam Description: Adaptor complexes medium subunit family
  misc_feature (1)..(237): Homolog of NCBI NO: 1703328 NR Description: CLATHRIN COAT ASSEMBLY PROTEIN AP50 (CLATHRIN ASSOCIATED PROTEIN AP50) (PLASMA MEMBRANE ADAPTOR AP-2 50 KD (HA2 50 KD SUBUNIT) (CLATHRIN ASSEMBLY PROTEIN COMPLEX 2 MEDIUM
  misc_feature (1)..(236): Homolog of NCBI NO: 40742339 NR Description: conserved hypothetical protein [Aspergillus
  misc_feature (1)..(236): Homolog of NCBI NO: 32419759 NR Description: hypothetical protein [Neurospora crassa]
  misc_feature (1)..(236): Homolog of NCBI NO: 15237475 NR Description: AP47/50p (gb|AAB88283.1) [Arabidopsis thaliana]
  misc_feature (1)..(237): Homolog of NCBI NO: 33468662 NR Description: SI:zC237L4.1 (novel protein similar to human and
  misc_feature (1)..(237): Homolog of NCBI NO: 23508393 NR Description: clathrin coat assembly protein, putative
  misc_feature (1)..(160): Homolog of NCBI NO: 34906796 NR Description: contains EST D40457(S2456)~similar to clathrin
  misc_feature (1)..(160): Homolog of NCBI NO: 30686572 NR Description: clathrin coat assembly like protein [Arabidopsis
  misc_feature (1)..(237): Homolog of NCBI NO: 33146629 NR Description: putative clathrin-adaptor medium chain apm 4
  misc_feature (1)..(237): Homolog of NCBI NO: 15233859 NR Description: clathrin coat assembly like protein [Arabidopsis
MKSYLSGNPEIRLALNDDLSIGRSQGSAFGYRSSSGSGTVILDDCNFHESVRLDSFDIDRTLSLVPPDGEFPVMNYRLTQEFSPPFRINALIEEAGSLKAEVILKVSAEFPSSVTANTIKVQMPLPKCTSRVSFELEPGAVGQTTDFKEANKRLEWSLRKIVGGSEHTLHAKLTFSQESHVNITKESGPVSMTFTIPMHNVSRLQVKYLQIAKKSATHEPYRWVRYVTQANSYVARI

SEQ ID NO: 51628 - DNA, 1294 bp, Glycine max
  misc_feature (1)..(1294): Ceres Seq. ID no. 14311957
gccattttcttctctacctatctgccactccacttcccttcttttctacttctcggtgagtcccatcctatcccctccttccaccaagcctacagtaacggaatcatccaatatttcaaaggaaaacatagccattagcagaatcaagggtagctagcgtatatggaagcaggagtaggaggaggaagggtaggtggtgcatgcgacaacgaaattagcgacggaatgcaatgcatgaaccaccctcacaacaacagcaacaacaatcccggtgggatttgcgccttctgtctccaagataaactccgcaaccttctctcttcttcacctcctctttcttcctcgtcttctccttccccttctttcactcctccacctcctccctctgttaaaaccgaccacgaccacaacacgcgctctcgcctccccttcctcgtacccaagaaaaacaacaacaaaaaaccctcctcctacaccaacatttcttcatcagctaatatcattttcaaacgcagcaagtccactgccacacccaaaaggaaccagtttctcgaggagaaggacttcagtcccagaaaaagaaacggtttttggtctttcctctatccttcttcttcaaaggaagctaagagctttggtccaaatggtaagtacagaggcaagtgcttgggaaaaaagagtgatcacgtgattattgtggaagaggacaagtgtttgagctcttcttcttcttcttcttcttctaaggtttcgagatctagatctgttgggtgtggtagcagaagcttctccagtgatttcttcgagaggatctcttctggcctcggcgactgcactctacggagagtggagtctcagcgtgaaggaggaaaacctaagctagctgcttctgctaatactatgaaccattgcatgaaggaaagagtgagatgtggaggaatattcagtggcttcgttatgaattcgtcttcatcaacaacgtcttcttcgtcttgggtttcttcttctgttgatgatggcagaggaaggagttggggttgggcgtttgctagtcctatgagagctttcaccaccaaagggtctcctccttcttcttcttcgaagagagatgcttctgataagaacaacgccacgcctaacttatcagccattcctaccttgctcactgttagaggctgaaagagaataaaaaatgataaactattcggaggcttttatttatttggtttatatgcacattagcatgctctgtttatcttcgctaataataataatgtaatactcagtttactcc

SEQ ID NO: 51629 - protein, 338 aa, Glycine max
  peptide (1)..(338): Ceres Seq. ID no. 14311958
  misc_feature (50)..(329): Homolog of NCBI NO: 28828184 NR Description: similar to Leishmania major. Ppg3 [Dictyostelium
  misc_feature (18)..(258): Homolog of NCBI NO: 21536969 NR Description: unknown [Arabidopsis thaliana]
  misc_feature (13)..(258): Homolog of NCBI NO: 18422990 NR Description: expressed protein [Arabidopsis thaliana]
  misc_feature (169)..(286): Homolog of NCBI NO: 32487915 NR Description: OJ000315_02.19 [Oryza sativa (japonica
  misc_feature (169)..(286): Homolog of NCBI NO: 32490296 NR Description: OSJNBa0042I15.1 [Oryza sativa (japonica
  misc_feature (32)..(337): Homolog of NCBI NO: 18422990 NR Description: expressed protein [Arabidopsis thaliana]
  misc_feature (32)..(337): Homolog of NCBI NO: 21536969 NR Description: unknown [Arabidopsis thaliana]
MEAGVGGGRVGGACDNEISDGMQCMNHPHNNSNNNPGGICAFCLQDKLRNLLSSSPPLSSSSSPSPSFTPPPPPSVKTDHDHNTRSRLPFLVPKKNNNKKPSSYTNISSSANIIFKRSKSTATPKRNQFLEEKDFSPRKRNGFWSFLYPSSSKEAKSFGPNGKYRGKCLGKKSDHVIIVEEDKCLSSSSSSSSSKVSRSRSVGCGSRSFSSDFFERISSGLGDCTLRRVESQREGGKPKLAASANTMNHCMKERVRCGGIFSGFVMNSSSSTTSSSSWVSSSVDDGRGRSWGWAFASPMRAFTTKGSPPSSSSKRDASDKNNATPNLSAIPTLLTVRG

SEQ ID NO: 51630 - protein, 317 aa, Glycine max
  peptide (1)..(317): Ceres Seq. ID no. 14311959
  misc_feature (29)..(308): Homolog of NCBI NO: 28828184 NR Description: similar to Leishmania major. Ppg3 [Dictyostelium
  misc_feature (1)..(237): Homolog of NCBI NO: 21536969 NR Description: unknown [Arabidopsis thaliana]
  misc_feature (1)..(237): Homolog of NCBI NO: 18422990 NR Description: expressed protein [Arabidopsis thaliana]
  misc_feature (148)..(265): Homolog of NCBI NO: 32487915 NR Description: OJ000315_02.19 [Oryza sativa (japonica
  misc_feature (148)..(265): Homolog of NCBI NO: 32490296 NR Description: OSJNBa0042I15.1 [Oryza sativa (japonica
  misc_feature (11)..(316): Homolog of NCBI NO: 18422990 NR Description: expressed protein [Arabidopsis thaliana]
  misc_feature (11)..(316): Homolog of NCBI NO: 21536969 NR Description: unknown [Arabidopsis thaliana]
MQCMNHPHNNSNNNPGGICAFCLQDKLRNLLSSSPPLSSSSSPSPSFTPPPPPSVKTDHDHNTRSRLPFLVPKKNNNKKPSSYTNISSSANIIFKRSKSTATPKRNQFLEEKDFSPRKRNGFWSFLYPSSSKEAKSFGPNGKYRGKCLGKKSDHVIIVEEDKCLSSSSSSSSSKVSRSRSVGCGSRSFSSDFFERISSGLGDCTLRRVESQREGGKPKLAASANTMNHCMKERVRCGGIFSGFVMNSSSSTTSSSSWVSSSVDDGRGRSWGWAFASPMRAFTTKGSPPSSSSKRDASDKNNATPNLSAIPTLLTVRG

SEQ ID NO: 51631 - protein, 314 aa, Glycine max
  peptide (1)..(314): Ceres Seq. ID no. 14311960
  misc_feature (26)..(305): Homolog of NCBI NO: 28828184 NR Description: similar to Leishmania major. Ppg3 [Dictyostelium
  misc_feature (1)..(234): Homolog of NCBI NO: 21536969 NR Description: unknown [Arabidopsis thaliana]
  misc_feature (1)..(234): Homolog of NCBI NO: 18422990 NR Description: expressed protein [Arabidopsis thaliana]
  misc_feature (145)..(262): Homolog of NCBI NO: 32487915 NR Description: OJ000315_02.19 [Oryza sativa (japonica
  misc_feature (145)..(262): Homolog of NCBI NO: 32490296 NR Description: OSJNBa0042I15.1 [Oryza sativa (japonica
  misc_feature (8)..(313): Homolog of NCBI NO: 18422990 NR Description: expressed protein [Arabidopsis thaliana]
  misc_feature (8)..(313): Homolog of NCBI NO: 21536969 NR Description: unknown [Arabidopsis thaliana]
MNHPHNNSNNNPGGICAFCLQDKLRNLLSSSPPLSSSSSPSPSFTPPPPPSVKTDHDHNTRSRLPFLVPKKNNNKKPSSYTNISSSANIIFKRSKSTATPKRNQFLEEKDFSPRKRNGFWSFLYPSSSKEAKSFGPNGKYRGKCLGKKSDHVIIVEEDKCLSSSSSSSSSKVSRSRSVGCGSRSFSSDFFERISSGLGDCTLRRVESQREGGKPKLAASANTMNHCMKERVRCGGIFSGFVMNSSSSTTSSSSWVSSSVDDGRGRSWGWAFASPMRAFTTKGSPPSSSSKRDASDKNNATPNLSAIPTLLTVRG

SEQ ID NO: 51632 - DNA, 1547 bp, Glycine max
  misc_feature (1)..(1547): Ceres Seq. ID no. 14311731
gttgcccgttactcctcctatctatcgtgcgtatctctttctctctccatttttatttatatatttctctccattatttggtgtgcatgctctagacacacacacaccccaccaccaccaacactgagttttagcagaaggatagagagcagaatgattcaaagaactgtgtcctttcccagtttaaggaaattgcttcttcgggctggttgttctaaatctgcttcgtccaagatcggaacttacaattgctttgcttctcagtcctcccctctaccgagccacaaccctagttaccgtgatgacgagtatgctgatgtggactgggacagtcttggatttggactgatgcccactgattatatgtatattactaaatgttgtgagggccaaaattttggacaaggacaactcagtcgttatgggaacattgaactcagtccatcagctggtgtcctaaattatggtcagggtttattcgaaggcacgaaagcatacagaaaagaaaatgggggcttgctactcttccgtccagaagaaaatgccattcgcatgaagactggtgcccaaagaatgtgcatggcatcgccttccattgatcattttgttgatgctttgaagcaaactgtcttggctaataagcgttgggttcctccaccgggcaaaggatccttgtaccttaggcctctgctcctaggaactggtccggttttgggtttggctcctgcacctgaatacacattcctcatatttgcttcccctgttcgcaactatttcaaggagggctctgctccactcaacttgtacgtggaggaaaactttgaccgtgcttctagccgcggcactggaaacgttaaaaccatttccaattatgcaccggtcttgatggcacaaattcaagccaagaaaagaggattttcggatgtgctataccttgattcagacaccaagaaaaatctcgaggaggtctcttcttgtaacatttttattgccaagggcaaatgcatctcaacacctgctactaatggaactattctttccggaattacccgaaaaagtgtcattgaaattgctcgcgatcatggctatcaggtagaagagcgtgctgttgccgtggatgaattgattgaggctgatgaagttttctgcacaggaactgcggtcggtgttgctccagtagggagtatcacataccaggataaaaggatggaatatataacaggttctggaaccatttgtcaagagctgaacaataccatttcaggaattcaaacgggtactattgaagataagaagggatggattgtcgaagttgattaacaacgagtgtttataatttataattgtttattccaatgttattaaaccaattttaaactgtaataatgattgcccatacgaaaaatggcgcatatactgttgttcgttatctaaaagcatgttatatgtgtaaaatgttttttttggatacatatatatgtaaaatgatgtgcacattataaattataatgattatataaagtaaaggacttgcaaatcatattccg

SEQ ID NO: 51633 - protein, 439 aa, Glycine max
  peptide (1)..(439): Ceres Seq. ID no. 14311732
  misc_feature (135)..(420): Pfam Name: Aminotransferase class IV Pfam Description: Aminotransferase class IV
  misc_feature (40)..(438): Homolog of NCBI NO: 11280250 NR Description: branched-chain-amino-acid transaminase-like
  misc_feature (40)..(438): Homolog of NCBI NO: 21593211 NR Description: branched-chain-amino-acid transaminase-like
  misc_feature (40)..(438): Homolog of NCBI NO: 18408919 NR Description: branched-chain-amino-acid transaminase -related
  misc_feature (122)..(439): Homolog of NCBI NO: 7450517 NR Description: branched-chain amino acid aminotransferase
  misc_feature (105)..(439): Homolog of NCBI NO: 34902362 NR Description: Putative aminotransferase
  misc_feature (90)..(439): Homolog of NCBI NO: 27311239 NR Description: Unknown protein [Oryza sativa (japonica
  misc_feature (61)..(438): Homolog of NCBI NO: 30681524 NR Description: branched-chain amino acid aminotransferase
  misc_feature (103)..(438): Homolog of NCBI NO: 6319167 NR Description: branched-chain amino acid aminotransferase
  misc_feature (72)..(439): Homolog of NCBI NO: 14280354 NR Description: branched-chain amino acid aminotransferase
  misc_feature (61)..(439): Homolog of NCBI NO: 15218409 NR Description: tat-binding protein -related [Arabidopsis
VARYSSYLSCVSLSLSIFIYIFLSIIWCACSRHTHTPPPPTLSFSRRIESRMIQRTVSFPSLRKLLLRAGCSKSASSKIGTYNCFASQSSPLPSHNPSYRDDEYADVDWDSLGFGLMPTDYMYITKCCEGQNFGQGQLSRYGNIELSPSAGVLNYGQGLFEGTKAYRKENGGLLLFRPEENAIRMKTGAQRMCMASPSIDHFVDALKQTVLANKRWVPPPGKGSLYLRPLLLGTGPVLGLAPAPEYTFLIFASPVRNYFKEGSAPLNLYVEENFDRASSRGTGNVKTISNYAPVLMAQIQAKKRGFSDVLYLDSDTKKNLEEVSSCNIFIAKGKCISTPATNGTILSGITRKSVIEIARDHGYQVEERAVAVDELIEADEVFCTGTAVGVAPVGSITYQDKRMEYITGSGTICQELNNTISGIQTGTIEDKKGWIVEVD

SEQ ID NO: 51634 - protein, 388 aa, Glycine max
  peptide (1)..(388): Ceres Seq. ID no. 14311733
  misc_feature (84)..(369): Pfam Name: Aminotransferase class IV Pfam Description: Aminotransferase class IV
  misc_feature (1)..(387): Homolog of NCBI NO: 11280250 NR Description: branched-chain-amino-acid transaminase-like
  misc_feature (1)..(387): Homolog of NCBI NO: 21593211 NR Description: branched-chain-amino-acid transaminase-like
  misc_feature (1)..(387): Homolog of NCBI NO: 18408919 NR Description: branched-chain-amino-acid transaminase -related
  misc_feature (71)..(388): Homolog of NCBI NO: 7450517 NR Description: branched-chain amino acid aminotransferase
  misc_feature (54)..(388): Homolog of NCBI NO: 34902362 NR Description: Putative aminotransferase
  misc_feature (39)..(388): Homolog of NCBI NO: 27311239 NR Description: Unknown protein [Oryza sativa (japonica
  misc_feature (10)..(387): Homolog of NCBI NO: 30681524 NR Description: branched-chain amino acid aminotransferase
  misc_feature (52)..(387): Homolog of NCBI NO: 6319167 NR Description: branched-chain amino acid aminotransferase
  misc_feature (21)..(388): Homolog of NCBI NO: 14280354 NR Description: branched-chain amino acid aminotransferase
  misc_feature (10)..(388): Homolog of NCBI NO: 15218409 NR Description: tat-binding protein -related [Arabidopsis
MIQRTVSFPSLRKLLLRAGCSKSASSKIGTYNCFASQSSPLPSHNPSYRDDEYADVDWDSLGFGLMPTDYMYITKCCEGQNFGQGQLSRYGNIELSPSAGVLNYGQGLFEGTKAYRKENGGLLLFRPEENAIRMKTGAQRMCMASPSIDHFVDALKQTVLANKRWVPPPGKGSLYLRPLLLGTGPVLGLAPAPEYTFLIFASPVRNYFKEGSAPLNLYVEENFDRASSRGTGNVKTISNYAPVLMAQIQAKKRGFSDVLYLDSDTKKNLEEVSSCNIFIAKGKCISTPATNGTILSGITRKSVIEIARDHGYQVEERAVAVDELIEADEVFCTGTAVGVAPVGSITYQDKRMEYITGSGTICQELNNTISGIQTGTIEDKKGWIVEVD

SEQ ID NO: 51635 - protein, 323 aa, Glycine max
  peptide (1)..(323): Ceres Seq. ID no. 14311734
  misc_feature (19)..(304): Pfam Name: Aminotransferase class IV Pfam Description: Aminotransferase class IV
  misc_feature (1)..(322): Homolog of NCBI NO: 11280250 NR Description: branched-chain-amino-acid transaminase-like
  misc_feature (1)..(322): Homolog of NCBI NO: 21593211 NR Description: branched-chain-amino-acid transaminase-like
  misc_feature (1)..(322): Homolog of NCBI NO: 18408919 NR Description: branched-chain-amino-acid transaminase -related
  misc_feature (6)..(323): Homolog of NCBI NO: 7450517 NR Description: branched-chain amino acid aminotransferase
  misc_feature (1)..(323): Homolog of NCBI NO: 34902362 NR Description: Putative aminotransferase
  misc_feature (1)..(323): Homolog of NCBI NO: 27311239 NR Description: Unknown protein [Oryza sativa (japonica
  misc_feature (1)..(322): Homolog of NCBI NO: 30681524 NR Description: branched-chain amino acid aminotransferase
  misc_feature (1)..(322): Homolog of NCBI NO: 6319167 NR Description: branched-chain amino acid aminotransferase
  misc_feature (1)..(323): Homolog of NCBI NO: 14280354 NR Description: branched-chain amino acid aminotransferase
  misc_feature (1)..(323): Homolog of NCBI NO: 15218409 NR Description: tat-binding protein -related [Arabidopsis
MPTDYMYITKCCEGQNFGQGQLSRYGNIELSPSAGVLNYGQGLFEGTKAYRKENGGLLLFRPEENAIRMKTGAQRMCMASPSIDHFVDALKQTVLANKRWVPPPGKGSLYLRPLLLGTGPVLGLAPAPEYTFLIFASPVRNYFKEGSAPLNLYVEENFDRASSRGTGNVKTISNYAPVLMAQIQAKKRGFSDVLYLDSDTKKNLEEVSSCNIFIAKGKCISTPATNGTILSGITRKSVIEIARDHGYQVEERAVAVDELIEADEVFCTGTAVGVAPVGSITYQDKRMEYITGSGTICQELNNTISGIQTGTIEDKKGWIVEVD

SEQ ID NO: 51636 - DNA, 1233 bp, Glycine max
  misc_feature (1)..(1233): Ceres Seq. ID no. 14311725
aacaaaatagaaaagtagcagcaccctgctcatttgttgggatcccattcttccacaacagttcaaagtttgctctctcattcctcacccctccgcctcctctctcacgtacgcacactgttttcacctaaaaagctgctacccaatactccgtacaccgtatacctaaaccaccccaactacaacggacactaacaaatcattattattactgttactattacatcacattcttcacacactaatcaaaatcatcattttccatatatatcgccagcaagatacaagaagaaagaaagatgcttccgtttcggagattctatgggttcgagagctggctagaccacgacgctggccatgctcagagttcgctgatcaaaaaggcggtggagttggacggcgccagatcgaaaacggagcggaaatcaacggaagcgtgcaagagtcacagggaagctgagaggagacgcaggcagagaatcaactctcacctctccaccttacgtaccctccttcctaacgccgccaagtcggacaaggcgtcgttgctgggggaagtggtggagcacgtgaagcggctgaggaagcaagccgatgacgtgacgtgcggggactcgtactcctcgcgcagcggcgaaccgggttcggtccggtcggaggcatggccgtttccgggggagtgcgatgaggtgacggtgagttactgtgacggcgaggacggggaaccgaagcgggtgaaggcgacggtgtgctgcggggaccggaccggtctgaaccgggacgtgtcccaagcgatccggtcggttcgggccaaagcggttcgcgcggagatgatgacggttgggggaaggacgaagagtgttgtggtggtggagtgggaaaaggaagaagaggaggttggggcgctggaacgggctttgaaggctgtggtggagaatcgggctttggtgggctttggaatgggcccagtcattctgggccagaaacggggtagggattgctgtgcttcgcctagtagtgaggttgactctgacttcttgctgaggaatgggagcttttgctaattcgtaattagtttctttttttggtaaaagaaataattagatgcttagttagctttcgggttggtaatcttggagatgcctttttttttatttatataggcatgatgctttagtctataccatagtctaaaatctaaaatttataataatatataattgtggtaatttt

SEQ ID NO: 51637 - protein, 254 aa, Glycine max
  peptide (1)..(254): Ceres Seq. ID no. 14311726
  misc_feature (46)..(95): Pfam Name: Helix-loop-helix DNA-binding domain Pfam Description: Helix-loop-helix DNA-binding domain
  misc_feature (37)..(227): Homolog of NCBI NO: 34896028 NR Description: ESTs C26093(C11622),AU090634(C12429) correspond a region of the predicted gene.~Similar to Arabidopsis thaliana
  misc_feature (14)..(230): Homolog of NCBI NO: 34904034 NR Description: P0665D10.15 [Oryza sativa (japonica
  misc_feature (40)..(222): Homolog of NCBI NO: 15229004 NR Description: bHLH protein family [Arabidopsis thaliana]
  misc_feature (19)..(212): Homolog of NCBI NO: 18491261 NR Description: At2g41130/T3K9.10 [Arabidopsis thaliana]
  misc_feature (19)..(212): Homolog of NCBI NO: 15226839 NR Description: bHLH protein family [Arabidopsis thaliana]
  misc_feature (35)..(212): Homolog of NCBI NO: 18409132 NR Description: bHLH protein family [Arabidopsis thaliana]
  misc_feature (35)..(107): Homolog of NCBI NO: 15230869 NR Description: bHLH protein family [Arabidopsis thaliana]
  misc_feature (119)..(199): Homolog of NCBI NO: 15230869 NR Description: bHLH protein family [Arabidopsis thaliana]
  misc_feature (129)..(215): Homolog of NCBI NO: 33111975 NR Description: putative bHLH131 transcription factor
  misc_feature (1)..(101): Homolog of NCBI NO: 33111975 NR Description: putative bHLH131 transcription factor
MLPFRRFYGFESWLDHDAGHAQSSLIKKAVELDGARSKTERKSTEACKSHREAERRRRQRINSHLSTLRTLLPNAAKSDKASLLGEVVEHVKRLRKQADDVTCGDSYSSRSGEPGSVRSEAWPFPGECDEVTVSYCDGEDGEPKRVKATVCCGDRTGLNRDVSQAIRSVRAKAVRAEMMTVGGRTKSVVVVEWEKEEEEVGALERALKAVVENRALVGFGMGPVILGQKRGRDCCASPSSEVDSDFLLRNGSFC

SEQ ID NO: 51638 - DNA, 1482 bp, Glycine max
  misc_feature (1)..(1482): Ceres Seq. ID no. 14311882
atataaaaataaattaaaaatatcttttaaaaaaattgcagtggcagcacacacatctttgtgtttcaaaaatggaacctaatgacaaccaactcacctctttcttccaccaccaccaccaacagcaccaacaccaccagccgccgccaccaccgcagaccacggcgtctccgaccaacgggctcttgccgaacgcggatgggtcccacatactttacccccactctgtggcgtccgctgtttcgtcgcagcttgaaccggcgaagcggaagcgcgggcggccgaggaagtacggaacgccggagcaagctctggccgcgaagaaagccgctacgacgttgtctcattcgttctctgtggacaagaagccccactccccgacgttcccttcctccaagaaatcccattccttcgctctaggcaatgcagggcaagggttcactccgcatgtcatttctgttgctgctggtgaggatgttggccagaaaattatgttatttatgcaacaaagtaggcgtgagatgtgtattctgtctgcatctggttccatctctaatgcctctcttcgccagccagcaacctcaggaggcagcattgcatatgagggtcggtttgagattatttcacttactggttcttatgtccgtaatgaacttggaactcgaactggtggtctcagtgtatgcttatctaatactgatggacaaatcataggtggtggagttggtgggccgcttaaagcagctggtccagttcaggtcatcgttggaacattctttattgacaacaagaaggatactggtgctggtgttaaaggtgacatctctgccagcaagttgccatctccagttggtgaaccggtatcaagtttaggtttccgccaatcagttgactctcccagtggtaatccaatccggggaaatgatgagcatcaagctatggggggaagtcatttcatgattcaacagcttggtttgcatgggacgcctccccggtccacagactggggtcatccggattcaagaaatactggttttgagttgacaggtcatggggcgcaccagtctcctgagaatggaggctatgaacaaattcccgattgaagaaccaagatggcttttggatttgatagcagtgatgaatttgcggtagatgtatgatatctctacataccaccagtctttgtcacgtgatgctgtttatagtatgcaccattcattaaggatcgcggcttctgaaaattaatactcgtgcatctccttgaaaatattgttctgcctcgtttactgatgttgtatttataaatcactaaatcagggctgcttcatttttgcgggcctgttagtttataccgggataaatataatagatatatgcttcctagattagctaatctattgtggactatattttccttccattttcaaggtgcagtcttaatattgttcaaaattctatcaagcatatattattatggttctt

SEQ ID NO: 51639 - protein, 343 aa, Glycine max
  peptide (1)..(343): Ceres Seq. ID no. 14311883
  misc_feature (117)..(289): Homolog of NCBI NO: 7487767 NR Description: hypothetical protein T6K21.130 - Arabidopsis
  misc_feature (17)..(299): Homolog of NCBI NO: 37537056 NR Description: putative AT-Hook DNA-binding protein
  misc_feature (31)..(294): Homolog of NCBI NO: 25408293 NR Description: AT-hook DNA-binding protein (AHP1)
  misc_feature (28)..(294): Homolog of NCBI NO: 18403332 NR Description: AT-hook DNA-binding protein (AHP1) [Arabidopsis
  misc_feature (28)..(294): Homolog of NCBI NO: 2598227 NR Description: AT-hook protein 1 [Arabidopsis thaliana]
  misc_feature (28)..(294): Homolog of NCBI NO: 14326504 NR Description: At2g33620/F4P9.39 [Arabidopsis thaliana]
  misc_feature (25)..(254): Homolog of NCBI NO: 30679183 NR Description: expressed protein [Arabidopsis thaliana]
  misc_feature (22)..(323): Homolog of NCBI NO: 4165183 NR Description: SAP1 protein [Antirrhinum majus]
  misc_feature (25)..(339): Homolog of NCBI NO: 6175163 NR Description: unknown protein [Arabidopsis thaliana]
  misc_feature (25)..(339): Homolog of NCBI NO: 30679188 NR Description: expressed protein [Arabidopsis thaliana]
MEPNDNQLTSFFHHHHQQHQHHQPPPPPQTTASPTNGLLPNADGSHILYPHSVASAVSSQLEPAKRKRGRPRKYGTPEQALAAKKAATTLSHSFSVDKKPHSPTFPSSKKSHSFALGNAGQGFTPHVISVAAGEDVGQKIMLFMQQSRREMCILSASGSISNASLRQPATSGGSIAYEGRFEIISLTGSYVRNELGTRTGGLSVCLSNTDGQIIGGGVGGPLKAAGPVQVIVGTFFIDNKKDTGAGVKGDISASKLPSPVGEPVSSLGFRQSVDSPSGNPIRGNDEHQAMGGSHFMIQQLGLHGTPPRSTDWGHPDSRNTGFELTGHGAHQSPENGGYEQIPD

SEQ ID NO: 51640 - protein, 203 aa, Glycine max
  peptide (1)..(203): Ceres Seq. ID no. 14311884
  misc_feature (1)..(149): Homolog of NCBI NO: 7487767 NR Description: hypothetical protein T6K21.130 - Arabidopsis
  misc_feature (1)..(159): Homolog of NCBI NO: 37537056 NR Description: putative AT-Hook DNA-binding protein
  misc_feature (1)..(154): Homolog of NCBI NO: 25408293 NR Description: AT-hook DNA-binding protein (AHP1)
  misc_feature (1)..(154): Homolog of NCBI NO: 18403332 NR Description: AT-hook DNA-binding protein (AHP1) [Arabidopsis
  misc_feature (1)..(154): Homolog of NCBI NO: 2598227 NR Description: AT-hook protein 1 [Arabidopsis thaliana]
  misc_feature (1)..(154): Homolog of NCBI NO: 14326504 NR Description: At2g33620/F4P9.39 [Arabidopsis thaliana]
  misc_feature (1)..(114): Homolog of NCBI NO: 30679183 NR Description: expressed protein [Arabidopsis thaliana]
  misc_feature (1)..(183): Homolog of NCBI NO: 4165183 NR Description: SAP1 protein [Antirrhinum majus]
  misc_feature (1)..(199): Homolog of NCBI NO: 6175163 NR Description: unknown protein [Arabidopsis thaliana]
  misc_feature (1)..(199): Homolog of NCBI NO: 30679188 NR Description: expressed protein [Arabidopsis thaliana]
MLFMQQSRREMCILSASGSISNASLRQPATSGGSIAYEGRFEIISLTGSYVRNELGTRTGGLSVCLSNTDGQIIGGGVGGPLKAAGPVQVIVGTFFIDNKKDTGAGVKGDISASKLPSPVGEPVSSLGFRQSVDSPSGNPIRGNDEHQAMGGSHFMIQQLGLHGTPPRSTDWGHPDSRNTGFELTGHGAHQSPENGGYEQIPD

SEQ ID NO: 51641 - protein, 200 aa, Glycine max
  peptide (1)..(200): Ceres Seq. ID no. 14311885
  misc_feature (1)..(146): Homolog of NCBI NO: 7487767 NR Description: hypothetical protein T6K21.130 - Arabidopsis
  misc_feature (1)..(156): Homolog of NCBI NO: 37537056 NR Description: putative AT-Hook DNA-binding protein
  misc_feature (1)..(151): Homolog of NCBI NO: 25408293 NR Description: AT-hook DNA-binding protein (AHP1)
  misc_feature (1)..(151): Homolog of NCBI NO: 18403332 NR Description: AT-hook DNA-binding protein (AHP1) [Arabidopsis
  misc_feature (1)..(151): Homolog of NCBI NO: 2598227 NR Description: AT-hook protein 1 [Arabidopsis thaliana]
  misc_feature (1)..(151): Homolog of NCBI NO: 14326504 NR Description: At2g33620/F4P9.39 [Arabidopsis thaliana]
  misc_feature (1)..(111): Homolog of NCBI NO: 30679183 NR Description: expressed protein [Arabidopsis thaliana]
  misc_feature (1)..(180): Homolog of NCBI NO: 4165183 NR Description: SAP1 protein [Antirrhinum majus]
  misc_feature (1)..(196): Homolog of NCBI NO: 6175163 NR Description: unknown protein [Arabidopsis thaliana]
  misc_feature (1)..(196): Homolog of NCBI NO: 30679188 NR Description: expressed protein [Arabidopsis thaliana]
MQQSRREMCILSASGSISNASLRQPATSGGSIAYEGRFEIISLTGSYVRNELGTRTGGLSVCLSNTDGQIIGGGVGGPLKAAGPVQVIVGTFFIDNKKDTGAGVKGDISASKLPSPVGEPVSSLGFRQSVDSPSGNPIRGNDEHQAMGGSHFMIQQLGLHGTPPRSTDWGHPDSRNTGFELTGHGAHQSPENGGYEQIPD

SEQ ID NO: 51642 - DNA, 1540 bp, Glycine max
  misc_feature (1)..(1540): Ceres Seq. ID no. 15171382
tttgcataatgttcaaaaccaagaaaaataataataatttgcataatgtgtattatgagagtgacctaactaacccacacttcatatcttctcgtgtggacacaaattggaattggaattgaaattccccactactttttcaatgccatatgctgcaaacccttcacttttcacttcttttctagctctcatttgatattcccaatctctctgtttctatttctttgttcgttgcttcacactatggcttcttggtgggatttaagacccttctttcgttttcagtctgttaggacccgatttcaggaattcaggacgagggaagtccaacttggttcacatactgtgagttctcatggatatgcagttgcaagaacacacaaacatgattggctcattctcttgctcctcgtgttgattgttatcagcctgtacattatccatcctttccatcgctttgttgggaaggatatgatgactgatctcaaatatccactgaagagtaatacagttcctgcttgggctattcctatatatgcaattttattgcccatagtgatctttcttggtgtctacatccgaaggagagacgtctatgatcttcatcatgctgtgctgggtttattgttctccgttttaataacagcagtatttactgaggcaataaaaaatgcagtaggtcgacctcgaccagacttcttctggcgatgttttccagatggaaaggatgtttatgataaatggggagatgtcatttgtcatggtgaccaaaaggtcataaaggaaggatacaagagtttcccaagtggtcatacttcagggtcattttctggtctgggttttttatcattgtacttatctggaaaaataaaagcatttgatcgcaaaggtcatgttgcaaaactttgcattgtttttctaccactacttgttgcatcacttgttggcatttctcgagttgatgactactggcaccactggcaagacgtgtttgcgggaggtcttttagggcttacagtggctacattttgctatttgcagttttttcctcctccttatcattctgaaggctggggtccttatgcgtattttaggatgttggaagaatctcgtggtatgacccaagttcctagtgttcaaaattctggtcaagcgcagttagcagaggctcaggctgagagccaagaggaacaaggtctccacgggtgtatggggttaactttatcacgggatcatcatgcagcattgaatgactgtgaatctgggaggggataaagtctgtacatttcatgatcttgctctctgtaaaatgtaaatcagatgttagttcgtagcctaggattttaaccagtatttaaaactaacacattttgttgaatagttgtttctattcagtcactagtgtctctgaaaactttgaagcgtagttgtttgtaagagtcaggtttgggacaattaacctttgttatttcaatattttgtgaatatgttgacataagaaaatacgaaatctcttgagaagattgccgttcattcaaac

SEQ ID NO: 51643 - protein, 343 aa, Glycine max
  peptide (1)..(343): Ceres Seq. ID no. 15171383
  misc_feature (132)..(272): Pfam Name: PAP2 superfamily Pfam Description: PAP2 superfamily
  misc_feature (26)..(313): Homolog of NCBI NO: 25353094 NR Description: probable phosphatidic acid phosphatase
  misc_feature (1)..(313): Homolog of NCBI NO: 21554001 NR Description: putative phosphatidic acid phosphatase
  misc_feature (1)..(313): Homolog of NCBI NO: 18379166 NR Description: phosphatidic acid phosphatase (PAP2) family
  misc_feature (1)..(313): Homolog of NCBI NO: 15724220 NR Description: At2g01180/F10A8.6 [Arabidopsis thaliana]
  misc_feature (27)..(312): Homolog of NCBI NO: 15218051 NR Description: phosphatidic acid phosphatase (PAP2) family
  misc_feature (27)..(313): Homolog of NCBI NO: 10673973 NR Description: phosphatidic acid phosphatase beta [Vigna
  misc_feature (26)..(343): Homolog of NCBI NO: 6957723 NR Description: putative phosphatidate phosphohydrolase
  misc_feature (21)..(343): Homolog of NCBI NO: 18396250 NR Description: phosphatidic acid phosphatase (PAP2) family
  misc_feature (1)..(36): Homolog of NCBI NO: 9621903 NR Description: phosphatidic acid phosphatase alpha [Vigna
  misc_feature (21)..(343): Homolog of NCBI NO: 9621903 NR Description: phosphatidic acid phosphatase alpha [Vigna
MASWWDLRPFFRFQSVRTRFQEFRTREVQLGSHTVSSHGYAVARTHKHDWLILLLLVLIVISLYIIHPFHRFVGKDMMTDLKYPLKSNTVPAWAIPIYAILLPIVIFLGVYIRRRDVYDLHHAVLGLLFSVLITAVFTEAIKNAVGRPRPDFFWRCFPDGKDVYDKWGDVICHGDQKVIKEGYKSFPSGHTSGSFSGLGFLSLYLSGKIKAFDRKGHVAKLCIVFLPLLVASLVGISRVDDYWHHWQDVFAGGLLGLTVATFCYLQFFPPPYHSEGWGPYAYFRMLEESRGMTQVPSVQNSGQAQLAEAQAESQEEQGLHGCMGLTLSRDHHAALNDCESGRG

SEQ ID NO: 51644 - protein, 267 aa, Glycine max
  peptide (1)..(267): Ceres Seq. ID no. 15171384
  misc_feature (56)..(196): Pfam Name: PAP2 superfamily Pfam Description: PAP2 superfamily
  misc_feature (1)..(266): Homolog of NCBI NO: 38637528 NR Description: unknown protein [Oryza sativa (japonica
  misc_feature (1)..(237): Homolog of NCBI NO: 25353094 NR Description: probable phosphatidic acid phosphatase
  misc_feature (1)..(237): Homolog of NCBI NO: 21554001 NR Description: putative phosphatidic acid phosphatase
  misc_feature (1)..(237): Homolog of NCBI NO: 18379166 NR Description: phosphatidic acid phosphatase (PAP2) family
  misc_feature (1)..(237): Homolog of NCBI NO: 15724220 NR Description: At2g01180/F10A8.6 [Arabidopsis thaliana]
  misc_feature (1)..(236): Homolog of NCBI NO: 15218051 NR Description: phosphatidic acid phosphatase (PAP2) family
  misc_feature (1)..(237): Homolog of NCBI NO: 10673973 NR Description: phosphatidic acid phosphatase beta [Vigna
  misc_feature (1)..(267): Homolog of NCBI NO: 6957723 NR Description: putative phosphatidate phosphohydrolase
  misc_feature (1)..(267): Homolog of NCBI NO: 18396250 NR Description: phosphatidic acid phosphatase (PAP2) family
  misc_feature (1)..(267): Homolog of NCBI NO: 9621903 NR Description: phosphatidic acid phosphatase alpha [Vigna
MMTDLKYPLKSNTVPAWAIPIYAILLPIVIFLGVYIRRRDVYDLHHAVLGLLFSVLITAVFTEAIKNAVGRPRPDFFWRCFPDGKDVYDKWGDVICHGDQKVIKEGYKSFPSGHTSGSFSGLGFLSLYLSGKIKAFDRKGHVAKLCIVFLPLLVASLVGISRVDDYWHHWQDVFAGGLLGLTVATFCYLQFFPPPYHSEGWGPYAYFRMLEESRGMTQVPSVQNSGQAQLAEAQAESQEEQGLHGCMGLTLSRDHHAALNDCESGRG

SEQ ID NO: 51645 - protein, 266 aa, Glycine max
  peptide (1)..(266): Ceres Seq. ID no. 15171385
  misc_feature (55)..(195): Pfam Name: PAP2 superfamily Pfam Description: PAP2 superfamily
  misc_feature (1)..(265): Homolog of NCBI NO: 38637528 NR Description: unknown protein [Oryza sativa (japonica
  misc_feature (1)..(236): Homolog of NCBI NO: 25353094 NR Description: probable phosphatidic acid phosphatase
  misc_feature (1)..(236): Homolog of NCBI NO: 21554001 NR Description: putative phosphatidic acid phosphatase
  misc_feature (1)..(236): Homolog of NCBI NO: 18379166 NR Description: phosphatidic acid phosphatase (PAP2) family
  misc_feature (1)..(236): Homolog of NCBI NO: 15724220 NR Description: At2g01180/F10A8.6 [Arabidopsis thaliana]
  misc_feature (1)..(235): Homolog of NCBI NO: 15218051 NR Description: phosphatidic acid phosphatase (PAP2) family
  misc_feature (1)..(236): Homolog of NCBI NO: 10673973 NR Description: phosphatidic acid phosphatase beta [Vigna
  misc_feature (1)..(266): Homolog of NCBI NO: 6957723 NR Description: putative phosphatidate phosphohydrolase
  misc_feature (1)..(266): Homolog of NCBI NO: 18396250 NR Description: phosphatidic acid phosphatase (PAP2) family
  misc_feature (1)..(266): Homolog of NCBI NO: 9621903 NR Description: phosphatidic acid phosphatase alpha [Vigna
MTDLKYPLKSNTVPAWAIPIYAILLPIVIFLGVYIRRRDVYDLHHAVLGLLFSVLITAVFTEAIKNAVGRPRPDFFWRCFPDGKDVYDKWGDVICHGDQKVIKEGYKSFPSGHTSGSFSGLGFLSLYLSGKIKAFDRKGHVAKLCIVFLPLLVASLVGISRVDDYWHHWQDVFAGGLLGLTVATFCYLQFFPPPYHSEGWGPYAYFRMLEESRGMTQVPSVQNSGQAQLAEAQAESQEEQGLHGCMGLTLSRDHHAALNDCESGRG

SEQ ID NO: 51646 - DNA, 882 bp, Glycine max
  misc_feature (1)..(882): Ceres Seq. ID no. 13588995
cttcttcctagtgttacaacattccacaaacaactctttcttttaaattttataatattcttctgagtctgttttttttttttctcacaagaccattataccagatccagtttgaagagatcgagtagtatgagcagccagacgtcgaagccgaacgtggatggagtgcacatcgatgtgaaggttgtggagaggccaatgagagaaaggccctacgatctgttgctgcggtttcttggcctttcactcactcttgtggcagtcatcattgttggtgttgacaatgagaccaaagtcatctcctatgccgaaatgcagttcaaagccactgctaagtgggaatatgtctctgccattgtgtttttcttggtgataaacgcgatagcatgctcatacgcagctgcatcattggttatcacattgatggcaagaagcaatggaagaaaaaacgatgtgacactgttggggctaacagcgctagatcttgtgatgatggctttgttgttctcggccaatggtgcagcttgtgcagtgggagtgatagcacagaaggggaactcgcacgtgcaatggatgaaagtgtgcaacgtctttgatgcctattgtcgccacgtcactgcagcattggtcctctccatcattggatccacggtctttctcttgctcgtgctcctttctgttcttaaactccattacagaacaggaatttagatctcgatatgatatgatacacgctataatatatatttgtagggttaattaattaattgagggtgttcttgtacgtgtgaatcgtgtttttggcatagaccttgtgcacttgttgtggttgatgaagaacgccaaagcacttaaaagatatagatgctatatttaatttgg

SEQ ID NO: 51647 - protein, 193 aa, Glycine max; identical to SEQ ID NO: 51345
  peptide (1)..(193): Ceres Seq. ID no. 15220927
  misc_feature (30)..(175): Pfam Name: Domain of unknown function (DUF588) Pfam Description: Domain of unknown function (DUF588)
  misc_feature (33)..(187): Homolog of NCBI NO: 21553953 NR Description: unknown [Arabidopsis thaliana]
  misc_feature (18)..(187): Homolog of NCBI NO: 15237068 NR Description: expressed integral membrane protein common family
  misc_feature (30)..(191): Homolog of NCBI NO: 34394242 NR Description: integral membrane protein-like
  misc_feature (27)..(185): Homolog of NCBI NO: 15230708 NR Description: expressed protein [Arabidopsis thaliana]
  misc_feature (75)..(188): Homolog of NCBI NO: 7430335 NR Description: hypothetical 15.5K protein - Arabidopsis thaliana
  misc_feature (28)..(188): Homolog of NCBI NO: 34915110 NR Description: P0503E05.4 [Oryza sativa (japonica
  misc_feature (31)..(188): Homolog of NCBI NO: 18414489 NR Description: expressed integral membrane protein common family
  misc_feature (7)..(187): Homolog of NCBI NO: 15234654 NR Description: expressed protein [Arabidopsis thaliana]
  misc_feature (6)..(187): Homolog of NCBI NO: 21617994 NR Description: unknown [Arabidopsis thaliana]
  misc_feature (6)..(187): Homolog of NCBI NO: 18414493 NR Description: expressed integral membrane protein common family

SEQ ID NO: 51648 - protein, 170 aa, Glycine max; identical to SEQ ID NO: 51346
  peptide (1)..(170): Ceres Seq. ID no. 15220928
  misc_feature (7)..(152): Pfam Name: Domain of unknown function (DUF588) Pfam Description: Domain of unknown function (DUF588)
  misc_feature (10)..(164): Homolog of NCBI NO: 21553953 NR Description: unknown [Arabidopsis thaliana]
  misc_feature (1)..(164): Homolog of NCBI NO: 15237068 NR Description: expressed integral membrane protein common family
  misc_feature (7)..(168): Homolog of NCBI NO: 34394242 NR Description: integral membrane protein-like
  misc_feature (4)..(162): Homolog of NCBI NO: 15230708 NR Description: expressed protein [Arabidopsis thaliana]
  misc_feature (52)..(165): Homolog of NCBI NO: 7430335 NR Description: hypothetical 15.5K protein - Arabidopsis thaliana
  misc_feature (5)..(165): Homolog of NCBI NO: 34915110 NR Description: P0503E05.4 [Oryza sativa (japonica
  misc_feature (8)..(165): Homolog of NCBI NO: 18414489 NR Description: expressed integral membrane protein common family
  misc_feature (1)..(164): Homolog of NCBI NO: 15234654 NR Description: expressed protein [Arabidopsis thaliana]
  misc_feature (1)..(164): Homolog of NCBI NO: 21617994 NR Description: unknown [Arabidopsis thaliana]
  misc_feature (1)..(164): Homolog of NCBI NO: 18414493 NR Description: expressed integral membrane protein common family

SEQ ID NO: 51649 - protein, 132 aa, Glycine max; identical to SEQ ID NO: 51347
  peptide (1)..(132): Ceres Seq. ID no. 15220929
  misc_feature (1)..(114): Pfam Name: Domain of unknown function (DUF588) Pfam Description: Domain of unknown function (DUF588)
  misc_feature (1)..(126): Homolog of NCBI NO: 21553953 NR Description: unknown [Arabidopsis thaliana]
  misc_feature (1)..(126): Homolog of NCBI NO: 15237068 NR Description: expressed integral membrane protein common family
  misc_feature (1)..(130): Homolog of NCBI NO: 34394242 NR Description: integral membrane protein-like
  misc_feature (1)..(124): Homolog of NCBI NO: 15230708 NR Description: expressed protein [Arabidopsis thaliana]
  misc_feature (14)..(127): Homolog of NCBI NO: 7430335 NR Description: hypothetical 15.5K protein - Arabidopsis thaliana
  misc_feature (1)..(127): Homolog of NCBI NO: 34915110 NR Description: P0503E05.4 [Oryza sativa (japonica
  misc_feature (1)..(127): Homolog of NCBI NO: 18414489 NR Description: expressed integral membrane protein common family
  misc_feature (1)..(126): Homolog of NCBI NO: 15234654 NR Description: expressed protein [Arabidopsis thaliana]
  misc_feature (1)..(126): Homolog of NCBI NO: 21617994 NR Description: unknown [Arabidopsis thaliana]
  misc_feature (1)..(126): Homolog of NCBI NO: 18414493 NR Description: expressed integral membrane protein common family

SEQ ID NO: 51650 - DNA, 1207 bp, Glycine max
  misc_feature (1)..(1207): Ceres Seq. ID no. 15171390
atatatgtattgcgcgcaattcagatctagcttttgcacaatgcaagttctataggctcgtttggttttgccgattagtgtttactgaaacaacgttttttgtgatatcgagaaaaaaaaaaagagtgatgtcgaggagaccggggaatcctactagaaggttcggtgacaatggcggtggattgttctcttcgaaatctaggtcgccaccggttttgtctattgcgcttgtaattgtgggaggtttgtttctcattggctatatgtatagaggctcaggtggatctagcagccgtatagattctgttagcagggttgaaggtgattatttgtgcagtggagaggtccaacaagcaattccccttttacagaaagcatatggagatagcatgcataaagttttgcatgttggtcctgatacttgttatgtggtctctaaattgctgaaggaggatgaaactgacgcctggggaatagaaccatatgatatagaggatgctgataataattgcaaagcacttatacgtagaggcagtgtgcgtgtgtctgatatcaagtttcctcttccatacaggccaaaatctttctctcttgtaattgtttcagatgctctggattacctgtctcccagatacctcaataaaactcttccagatttggtgagagtagcatctgatggtgtagtgatatttactggttttcccaccactcaaaaggccaaggtagcggatgtttctaaatttggaaaagcggccaagatgaggagttcatcctggtgggtcaagtttttcctccagattaacttagaggagaatgaagctgctgttaagaagtttgaactggcttcatccaagagttcatatgttccgaaatgccagatattccacttgaagtcactccattgacttgtgggatgattcagcattggagctctgttgctgcttctccattttcatttaaaacactttcttctctataaaggtaatttaattcttggaaatatactcgccatagatggtgtatcatttttgttgatagatttttattctttgaattccagcccctgactgtaaaagacacatcaatttagtatttttactaaattattagttgaattaggcaatctataagtaagtcgcagtgattgttgtgcgaaagtaatattacttcttttgttgagatataaagataaaaattaaatgtcatc

SEQ ID NO: 51651 - protein, 300 aa, Glycine max
  peptide (1)..(300): Ceres Seq. ID no. 15171391
  misc_feature (130)..(300): Homolog of NCBI NO: 16649137 NR Description: Unknown protein [Arabidopsis thaliana]
  misc_feature (43)..(249): Homolog of NCBI NO: 9758568 NR Description: emb|CAB66910.1~gene_id:K22J17.2~similar to
  misc_feature (43)..(298): Homolog of NCBI NO: 34895744 NR Description: P0019D06.30 [Oryza sativa (japonica
  misc_feature (43)..(300): Homolog of NCBI NO: 18424995 NR Description: expressed protein [Arabidopsis thaliana]
  misc_feature (43)..(300): Homolog of NCBI NO: 18408931 NR Description: expressed protein [Arabidopsis thaliana]
  misc_feature (43)..(300): Homolog of NCBI NO: 21593192 NR Description: unknown [Arabidopsis thaliana]
ICIARNSDLAFAQCKFYRLVWFCRLVFTETTFFVISRKKKRVMSRRPGNPTRRFGDNGGGLFSSKSRSPPVLSIALVIVGGLFLIGYMYRGSGGSSSRIDSVSRVEGDYLCSGEVQQAIPLLQKAYGDSMHKVLHVGPDTCYVVSKLLKEDETDAWGIEPYDIEDADNNCKALIRRGSVRVSDIKFPLPYRPKSFSLVIVSDALDYLSPRYLNKTLPDLVRVASDGVVIFTGFPTTQKAKVADVSKFGKAAKMRSSSWWVKFFLQINLEENEAAVKKFELASSKSSYVPKCQIFHLKSLH

SEQ ID NO: 51652 - protein, 258 aa, Glycine max
  peptide (1)..(258): Ceres Seq. ID no. 15171392
  misc_feature (88)..(258): Homolog of NCBI NO: 16649137 NR Description: Unknown protein [Arabidopsis thaliana]
  misc_feature (1)..(207): Homolog of NCBI NO: 9758568 NR Description: emb|CAB66910.1~gene_id:K22J17.2~similar to
  misc_feature (1)..(256): Homolog of NCBI NO: 34895744 NR Description: P0019D06.30 [Oryza sativa (japonica
  misc_feature (1)..(258): Homolog of NCBI NO: 18424995 NR Description: expressed protein [Arabidopsis thaliana]
  misc_feature (1)..(258): Homolog of NCBI NO: 18408931 NR Description: expressed protein [Arabidopsis thaliana]
  misc_feature (1)..(258): Homolog of NCBI NO: 21593192 NR Description: unknown [Arabidopsis thaliana]
MSRRPGNPTRRFGDNGGGLFSSKSRSPPVLSIALVIVGGLFLIGYMYRGSGGSSSRIDSVSRVEGDYLCSGEVQQAIPLLQKAYGDSMHKVLHVGPDTCYVVSKLLKEDETDAWGIEPYDIEDADNNCKALIRRGSVRVSDIKFPLPYRPKSFSLVIVSDALDYLSPRYLNKTLPDLVRVASDGVVIFTGFPTTQKAKVADVSKFGKAAKMRSSSWWVKFFLQINLEENEAAVKKFELASSKSSYVPKCQIFHLKSLH

SEQ ID NO: 51653 - protein, 213 aa, Glycine max
  peptide (1)..(213): Ceres Seq. ID no. 15171393
  misc_feature (43)..(213): Homolog of NCBI NO: 16649137 NR Description: Unknown protein [Arabidopsis thaliana]
  misc_feature (1)..(162): Homolog of NCBI NO: 9758568 NR Description: emb|CAB66910.1~gene_id:K22J17.2~similar to
  misc_feature (1)..(211): Homolog of NCBI NO: 34895744 NR Description: P0019D06.30 [Oryza sativa (japonica
  misc_feature (1)..(213): Homolog of NCBI NO: 18424995 NR Description: expressed protein [Arabidopsis thaliana]
  misc_feature (1)..(213): Homolog of NCBI NO: 18408931 NR Description: expressed protein [Arabidopsis thaliana]
  misc_feature (1)..(213): Homolog of NCBI NO: 21593192 NR Description: unknown [Arabidopsis thaliana]
MYRGSGGSSSRIDSVSRVEGDYLCSGEVQQAIPLLQKAYGDSMHKVLHVGPDTCYVVSKLLKEDETDAWGIEPYDIEDADNNCKALIRRGSVRVSDIKFPLPYRPKSFSLVIVSDALDYLSPRYLNKTLPDLVRVASDGVVIFTGFPTTQKAKVADVSKFGKAAKMRSSSWWVKFFLQINLEENEAAVKKFELASSKSSYVPKCQIFHLKSLH

SEQ ID NO: 51654 - DNA, 1259 bp, Glycine max
  misc_feature (1)..(1259): Ceres Seq. ID no. 14311862
acaaatattgaaaaacgatttgctttgttaatttgatggcgttgattctccttttatttcttggtatgagcatatcatactacgaagttgatgcaaggagcaaaaatctaccagatatgcaacagagttttaccagatcactaaatttgaagagcattcttcctacaatgaacagtgactttgagtgcatcggtatatacaagcaaccagcttttaaacatcgtttgttgaaaaaccacaaaatccagcttaatccgactttctcaaggtacacgatgcaaaccagactgccgttcatggaaaaaacttttcaaattcataattccaacaaaggatgcccttcaggaaaagtgcctattcgcatgctaaaactgaggcaagaaatcaactataatttttcagaatcacaacctgaaaattttcgtcaatattcccggaacccctatcaacattttgctacccttgagacaactccaagtacaacctatcacggagcaagtgcatggatcagcgccagtgataatctattggtgcaagggacccaatatagcctttcccagatttggcttcaaaatggtcctctttcagaacttaacagtattcaagtcggagtcggtgttaatcccagagtatatggagacgataagccacatctcgctagcttttggacaggggataattttaaaaaaaccggatgttttgatgctatctgcccaggttttgtgcaagtgcatcctcgtattaccttaggacaaaccattgaaccctcatttacaggtggattagatggcaaagactatattgctatcaaagtgacacaggattcagtatcaggccattggtggttgcatgtagaaggaagtgatggaagtgaagatgttgggtattggccaaaggaaatattcactcacttacgcaaaggatcatctttgattaaatttggaggtgaagcttatggaccccctaatattggaagtcctccaatgggtactggaaaattgccaaagacttcatttcctaactcaggtttctttgcaagacttcaaattgtggattcaaaatttagggaacttgatgtgaatcctatagacatgaagtcatattgtgacaccagttcagattgctatgatttgttgtatcatggagatcaaggggctcaatttaggcaagcttttctctttggtggtcctggcggccaatgtggtgtataactaaatttataattacatccattttcaataaatgttcagtttattatc

SEQ ID NO: 51655 - protein, 391 aa, Glycine max
  peptide (1)..(391): Ceres Seq. ID no. 14311863
  misc_feature (151)..(347): Pfam Name: Arabidopsis proteins of unknown function Pfam Description: Arabidopsis proteins of unknown function
  misc_feature (95)..(386): Homolog of NCBI NO: 27311623 NR Description: unknown protein [Arabidopsis thaliana]
  misc_feature (3)..(112): Homolog of NCBI NO: 15222707 NR Description: expressed protein [Arabidopsis thaliana]
  misc_feature (95)..(386): Homolog of NCBI NO: 15222707 NR Description: expressed protein [Arabidopsis thaliana]
  misc_feature (1)..(112): Homolog of NCBI NO: 15241244 NR Description: expressed protein [Arabidopsis thaliana]
  misc_feature (93)..(386): Homolog of NCBI NO: 15241244 NR Description: expressed protein [Arabidopsis thaliana]
  misc_feature (38)..(112): Homolog of NCBI NO: 34393299 NR Description: putative DD1A protein [Oryza sativa (japonica
  misc_feature (99)..(386): Homolog of NCBI NO: 34393299 NR Description: putative DD1A protein [Oryza sativa (japonica
  misc_feature (95)..(390): Homolog of NCBI NO: 15226935 NR Description: hypothetical protein [Arabidopsis thaliana]
  misc_feature (37)..(359): Homolog of NCBI NO: 15225868 NR Description: hypothetical protein [Arabidopsis thaliana]
  misc_feature (73)..(391): Homolog of NCBI NO: 30687450 NR Description: expressed protein [Arabidopsis thaliana]
MALILLLFLGMSISYYEVDARSKNLPDMQQSFTRSLNLKSILPTMNSDFECIGIYKQPAFKHRLLKNHKIQLNPTFSRYTMQTRLPFMEKTFQIHNSNKGCPSGKVPIRMLKLRQEINYNFSESQPENFRQYSRNPYQHFATLETTPSTTYHGASAWISASDNLLVQGTQYSLSQIWLQNGPLSELNSIQVGVGVNPRVYGDDKPHLASFWTGDNFKKTGCFDAICPGFVQVHPRITLGQTIEPSFTGGLDGKDYIAIKVTQDSVSGHWWLHVEGSDGSEDVGYWPKEIFTHLRKGSSLIKFGGEAYGPPNIGSPPMGTGKLPKTSFPNSGFFARLQIVDSKFRELDVNPIDMKSYCDTSSDCYDLLYHGDQGAQFRQAFLFGGPGGQCGV

SEQ ID NO: 51656 - protein, 381 aa, Glycine max
  peptide (1)..(381): Ceres Seq. ID no. 14311864
  misc_feature (141)..(337): Pfam Name: Arabidopsis proteins of unknown function Pfam Description: Arabidopsis proteins of unknown function
  misc_feature (85)..(376): Homolog of NCBI NO: 27311623 NR Description: unknown protein [Arabidopsis thaliana]
  misc_feature (1)..(102): Homolog of NCBI NO: 15222707 NR Description: expressed protein [Arabidopsis thaliana]
  misc_feature (85)..(376): Homolog of NCBI NO: 15222707 NR Description: expressed protein [Arabidopsis thaliana]
  misc_feature (1)..(102): Homolog of NCBI NO: 15241244 NR Description: expressed protein [Arabidopsis thaliana]
  misc_feature (83)..(376): Homolog of NCBI NO: 15241244 NR Description: expressed protein [Arabidopsis thaliana]
  misc_feature (28)..(102): Homolog of NCBI NO: 34393299 NR Description: putative DD1A protein [Oryza sativa (japonica
  misc_feature (89)..(376): Homolog of NCBI NO: 34393299 NR Description: putative DD1A protein [Oryza sativa (japonica
  misc_feature (85)..(380): Homolog of NCBI NO: 15226935 NR Description: hypothetical protein [Arabidopsis thaliana]
  misc_feature (27)..(349): Homolog of NCBI NO: 15225868 NR Description: hypothetical protein [Arabidopsis thaliana]
  misc_feature (63)..(381): Homolog of NCBI NO: 30687450 NR Description: expressed protein [Arabidopsis thaliana]
MSISYYEVDARSKNLPDMQQSFTRSLNLKSILPTMNSDFECIGIYKQPAFKHRLLKNHKIQLNPTFSRYTMQTRLPFMEKTFQIHNSNKGCPSGKVPIRMLKLRQEINYNFSESQPENFRQYSRNPYQHFATLETTPSTTYHGASAWISASDNLLVQGTQYSLSQIWLQNGPLSELNSIQVGVGVNPRVYGDDKPHLASFWTGDNFKKTGCFDAICPGFVQVHPRITLGQTIEPSFTGGLDGKDYIAIKVTQDSVSGHWWLHVEGSDGSEDVGYWPKEIFTHLRKGSSLIKFGGEAYGPPNIGSPPMGTGKLPKTSFPNSGFFARLQIVDSKFRELDVNPIDMKSYCDTSSDCYDLLYHGDQGAQFRQAFLFGGPGGQCGV

SEQ ID NO: 51657 - protein, 364 aa, Glycine max
  peptide (1)..(364): Ceres Seq. ID no. 14311865
  misc_feature (124)..(320): Pfam Name: Arabidopsis proteins of unknown function Pfam Description: Arabidopsis proteins of unknown function
  misc_feature (68)..(359): Homolog of NCBI NO: 27311623 NR Description: unknown protein [Arabidopsis thaliana]
  misc_feature (1)..(85): Homolog of NCBI NO: 15222707 NR Description: expressed protein [Arabidopsis thaliana]
  misc_feature (68)..(359): Homolog of NCBI NO: 15222707 NR Description: expressed protein [Arabidopsis thaliana]
  misc_feature (1)..(85): Homolog of NCBI NO: 15241244 NR Description: expressed protein [Arabidopsis thaliana]
  misc_feature (66)..(359): Homolog of NCBI NO: 15241244 NR Description: expressed protein [Arabidopsis thaliana]
  misc_feature (11)..(85): Homolog of NCBI NO: 34393299 NR Description: putative DD1A protein [Oryza sativa (japonica
  misc_feature (72)..(359): Homolog of NCBI NO: 34393299 NR Description: putative DD1A protein [Oryza sativa (japonica
  misc_feature (68)..(363): Homolog of NCBI NO: 15226935 NR Description: hypothetical protein [Arabidopsis thaliana]
  misc_feature (10)..(332): Homolog of NCBI NO: 15225868 NR Description: hypothetical protein [Arabidopsis thaliana]
  misc_feature (46)..(364): Homolog of NCBI NO: 30687450 NR Description: expressed protein [Arabidopsis thaliana]
MQQSFTRSLNLKSILPTMNSDFECIGIYKQPAFKHRLLKNHKIQLNPTFSRYTMQTRLPFMEKTFQIHNSNKGCPSGKVPIRMLKLRQEINYNFSESQPENFRQYSRNPYQHFATLETTPSTTYHGASAWISASDNLLVQGTQYSLSQIWLQNGPLSELNSIQVGVGVNPRVYGDDKPHLASFWTGDNFKKTGCFDAICPGFVQVHPRITLGQTIEPSFTGGLDGKDYIAIKVTQDSVSGHWWLHVEGSDGSEDVGYWPKEIFTHLRKGSSLIKFGGEAYGPPNIGSPPMGTGKLPKTSFPNSGFFARLQIVDSKFRELDVNPIDMKSYCDTSSDCYDLLYHGDQGAQFRQAFLFGGPGGQCGV

SEQ ID NO: 51658 - DNA, 1217 bp, Glycine max
  misc_feature (1)..(1217): Ceres Seq. ID no. 14311859
gttgtgttgttaggcttgtttgtattgtgttagtaccattttctaatctcatcatctaacccttccatcgtagtttccacatttctcctaccgaaaagtcaaaactacccactcacccaggtaggcacaggcagcgatggacgtaggagccggcgacgatcattccccggaagccgtcatatcgcggtggaaattcgcggtgtcgcagcagtaccagcacatgctggacaaaacgacgccgcacgttctccggcggtggatcgggtgcctggtggttgccgccgtgtacgtgctccgcgtgtacttggtccaaggcttctacatcgtctcctacgccctcggcatttacatcctcaacctcctcatcggcttcctctcccctcaggtcgatcccgagattagcgacggccccaccctccccacccgaggatccgacgagttccgccctttcgttcgacgcctccccgagttcaagttctggtactcgatcacaaaggctttttgcattgcatttgtgatgactttctttagtgcatttgatgttccagtattctggccaatactccttttctactgggtggttctattcacacttacaatgaggagacaaatatcacacatgatcaaatacaaatatgtaccattctcatttgggaaactgcgctatgatggaaagagagcagcagaaggcacaagcccgaccatggactgaaattttcagcttaattgaactttatttgccacattttttaagtcacaaccccgcatgtggcttgatatcattggctgaagaagattctttgaggtctagtatgggcgtatacatctggatgttcaattcccaattgagcaactgtttggacatcatcattgtttctatgccctggtagtggtagaagctttagctttggggagatgttgagggctctctctttacatcccccttctagtaaaatcatttttctttattttcttttttctaaataggtgggcaaatgccaaactcttattgttaaattcatagttaaataacgagaattttaagaagcctgtgcagaaggaatccccttcattatttgcaatgggggtattaacgatctgtcttttccattgtattttttttttcttcattttaatcatgtgattctcatgaacttaatttttttttatatagatttgcccatataatactattacctccttgaggttttcttggt

SEQ ID NO: 51659 - protein, 191 aa, Glycine max
  peptide (1)..(191): Ceres Seq. ID no. 14311860
  misc_feature (2)..(180): Pfam Name: Rer1 family Pfam Description: Rer1 family
  misc_feature (9)..(188): Homolog of NCBI NO: 7688699 NR Description: RER1 protein [Homo sapiens]
  misc_feature (5)..(174): Homolog of NCBI NO: 7488292 NR Description: probable integral membrane protein At2g23310
  misc_feature (116)..(174): Homolog of NCBI NO: 35210534 NR Description: putative endoplasmatic reticulum retrieval
  misc_feature (1)..(116): Homolog of NCBI NO: 35210534 NR Description: putative endoplasmatic reticulum retrieval
  misc_feature (5)..(183): Homolog of NCBI NO: 30682033 NR Description: integral membrane protein -related [Arabidopsis
  misc_feature (5)..(183): Homolog of NCBI NO: 18400234 NR Description: integral membrane protein -related [Arabidopsis
  misc_feature (1)..(174): Homolog of NCBI NO: 34894094 NR Description: putative Rer1A protein (AtRer1A)
  misc_feature (1)..(183): Homolog of NCBI NO: 15226596 NR Description: AtRer1B [Arabidopsis thaliana]
  misc_feature (1)..(183): Homolog of NCBI NO: 11281669 NR Description: endoplasmatic reticulum retrieval protein Rer1B
  misc_feature (1)..(186): Homolog of NCBI NO: 15234975 NR Description: AtRer1A [Arabidopsis thaliana]
MDVGAGDDHSPEAVISRWKFAVSQQYQHMLDKTTPHVLRRWIGCLVVAAVYVLRVYLVQGFYIVSYALGIYILNLLIGFLSPQVDPEISDGPTLPTRGSDEFRPFVRRLPEFKFWYSITKAFCIAFVMTFFSAFDVPVFWPILLFYWVVLFTLTMRRQISHMIKYKYVPFSFGKLRYDGKRAAEGTSPTMD

SEQ ID NO: 51660 - protein, 163 aa, Glycine max
  peptide (1)..(163): Ceres Seq. ID no. 14311861
  misc_feature (1)..(152): Pfam Name: Rer1 family Pfam Description: Rer1 family
  misc_feature (1)..(160): Homolog of NCBI NO: 7688699 NR Description: RER1 protein [Homo sapiens]
  misc_feature (1)..(146): Homolog of NCBI NO: 7488292 NR Description: probable integral membrane protein At2g23310
  misc_feature (88)..(146): Homolog of NCBI NO: 35210534 NR Description: putative endoplasmatic reticulum retrieval
  misc_feature (1)..(88): Homolog of NCBI NO: 35210534 NR Description: putative endoplasmatic reticulum retrieval
  misc_feature (1)..(155): Homolog of NCBI NO: 30682033 NR Description: integral membrane protein -related [Arabidopsis
  misc_feature (1)..(155): Homolog of NCBI NO: 18400234 NR Description: integral membrane protein -related [Arabidopsis
  misc_feature (1)..(146): Homolog of NCBI NO: 34894094 NR Description: putative Rer1A protein (AtRer1A)
  misc_feature (1)..(155): Homolog of NCBI NO: 15226596 NR Description: AtRer1B [Arabidopsis thaliana]
  misc_feature (1)..(155): Homolog of NCBI NO: 11281669 NR Description: endoplasmatic reticulum retrieval protein Rer1B
  misc_feature (1)..(158): Homolog of NCBI NO: 15234975 NR Description: AtRer1A [Arabidopsis thaliana]
MLDKTTPHVLRRWIGCLVVAAVYVLRVYLVQGFYIVSYALGIYILNLLIGFLSPQVDPEISDGPTLPTRGSDEFRPFVRRLPEFKFWYSITKAFCIAFVMTFFSAFDVPVFWPILLFYWVVLFTLTMRRQISHMIKYKYVPFSFGKLRYDGKRAAEGTSPTMD

SEQ ID NO: 51661 - DNA, 1234 bp, Glycine max
  misc_feature (1)..(1234): Ceres Seq. ID no. 15171406
aaaaccaaccaaattaccaaagttacaaactcccttaagagaagaaaacaaaaataaaaataaaattaaaaaaaaacacatgtttttgttcactaaacaattaaagaaaaaataaatgcttcttaaccacattggcgccggattctgttgggtggacccgccacgacccgacccgaatcccagaacccgaataggcccctcgcgttttcatcgacggggggcctcgacgccgcgtccggcgaggcatgcggcgttccacggagtgcgaatggagaagaaaggcggcaagcggcggtcgatatgcaccgccgacgagcttcaccgcgtggcagtttcgaactccaattggaagctcgctctgtggcgctaccgtccttctcctgaggccctgtcgaggaatcacccgcttttgttgttgtcaggggttgctaccaatgcaataggctatgatctttctcctgagtcttcatttgctcggtacatgtcagcccaaggtttcgatacatggattcttgaggttcgaggtgctgggttgagcacacttggagatagcttggaggaagatgaggaatgcctcaagaatttttctaagattgattctgttattaatgatgatattggtgaaagcagtgcttcttttgtatcagaagttcctcatatgaaaacgagaggatcagaggtagtaactaaatatgaggaaatgcagctaatgacgaggttcatggagattcttacaaggatatctgaaaggcttgcaggatttctcaatggagatttgttggaaggacagaactctgcaattgctggacaaatcaaggatttcaatcggaggcttcgagctattattgaaggtcagctgttgttcccagcaaaaattttagaattgcaagaccgttttgctgccaatctagaagagttccagaaacagcttgagctgatggtcaagtatgattgggactttgaccattatttggaagaggacgtacctgctgctgtgagatgactttcctttgggatacattacttttagcaagatctgtacttttaactattttgttacttcttttgtgtaattttaatatttgtttgttccactatatattggcctaaaatttttggatgttctcattaaatttgtttttcaattgttggtttgataattcgtacattagatggagtacataagggctcaatgccaaccaagagatggaaaattgctggcaattggtcactc

SEQ ID NO: 51662 - protein, 295 aa, Glycine max
  peptide (1)..(295): Ceres Seq. ID no. 15171407
  misc_feature (15)..(90): Homolog of NCBI NO: 34911394 NR Description: similar to Arabidopsis thaliana chromosome 1,
  misc_feature (90)..(272): Homolog of NCBI NO: 34911394 NR Description: similar to Arabidopsis thaliana chromosome 1,
  misc_feature (62)..(294): Homolog of NCBI NO: 38637529 NR Description: unknown protein [Oryza sativa (japonica
  misc_feature (28)..(269): Homolog of NCBI NO: 19699290 NR Description: At1g15070/F9L1_1 [Arabidopsis thaliana]
  misc_feature (28)..(269): Homolog of NCBI NO: 15220945 NR Description: expressed protein [Arabidopsis thaliana]
  misc_feature (28)..(269): Homolog of NCBI NO: 25372839 NR Description: F9L1.1 protein - Arabidopsis thaliana
  misc_feature (225)..(294): Homolog of NCBI NO: 25372838 NR Description: unknown protein F25P22.17 [imported] -
  misc_feature (62)..(143): Homolog of NCBI NO: 25372838 NR Description: unknown protein F25P22.17 [imported] -
  misc_feature (225)..(294): Homolog of NCBI NO: 18410446 NR Description: expressed protein [Arabidopsis thaliana]
  misc_feature (62)..(143): Homolog of NCBI NO: 18410446 NR Description: expressed protein [Arabidopsis thaliana]
MLLNHIGAGFCWVDPPRPDPNPRTRIGPSRFHRRGASTPRPARHAAFHGVRMEKKGGKRRSICTADELHRVAVSNSNWKLALWRYRPSPEALSRNHPLLLLSGVATNAIGYDLSPESSFARYMSAQGFDTWILEVRGAGLSTLGDSLEEDEECLKNFSKIDSVINDDIGESSASFVSEVPHMKTRGSEVVTKYEEMQLMTRFMEILTRISERLAGFLNGDLLEGQNSAIAGQIKDFNRRLRAIIEGQLLFPAKILELQDRFAANLEEFQKQLELMVKYDWDFDHYLEEDVPAAVR

SEQ ID NO: 51663 - protein, 244 aa, Glycine max
  peptide (1)..(244): Ceres Seq. ID no. 15171408
  misc_feature (1)..(39): Homolog of NCBI NO: 34911394 NR Description: similar to Arabidopsis thaliana chromosome 1,
  misc_feature (39)..(221): Homolog of NCBI NO: 34911394 NR Description: similar to Arabidopsis thaliana chromosome 1,
  misc_feature (11)..(243): Homolog of NCBI NO: 38637529 NR Description: unknown protein [Oryza sativa (japonica
  misc_feature (1)..(218): Homolog of NCBI NO: 19699290 NR Description: At1g15070/F9L1_1 [Arabidopsis thaliana]
  misc_feature (1)..(218): Homolog of NCBI NO: 15220945 NR Description: expressed protein [Arabidopsis thaliana]
  misc_feature (1)..(218): Homolog of NCBI NO: 25372839 NR Description: F9L1.1 protein - Arabidopsis thaliana
  misc_feature (174)..(243): Homolog of NCBI NO: 25372838 NR Description: unknown protein F25P22.17 [imported] -
  misc_feature (11)..(92): Homolog of NCBI NO: 25372838 NR Description: unknown protein F25P22.17 [imported] -
  misc_feature (174)..(243): Homolog of NCBI NO: 18410446 NR Description: expressed protein [Arabidopsis thaliana]
  misc_feature (11)..(92): Homolog of NCBI NO: 18410446 NR Description: expressed protein [Arabidopsis thaliana]
MEKKGGKRRSICTADELHRVAVSNSNWKLALWRYRPSPEALSRNHPLLLLSGVATNAIGYDLSPESSFARYMSAQGFDTWILEVRGAGLSTLGDSLEEDEECLKNFSKIDSVINDDIGESSASFVSEVPHMKTRGSEVVTKYEEMQLMTRFMEILTRISERLAGFLNGDLLEGQNSAIAGQIKDFNRRLRAIIEGQLLFPAKILELQDRFAANLEEFQKQLELMVKYDWDFDHYLEEDVPAAVR

SEQ ID NO: 51664 - protein, 173 aa, Glycine max
  peptide (1)..(173): Ceres Seq. ID no. 15171409
  misc_feature (46)..(172): Homolog of NCBI NO: 34911394 NR Description: similar to Arabidopsis thaliana chromosome 1,
  misc_feature (1)..(150): Homolog of NCBI NO: 34911394 NR Description: similar to Arabidopsis thaliana chromosome 1,
  misc_feature (1)..(172): Homolog of NCBI NO: 38637529 NR Description: unknown protein [Oryza sativa (japonica
  misc_feature (1)..(147): Homolog of NCBI NO: 19699290 NR Description: At1g15070/F9L1_1 [Arabidopsis thaliana]
  misc_feature (1)..(147): Homolog of NCBI NO: 15220945 NR Description: expressed protein [Arabidopsis thaliana]
  misc_feature (1)..(147): Homolog of NCBI NO: 25372839 NR Description: F9L1.1 protein - Arabidopsis thaliana
  misc_feature (103)..(172): Homolog of NCBI NO: 25372838 NR Description: unknown protein F25P22.17 [imported] -
  misc_feature (1)..(21): Homolog of NCBI NO: 25372838 NR Description: unknown protein F25P22.17 [imported] -
  misc_feature (103)..(172): Homolog of NCBI NO: 18410446 NR Description: expressed protein [Arabidopsis thaliana]
  misc_feature (1)..(21): Homolog of NCBI NO: 18410446 NR Description: expressed protein [Arabidopsis thaliana]
MSAQGFDTWILEVRGAGLSTLGDSLEEDEECLKNFSKIDSVINDDIGESSASFVSEVPHMKTRGSEVVTKYEEMQLMTRFMEILTRISERLAGFLNGDLLEGQNSAIAGQIKDFNRRLRAIIEGQLLFPAKILELQDRFAANLEEFQKQLELMVKYDWDFDHYLEEDVPAAVR

SEQ ID NO: 51665 - DNA, 1854 bp, Glycine max
  misc_feature (1)..(1854): Ceres Seq. ID no. 15171438
agtttccattttccaatcaaagtctcttattcctctttgtattaattttttcctcttctcccttttcattttccggtggcaattcaaatcgcactctttgcgtttgtgctgatccactgtgaatgaaaaaaacaaaactaagagagagaagagagaaaaattacaacaacattattatttattgtaactaattagctaattaattggttattaaaaattataaggccatgtttggcgaaaccgttccgcgaccacagttcatgcaatcggagccgagaatgtcgacgacggaggcgctcaccgacgacgagttcacgatgcaaagcagtagcacggcgtcaccgatgagcccttactactacgagcagggaaggttaagcggcgaaggctcgccaatgacgatgtcaccgtggaaccagacaacgaactccccattctccaaacctcaatggtctcaagaacaaaacagcgtcccgcaaaacgcgctcgtaggttctcttgtccgagaagagggacacatctattcgcttgctgcttccggcgatcttctgtacaccggttccgacagcaagaatattcgtgtctggaagaacctcgaggaatattccgggttcaaatccaacagtggtttggtgaaaaccataatattgtctggtcagaagatcttcaccggtcaccaagacggcaaaatccgcgtctggaaggtctcccctaagaaccctagcttacacaaacgtgccggcacgttgccaacgcttaaagacatcttcaagagctcaattaagcccagcaactacgtcgaggttcgacgacacaaaacggcgttatggatcagacactccgatgccgtttcgtgtttgagcctttcagcagacaaaacgtatttatactccgcatcgtgggacaggacaatcaaggtgtggaggatttcagactccaaatgcttggaatcaatccacgcccacgacgacgcggtgaacgccgtcgtgtgcggggacgggggcgtgatgttttccggctcggcggacggcaccgtcaaggtgtggcggcgggagccgcgagggaaaggcctgaagcacgccccggtgaagactctgctgaagcaggagtgcgcggtgacggcgctggcgatggacgcggcggggggatcgatggtgtactgcggcgcctccgacggactggtgaacttttgggaaagcgacaagaattacgcgcacggtggggttttgaagggccacaagctcgcggtgctgtgcctcaccgcagcggggacgttagtgttcagcggttccgcggataagaccatatgcgtgtggaaacgcgagggtttgattcacacgtgcatgtcggttctcacgggccacgacggtccggtgaagtgcctcgccgtggaggaggaccgcaaagccgccgcgaaaggtgaccgggaacggctttggagtttgtacagtgggagtttggataagtcggtgaagatttggagtgtttccgaatcaatgaataatgataataataataacaatagtaatgatcaggtgaggcaccaccgcatggcatctgatgcggactcgttgccttctgtatcagatagtagtttctcttcgggcaggaccaatgggaggaactgagaatgggccacgtgtctttatgagatgattgagcatttgtgtttttttttttttttttttttgtgattgattgattgattgtgagagattgtggtcgaagatgtttatgaaatttgatgtaatataatgtaatttgtgtatgaatgaacggatgaagtagttaaagaaatgactatatatatggttaatggttttcttgaatagaaatatcagattttgatgaatt

SEQ ID NO: 51666 - protein, 466 aa, Glycine max
  peptide (1)..(466): Ceres Seq. ID no. 15171439
  misc_feature (371)..(418): Pfam Name: WD domain, G-beta repeat Pfam Description: WD domain, G-beta repeat
  misc_feature (96)..(432): Homolog of NCBI NO: 15231088 NR Description: transducin / WD-40 repeat protein family
  misc_feature (77)..(423): Homolog of NCBI NO: 15221675 NR Description: transducin / WD-40 repeat protein family
  misc_feature (85)..(420): Homolog of NCBI NO: 15220271 NR Description: transducin / WD-40 repeat protein family
  misc_feature (83)..(422): Homolog of NCBI NO: 31126785 NR Description: putative WD repeat-protein
  misc_feature (44)..(423): Homolog of NCBI NO: 15229740 NR Description: transducin / WD-40 repeat protein family
  misc_feature (33)..(422): Homolog of NCBI NO: 17979259 NR Description: At1g49450/F13F21_11 [Arabidopsis thaliana]
  misc_feature (11)..(423): Homolog of NCBI NO: 15230244 NR Description: transducin / WD-40 repeat protein family
  misc_feature (33)..(422): Homolog of NCBI NO: 15222143 NR Description: transducin / WD-40 repeat protein family
  misc_feature (7)..(424): Homolog of NCBI NO: 15235354 NR Description: transducin / WD-40 repeat protein family
  misc_feature (1)..(459): Homolog of NCBI NO: 15225317 NR Description: transducin / WD-40 repeat protein family
MFGETVPRPQFMQSEPRMSTTEALTDDEFTMQSSSTASPMSPYYYEQGRLSGEGSPMTMSPWNQTTNSPFSKPQWSQEQNSVPQNALVGSLVREEGHIYSLAASGDLLYTGSDSKNIRVWKNLEEYSGFKSNSGLVKTIILSGQKIFTGHQDGKIRVWKVSPKNPSLHKRAGTLPTLKDIFKSSIKPSNYVEVRRHKTALWIRHSDAVSCLSLSADKTYLYSASWDRTIKVWRISDSKCLESIHAHDDAVNAVVCGDGGVMFSGSADGTVKVWRREPRGKGLKHAPVKTLLKQECAVTALAMDAAGGSMVYCGASDGLVNFWESDKNYAHGGVLKGHKLAVLCLTAAGTLVFSGSADKTICVWKREGLIHTCMSVLTGHDGPVKCLAVEEDRKAAAKGDRERLWSLYSGSLDKSVKIWSVSESMNNDNNNNNSNDQVRHHRMASDADSLPSVSDSSFSSGRTNGRN

SEQ ID NO: 51667 - protein, 455 aa, Glycine max
  peptide (1)..(455): Ceres Seq. ID no. 15171440
  misc_feature (360)..(407): Pfam Name: WD domain, G-beta repeat Pfam Description: WD domain, G-beta repeat
  misc_feature (85)..(421): Homolog of NCBI NO: 15231088 NR Description: transducin / WD-40 repeat protein family
  misc_feature (66)..(412): Homolog of NCBI NO: 15221675 NR Description: transducin / WD-40 repeat protein family
  misc_feature (74)..(409): Homolog of NCBI NO: 15220271 NR Description: transducin / WD-40 repeat protein family
  misc_feature (72)..(411): Homolog of NCBI NO: 31126785 NR Description: putative WD repeat-protein
  misc_feature (33)..(412): Homolog of NCBI NO: 15229740 NR Description: transducin / WD-40 repeat protein family
  misc_feature (22)..(411): Homolog of NCBI NO: 17979259 NR Description: At1g49450/F13F21_11 [Arabidopsis thaliana]
  misc_feature (1)..(412): Homolog of NCBI NO: 15230244 NR Description: transducin / WD-40 repeat protein family
  misc_feature (22)..(411): Homolog of NCBI NO: 15222143 NR Description: transducin / WD-40 repeat protein family
  misc_feature (1)..(413): Homolog of NCBI NO: 15235354 NR Description: transducin / WD-40 repeat protein family
  misc_feature (1)..(448): Homolog of NCBI NO: 15225317 NR Description: transducin / WD-40 repeat protein family
MQSEPRMSTTEALTDDEFTMQSSSTASPMSPYYYEQGRLSGEGSPMTMSPWNQTTNSPFSKPQWSQEQNSVPQNALVGSLVREEGHIYSLAASGDLLYTGSDSKNIRVWKNLEEYSGFKSNSGLVKTIILSGQKIFTGHQDGKIRVWKVSPKNPSLHKRAGTLPTLKDIFKSSIKPSNYVEVRRHKTALWIRHSDAVSCLSLSADKTYLYSASWDRTIKVWRISDSKCLESIHAHDDAVNAVVCGDGGVMFSGSADGTVKVWRREPRGKGLKHAPVKTLLKQECAVTALAMDAAGGSMVYCGASDGLVNFWESDKNYAHGGVLKGHKLAVLCLTAAGTLVFSGSADKTICVWKREGLIHTCMSVLTGHDGPVKCLAVEEDRKAAAKGDRERLWSLYSGSLDKSVKIWSVSESMNNDNNNNNSNDQVRHHRMASDADSLPSVSDSSFSSGRTNGRN

SEQ ID NO: 51668 - protein, 449 aa, Glycine max
  peptide (1)..(449): Ceres Seq. ID no. 15171441
  misc_feature (354)..(401): Pfam Name: WD domain, G-beta repeat Pfam Description: WD domain, G-beta repeat
  misc_feature (79)..(415): Homolog of NCBI NO: 15231088 NR Description: transducin / WD-40 repeat protein family
  misc_feature (60)..(406): Homolog of NCBI NO: 15221675 NR Description: transducin / WD-40 repeat protein family
  misc_feature (68)..(403): Homolog of NCBI NO: 15220271 NR Description: transducin / WD-40 repeat protein family
  misc_feature (66)..(405): Homolog of NCBI NO: 31126785 NR Description: putative WD repeat-protein
  misc_feature (27)..(406): Homolog of NCBI NO: 15229740 NR Description: transducin / WD-40 repeat protein family
  misc_feature (16)..(405): Homolog of NCBI NO: 17979259 NR Description: At1g49450/F13F21_11 [Arabidopsis thaliana]
  misc_feature (1)..(406): Homolog of NCBI NO: 15230244 NR Description: transducin / WD-40 repeat protein family
  misc_feature (16)..(405): Homolog of NCBI NO: 15222143 NR Description: transducin / WD-40 repeat protein family
  misc_feature (1)..(407): Homolog of NCBI NO: 15235354 NR Description: transducin / WD-40 repeat protein family
  misc_feature (1)..(442): Homolog of NCBI NO: 15225317 NR Description: transducin / WD-40 repeat protein family
MSTTEALTDDEFTMQSSSTASPMSPYYYEQGRLSGEGSPMTMSPWNQTTNSPFSKPQWSQEQNSVPQNALVGSLVREEGHIYSLAASGDLLYTGSDSKNIRVWKNLEEYSGFKSNSGLVKTIILSGQKIFTGHQDGKIRVWKVSPKNPSLHKRAGTLPTLKDIFKSSIKPSNYVEVRRHKTALWIRHSDAVSCLSLSADKTYLYSASWDRTIKVWRISDSKCLESIHAHDDAVNAVVCGDGGVMFSGSADGTVKVWRREPRGKGLKHAPVKTLLKQECAVTALAMDAAGGSMVYCGASDGLVNFWESDKNYAHGGVLKGHKLAVLCLTAAGTLVFSGSADKTICVWKREGLIHTCMSVLTGHDGPVKCLAVEEDRKAAAKGDRERLWSLYSGSLDKSVKIWSVSESMNNDNNNNNSNDQVRHHRMASDADSLPSVSDSSFSSGRTNGRN

SEQ ID NO: 51669 - DNA, 1538 bp, Glycine max
  misc_feature (1)..(1538): Ceres Seq. ID no. 14315106
acaactttcaacagaagaaactaacaccttccgttactggctttttctgtgtccttggcaaccctttttgctgattttcactgccacaatcacaatcaattgaagaaggaagaaataagaagtttctgggtaatggttcgcggttatatagcctgagctgtgccccattccatacgcaacttttcctccatcattctccttttttttctcaccttaataagtgatggacatcgaagaaatttcagagtcgaatttgggtggttcttcttcttctcacgaggctttggaatcagaagagaagaacatgggtacccagagaatcttggtttcagatcacataaacgcatatcagtattcggctgaggaagctgatagctttgtgattgatatggattccttctcttccggcatcaacaaagatagcaataatgctaattccagaattacattgcagcggagcctttccaggaaaggatctcagcgtgggggcgacaggaaggtgaatggcaatgtcacacttcatgatagggatactgccccaactacatgctcaccaaaagctgctctagcagggtcctgcacggctgaaaagtcagcggtggtggcagtagggtccacacatcattccacaaacacacaagttcatcatcagattactattactgccagtaacatgtgcaccaccaccacccccaccaccgaaagcaaatgtataactcgaagaaatagttttaaacgatcttcttcatggctccttgatcctaaaagagtccttcttttctttgccaccttgtcaagcatgggaacaatgttgctgatatacttcactcttactctcagcaagcaaaatgcagatgaatatgggggtgactggcagcagtgactgatgccactgatttatattggacaaatgagataatgggtcgtgtaaattataaatcctaggattggagcaaaactcaggaacaagaagttgaggacaaatttgcagaactacctgtcagactcaattacctatttgggagctacaaaaggcaaatacaatgacacaatgcactatgatagagaggaaggaatatatttcttttatctgaatggaagccagcaagttagcaacagataaaaaagatcacatgtaagagagtgctctgtagtttattgggagtgtcatttaagggcataacggagttggaggatcagaaagtcactgtttcgctctttctactcagatcttatttttatcccccgtatcttttgttttgctcttgcatgtaatggcaagtgaacctttttctaatgtgtgtaactttagttttaacagtggaaaaaggggaggggaaagtaaaaccaaaaccatgagagctacctacctctacaagctacaaaagtaggcacaaacggcatgcgtgctgaaatacatttttccttacggaagaaactgaaatccacgagtgctttttctagggacaaagaatgtttatatatggggaaacctttcgaaataaactatgtgtataaaagattaagattagtttggt

SEQ ID NO: 51670 - protein, 219 aa, Glycine max
  peptide (1)..(219): Ceres Seq. ID no. 14315107
  misc_feature (140)..(211): Homolog of NCBI NO: 38345628 NR Description: OSJNBb0004A17.8 [Oryza sativa (japonica
  misc_feature (165)..(215): Homolog of NCBI NO: 27261034 NR Description: unknown protein [Oryza sativa (japonica
MDIEEISESNLGGSSSSHEALESEEKNMGTQRILVSDHINAYQYSAEEADSFVIDMDSFSSGINKDSNNANSRITLQRSLSRKGSQRGGDRKVNGNVTLHDRDTAPTTCSPKAALAGSCTAEKSAVVAVGSTHHSTNTQVHHQITITASNMCTTTTPTTESKCITRRNSFKRSSSWLLDPKRVLLFFATLSSMGTMLLIYFTLTLSKQNADEYGGDWQQ

SEQ ID NO: 51671 - protein, 192 aa, Glycine max
  peptide (1)..(192): Ceres Seq. ID no. 14315108
  misc_feature (113)..(184): Homolog of NCBI NO: 38345628 NR Description: OSJNBb0004A17.8 [Oryza sativa (japonica
  misc_feature (138)..(188): Homolog of NCBI NO: 27261034 NR Description: unknown protein [Oryza sativa (japonica
MGTQRILVSDHINAYQYSAEEADSFVIDMDSFSSGINKDSNNANSRITLQRSLSRKGSQRGGDRKVNGNVTLHDRDTAPTTCSPKAALAGSCTAEKSAVVAVGSTHHSTNTQVHHQITITASNMCTTTTPTTESKCITRRNSFKRSSSWLLDPKRVLLFFATLSSMGTMLLIYFTLTLSKQNADEYGGDWQQ

SEQ ID NO: 51672 - protein, 164 aa, Glycine max
  peptide (1)..(164): Ceres Seq. ID no. 14315109
  misc_feature (85)..(156): Homolog of NCBI NO: 38345628 NR Description: OSJNBb0004A17.8 [Oryza sativa (japonica
  misc_feature (110)..(160): Homolog of NCBI NO: 27261034 NR Description: unknown protein [Oryza sativa (japonica
MDSFSSGINKDSNNANSRITLQRSLSRKGSQRGGDRKVNGNVTLHDRDTAPTTCSPKAALAGSCTAEKSAVVAVGSTHHSTNTQVHHQITITASNMCTTTTPTTESKCITRRNSFKRSSSWLLDPKRVLLFFATLSSMGTMLLIYFTLTLSKQNADEYGGDWQQ

SEQ ID NO: 51673 - DNA, 1240 bp, Glycine max
  misc_feature (1)..(1240): Ceres Seq. ID no. 14311894
gccatttcggtcttctccaaacccctttttcctttcgctctcgcgaaacccagcagttcccactctcacaaaccctaaccacggcaccaccacattctctcgcttccccctcccttcagccatgccccaatcacgtcaccgtcgcgtaaccgtcgtcgacctcgccgcctccttagcccgccgccgcgtctcatttatcttcaacgaagctccgactctccgtacccctccaagaaccgccgccttcggtcgcggaagagctcgcgcttctccccgctcccagaacataccgccatcaactgcgcgacgtggtagaggacgcgttccgttacgctccgtgcttccggcgtggttccctaggacaccactccgtgacattactgctgtcgttcaggtaaaagtctaaactaaacgcagcgccgttttttcgtttctttcactttttgattcaatctttttatgtttttgcgtgcgtttttggttaatgctaaggcgatcgagaggagaagtgcgaggctaggagaagtcgaaggccagcgaatcggaaacactgatcctgcttcagatcgtttagtttcggaaccttccgaacctgcttctgcttctgcctctgcctctgcggtgaaatcgccgaaatcagttggagtgaaactccgaacgccgttcgggagcaaggtcccgaagatcttcctcgacatatccgagttaccggaacacgacgaatcggaggctctgacgccgcagaagaagcttctcgacaacatcgatcaggttgaggaagcggtgcgcgaagaactgaacaagctgaagagaactccgagcgcgaagaaaacagagagggaaaagcgggttcgcacattgatgtccatgaggtaaacgaattgagattttgatttttttttcatccacagagccataggcagcagagcaggggtattatagtcattttactctggactgagttgattcagcgggacagtgtttttccggttcgctttgcttgcgtcttcggcttgaagttgcaagatattattctctagttttgtttttactaactttcttgttggaacttttttgattagtagtgttcgttgatagatatatccatcattttcttgtgatggttagtgattcccagctcctgttgtacatatttcccatacatttcgggttggtgattacttcttgtgtaccaattgtaaaacagttcaagataacaatcgattcgttttttggtgcc

SEQ ID NO: 51674 - protein, 138 aa, Glycine max
  peptide (1)..(138): Ceres Seq. ID no. 14311895
  misc_feature (3)..(138): Homolog of NCBI NO: 38344815 NR Description: OSJNBb0022F23.8 [Oryza sativa (japonica
  misc_feature (11)..(138): Homolog of NCBI NO: 15230880 NR Description: expressed protein [Arabidopsis thaliana]
  misc_feature (3)..(138): Homolog of NCBI NO: 15227912 NR Description: expressed protein [Arabidopsis thaliana]
MFLRAFLVNAKAIERRSARLGEVEGQRIGNTDPASDRLVSEPSEPASASASASAVKSPKSVGVKLRTPFGSKVPKIFLDISELPEHDESEALTPQKKLLDNIDQVEEAVREELNKLKRTPSAKKTEREKRVRTLMSMR

SEQ ID NO: 51675 - protein, 134 aa, Glycine max
  peptide (1)..(134): Ceres Seq. ID no. 14311896
  misc_feature (39)..(131): Homolog of NCBI NO: 38344815 NR Description: OSJNBb0022F23.8 [Oryza sativa (japonica
  misc_feature (83)..(131): Homolog of NCBI NO: 15230880 NR Description: expressed protein [Arabidopsis thaliana]
  misc_feature (78)..(131): Homolog of NCBI NO: 15227912 NR Description: expressed protein [Arabidopsis thaliana]
PFRSSPNPFFLSLSRNPAVPTLTNPNHGTTTFSRFPLPSAMPQSRHRRVTVVDLAASLARRRVSFIFNEAPTLRTPPRTAAFGRGRARASPRSQNIPPSTARRGRGRVPLRSVLPAWFPRTPLRDITAVVQVKV

SEQ ID NO: 51676 - protein, 94 aa, Glycine max
  peptide (1)..(94): Ceres Seq. ID no. 14311897
  misc_feature (1)..(91): Homolog of NCBI NO: 38344815 NR Description: OSJNBb0022F23.8 [Oryza sativa (japonica
  misc_feature (43)..(91): Homolog of NCBI NO: 15230880 NR Description: expressed protein [Arabidopsis thaliana]
  misc_feature (38)..(91): Homolog of NCBI NO: 15227912 NR Description: expressed protein [Arabidopsis thaliana]
MPQSRHRRVTVVDLAASLARRRVSFIFNEAPTLRTPPRTAAFGRGRARASPRSQNIPPSTARRGRGRVPLRSVLPAWFPRTPLRDITAVVQVKV

SEQ ID NO: 51677 - DNA, 1252 bp, Glycine max
  misc_feature (1)..(1252): Ceres Seq. ID no. 14311950
ctttcgttgccatttcactccatcagtacagtcacctagcgtttaaccctagagttttggtttggcctttcttctcttctcttcttatttcccacaaaatcatttcacaaagagaagagacagtggatcgcggtttcatttcagaccaaagatggtgcagtggcagagacacgttttcccctttcttcgccacattcacaagcgagcagtggaaccccacgccacccattctgctccaagccttgtaatttctcgcttagcctcttctctttcacaaggtcagttaggaaggagaacatggacaacaacaactttgccctgtttctctagacccatttttctcggtttccaacatcagggaatttcaagttctgctaacttgctggcaaattcatctgaggaaacacctgttttgtcacctttagtcccagtttcattattgggtagttcaaaaggtgaagaccagaagcagaaagttgttactaagcaagaaaaagttcaagcggtattaaaggcaataaaacagagtccaaagaaggtcaacttggttgctgctctggttcgtggtatgcttgttaaagatgcattgatgcagttggaattgacaataaaacgagcagcaaaaactgtatatcaggttattcattcagcccgagcaaatgcctctcacaatcatgggttagatccagaacgactcattgttgcggaagcatttgtaggaaaggggttttacaaaaagagactttggccccatgctaaaggaaaatcgtcgcttagagtaagaccagaatgcaggctaacagttgtagtaagagagataactgctgaagaagaggcagagattgctaggctgagggtccacaacttcaagaaacgcaccaagcgtcagcaacgacttgtgcctcatcagctcattgtgtccaatcctatttggggccgcaaaaacaaatctagtggtaaaaacttgagtgctacacctgcataagctgagcttttgcttgtttccatgcttatgtcatttttcgtgtatggaaacagttgagaaatatatgtctgtcccttgttgcagatgatagaattttgtactggatcatgtttagtattgttctcatttattagcttatttttcttcctactaggtactataaagaatgtcttgttcaatcaccagcatgaatctcctcttgttttgtggggaagtataaacatatgttttttttatttttatttttaaataaaggcgtattcttgc

SEQ ID NO: 51678 - protein, 277 aa, Glycine max
  peptide (1)..(277): Ceres Seq. ID no. 14311951
  misc_feature (118)..(222): Pfam Name: Ribosomal protein L22p/L17e Pfam Description: Ribosomal protein L22p/L17e
  misc_feature (115)..(232): Homolog of NCBI NO: 13470556 NR Description: 50S ribosomal protein L22 [Mesorhizobium loti]
  misc_feature (76)..(226): Homolog of NCBI NO: 23010684 NR Description: hypothetical protein [Magnetospirillum
  misc_feature (112)..(232): Homolog of NCBI NO: 15889237 NR Description: AGR_C_3548p [Agrobacterium tumefaciens]
  misc_feature (112)..(229): Homolog of NCBI NO: 15965114 NR Description: PROBABLE 50S RIBOSOMAL PROTEIN L22 [Sinorhizobium
  misc_feature (70)..(273): Homolog of NCBI NO: 25407603 NR Description: copper-binding protein-like [imported] -
  misc_feature (59)..(266): Homolog of NCBI NO: 34912678 NR Description: P0686E09.8 [Oryza sativa (japonica
  misc_feature (70)..(273): Homolog of NCBI NO: 7485901 NR Description: hypothetical protein F20O9.30 - Arabidopsis
  misc_feature (59)..(277): Homolog of NCBI NO: 25405544 NR Description: hypothetical protein F19K6.5 [imported] -
  misc_feature (1)..(273): Homolog of NCBI NO: 18417177 NR Description: ribosomal protein L22p family [Arabidopsis
  misc_feature (1)..(277): Homolog of NCBI NO: 22330190 NR Description: ribosomal protein L22p family [Arabidopsis
MVQWQRHVFPFLRHIHKRAVEPHATHSAPSLVISRLASSLSQGQLGRRTWTTTTLPCFSRPIFLGFQHQGISSSANLLANSSEETPVLSPLVPVSLLGSSKGEDQKQKVVTKQEKVQAVLKAIKQSPKKVNLVAALVRGMLVKDALMQLELTIKRAAKTVYQVIHSARANASHNHGLDPERLIVAEAFVGKGFYKKRLWPHAKGKSSLRVRPECRLTVVVREITAEEEAEIARLRVHNFKKRTKRQQRLVPHQLIVSNPIWGRKNKSSGKNLSATPA

SEQ ID NO: 51679 - protein, 138 aa, Glycine max
  peptide (1)..(138): Ceres Seq. ID no. 14311952
  misc_feature (1)..(83): Pfam Name: Ribosomal protein L22p/L17e Pfam Description: Ribosomal protein L22p/L17e
  misc_feature (1)..(93): Homolog of NCBI NO: 13470556 NR Description: 50S ribosomal protein L22 [Mesorhizobium loti]
  misc_feature (1)..(87): Homolog of NCBI NO: 23010684 NR Description: hypothetical protein [Magnetospirillum
  misc_feature (1)..(93): Homolog of NCBI NO: 15889237 NR Description: AGR_C_3548p [Agrobacterium tumefaciens]
  misc_feature (1)..(90): Homolog of NCBI NO: 15965114 NR Description: PROBABLE 50S RIBOSOMAL PROTEIN L22 [Sinorhizobium
  misc_feature (1)..(134): Homolog of NCBI NO: 25407603 NR Description: copper-binding protein-like [imported] -
  misc_feature (1)..(127): Homolog of NCBI NO: 34912678 NR Description: P0686E09.8 [Oryza sativa (japonica
  misc_feature (1)..(134): Homolog of NCBI NO: 7485901 NR Description: hypothetical protein F20O9.30 - Arabidopsis
  misc_feature (1)..(138): Homolog of NCBI NO: 25405544 NR Description: hypothetical protein F19K6.5 [imported] -
  misc_feature (1)..(134): Homolog of NCBI NO: 18417177 NR Description: ribosomal protein L22p family [Arabidopsis
  misc_feature (1)..(138): Homolog of NCBI NO: 22330190 NR Description: ribosomal protein L22p family [Arabidopsis
MLVKDALMQLELTIKRAAKTVYQVIHSARANASHNHGLDPERLIVAEAFVGKGFYKKRLWPHAKGKSSLRVRPECRLTVVVREITAEEEAEIARLRVHNFKKRTKRQQRLVPHQLIVSNPIWGRKNKSSGKNLSATPA

SEQ ID NO: 51680 - DNA, 1282 bp, Glycine max
  misc_feature (1)..(1282): Ceres Seq. ID no. 14311515
acaataaactatctattttccaacttcaatattcactgttgttgagtattctaattctaatgaggaacaggggtgtgtgggaagatgcaagcacagcaacagtgcttgtacttgtgctatgttcatcgtatggaattgcagaagtaaagtcacagtcacagaaggtatctggtttgtttgtttttggagattcattggttgaagtaggcaacaataacttcctaaacaccatagcaagggcaaattactttccttacggcatcgacttcggcaggggttccactggccgattttctaatggcaaatccctcattgacttcattggagacttgctgggcattccttctcctccaccttttgcagatccctccactgttggaaccagaatactttatggtgtcaattatgcatcagcttctgccggcattctggatgagtcagggagacactatggtgatcggtatagcctgagccagcaagtcctgaactttgagaacacactgaatcagtataggacaatgatgaatggaagtgcattgaatcagttcttagccaagtctatagcagttgtggtaactggaagcaatgactacatcaacaactacctcctgcctggcttatatggctccagtcgaaattatactgcccaagactttggcaatctacttgttaatagctatgtgcgacaaattttggcactacatagcgtaggattaaggaagttcttcctagcaggaattgggccactgggttgcatccctagtcttcgagccgctgctttagccccaacaggaagatgcgtggacttggttaatcagatggttggaacttttaatgaagggcttagatcaatggtggaccaactcaacagaaaccatcctaatgctatctttgtatacggtaacacttaccgtgtctttggtgatatcctaaataaccccgcggccttcgcgtttaatgttgtggatagagcatgttgtggaataggaaggaaccgaggtcaactaacatgcctcccattacaatttccatgcacaagcagaaaccagtatgtgttttgggatgccttccacccaacagaatctgcaacttatgtcttcgcatggagagttgttaatggagcgcccgatgatagttatccaattaatatgcaacaaatggctaccatttaatccactctatcttcctgtattctcctttcatttataaaccaaaaaagtgtaccaaaagtgaagccaaattctacatctattgttgggtataaaataattacttttgggct

SEQ ID NO: 51681 - protein, 389 aa, Glycine max
  peptide (1)..(389): Ceres Seq. ID no. 14311516
  misc_feature (58)..(369): Pfam Name: GDSL-like Lipase/Acylhydrolase Pfam Description: GDSL-like Lipase/Acylhydrolase
  misc_feature (59)..(389): Homolog of NCBI NO: 15242458 NR Description: GDSL-motif lipase/hydrolase protein [Arabidopsis
  misc_feature (34)..(389): Homolog of NCBI NO: 15220512 NR Description: GDSL-motif lipase/hydrolase protein [Arabidopsis
  misc_feature (34)..(389): Homolog of NCBI NO: 21594055 NR Description: lipase/hydrolase, putative [Arabidopsis thaliana]
  misc_feature (55)..(389): Homolog of NCBI NO: 18409881 NR Description: GDSL-motif lipase/hydrolase protein [Arabidopsis
  misc_feature (35)..(389): Homolog of NCBI NO: 11280578 NR Description: hypothetical protein F14F8_100 - Arabidopsis
  misc_feature (35)..(389): Homolog of NCBI NO: 18417760 NR Description: GDSL-motif lipase/hydrolase protein [Arabidopsis
  misc_feature (34)..(389): Homolog of NCBI NO: 21592417 NR Description: lipase/hydrolase, putative [Arabidopsis thaliana]
  misc_feature (34)..(389): Homolog of NCBI NO: 15220514 NR Description: GDSL-motif lipase/hydrolase protein [Arabidopsis
  misc_feature (58)..(389): Homolog of NCBI NO: 15241626 NR Description: GDSL-motif lipase/hydrolase protein [Arabidopsis
  misc_feature (34)..(389): Homolog of NCBI NO: 15224005 NR Description: GDSL-motif lipase/hydrolase protein [Arabidopsis
NKLSIFQLQYSLLLSILILMRNRGVWEDASTATVLVLVLCSSYGIAEVKSQSQKVSGLFVFGDSLVEVGNNNFLNTIARANYFPYGIDFGRGSTGRFSNGKSLIDFIGDLLGIPSPPPFADPSTVGTRILYGVNYASASAGILDESGRHYGDRYSLSQQVLNFENTLNQYRTMMNGSALNQFLAKSIAVVVTGSNDYINNYLLPGLYGSSRNYTAQDFGNLLVNSYVRQILALHSVGLRKFFLAGIGPLGCIPSLRAAALAPTGRCVDLVNQMVGTFNEGLRSMVDQLNRNHPNAIFVYGNTYRVFGDILNNPAAFAFNVVDRACCGIGRNRGQLTCLPLQFPCTSRNQYVFWDAFHPTESATYVFAWRVVNGAPDDSYPINMQQMATI

SEQ ID NO: 51682 - protein, 370 aa, Glycine max
  peptide (1)..(370): Ceres Seq. ID no. 14311517
  misc_feature (39)..(350): Pfam Name: GDSL-like Lipase/Acylhydrolase Pfam Description: GDSL-like Lipase/Acylhydrolase
  misc_feature (40)..(370): Homolog of NCBI NO: 15242458 NR Description: GDSL-motif lipase/hydrolase protein [Arabidopsis
  misc_feature (15)..(370): Homolog of NCBI NO: 15220512 NR Description: GDSL-motif lipase/hydrolase protein [Arabidopsis
  misc_feature (15)..(370): Homolog of NCBI NO: 21594055 NR Description: lipase/hydrolase, putative [Arabidopsis thaliana]
  misc_feature (36)..(370): Homolog of NCBI NO: 18409881 NR Description: GDSL-motif lipase/hydrolase protein [Arabidopsis
  misc_feature (16)..(370): Homolog of NCBI NO: 11280578 NR Description: hypothetical protein F14F8_100 - Arabidopsis
  misc_feature (16)..(370): Homolog of NCBI NO: 18417760 NR Description: GDSL-motif lipase/hydrolase protein [Arabidopsis
  misc_feature (15)..(370): Homolog of NCBI NO: 21592417 NR Description: lipase/hydrolase, putative [Arabidopsis thaliana]
  misc_feature (15)..(370): Homolog of NCBI NO: 15220514 NR Description: GDSL-motif lipase/hydrolase protein [Arabidopsis
  misc_feature (39)..(370): Homolog of NCBI NO: 15241626 NR Description: GDSL-motif lipase/hydrolase protein [Arabidopsis
  misc_feature (15)..(370): Homolog of NCBI NO: 15224005 NR Description: GDSL-motif lipase/hydrolase protein [Arabidopsis
MRNRGVWEDASTATVLVLVLCSSYGIAEVKSQSQKVSGLFVFGDSLVEVGNNNFLNTIARANYFPYGIDFGRGSTGRFSNGKSLIDFIGDLLGIPSPPPFADPSTVGTRILYGVNYASASAGILDESGRHYGDRYSLSQQVLNFENTLNQYRTMMNGSALNQFLAKSIAVVVTGSNDYINNYLLPGLYGSSRNYTAQDFGNLLVNSYVRQILALHSVGLRKFFLAGIGPLGCIPSLRAAALAPTGRCVDLVNQMVGTFNEGLRSMVDQLNRNHPNAIFVYGNTYRVFGDILNNPAAFAFNVVDRACCGIGRNRGQLTCLPLQFPCTSRNQYVFWDAFHPTESATYVFAWRVVNGAPDDSYPINMQQMATI

SEQ ID NO: 51683 - protein, 217 aa, Glycine max
  peptide (1)..(217): Ceres Seq. ID no. 14311518
  misc_feature (1)..(197): Pfam Name: GDSL-like Lipase/Acylhydrolase Pfam Description: GDSL-like Lipase/Acylhydrolase
  misc_feature (1)..(217): Homolog of NCBI NO: 15242458 NR Description: GDSL-motif lipase/hydrolase protein [Arabidopsis
  misc_feature (1)..(217): Homolog of NCBI NO: 15220512 NR Description: GDSL-motif lipase/hydrolase protein [Arabidopsis
  misc_feature (1)..(217): Homolog of NCBI NO: 21594055 NR Description: lipase/hydrolase, putative [Arabidopsis thaliana]
  misc_feature (1)..(217): Homolog of NCBI NO: 18409881 NR Description: GDSL-motif lipase/hydrolase protein [Arabidopsis
  misc_feature (1)..(217): Homolog of NCBI NO: 11280578 NR Description: hypothetical protein F14F8_100 - Arabidopsis
  misc_feature (1)..(217): Homolog of NCBI NO: 18417760 NR Description: GDSL-motif lipase/hydrolase protein [Arabidopsis
  misc_feature (1)..(217): Homolog of NCBI NO: 21592417 NR Description: lipase/hydrolase, putative [Arabidopsis thaliana]
  misc_feature (1)..(217): Homolog of NCBI NO: 15220514 NR Description: GDSL-motif lipase/hydrolase protein [Arabidopsis
  misc_feature (1)..(217): Homolog of NCBI NO: 15241626 NR Description: GDSL-motif lipase/hydrolase protein [Arabidopsis
  misc_feature (1)..(217): Homolog of NCBI NO: 15224005 NR Description: GDSL-motif lipase/hydrolase protein [Arabidopsis
MMNGSALNQFLAKSIAVVVTGSNDYINNYLLPGLYGSSRNYTAQDFGNLLVNSYVRQILALHSVGLRKFFLAGIGPLGCIPSLRAAALAPTGRCVDLVNQMVGTFNEGLRSMVDQLNRNHPNAIFVYGNTYRVFGDILNNPAAFAFNVVDRACCGIGRNRGQLTCLPLQFPCTSRNQYVFWDAFHPTESATYVFAWRVVNGAPDDSYPINMQQMATI

SEQ ID NO: 51684 - DNA, 1042 bp, Glycine max
  misc_feature (1)..(1042): Ceres Seq. ID no. 14311918
aaaacaaccccctccaacttctctcattctttttttctttctcttaaattaactacaaaaccaacaaccctcctccaacttcactcatattttttctttctcttaaacttttttaaggaaaaaaaaaatctaaatccttttaaaaccctattaatactaaacatcatataacattcattgttcatcaagaactatctttgtggtcgtgtttgttcaataatgctacaaaattcctccatgtcttccctcctcctccaccggatcaacggtggcggtggtgcaaccacggccaccaactgtcacgacaccgtctttatgacggtgccggatggcgtagcgcgctaccacacccacgcggtagcgccgaaccagtgctgctcctcggtagcgcaggagatcggggcctcggtcgccaccgtgtggtcagtgttgcgccgcttcgacaacccgcaggcctacaagcacttcgtgaagagctgccatgtcatcggcggggacggcgacgtcggcacgctccgggaggttcacgtcatctccggcctgcccgctgccaggagcaccgagcgcctcgagatcctcgacgacgagcgccacgtcatcagcttcagcgtcgtgggcggggaccaccgcctcgccaactaccgctccgtcaccaccctccaccccaccgcttcctccgcctccggaggatgctccggcacggtggtcgtggagtcctacgtggtggacgtgcctcccgggaacacgcgcgaagacacgcgcgtgttcgtcgacactatcgtgaagtgcaaccttcagtcgctcgcgcaaaccgcagagaacttaacgctgcgaaagaacaacaacaacgattacaagtgctgttcttaattttcctcttctttttactattttttgatttacagtgttattatatcgatatatatatatgtgtgtggggggggaggggggtgattgttataattaagtgttgtagatatcgatataatacaatcttaattttacagtgtatattatggataattactggattgttgattgt

SEQ ID NO: 51685 - protein, 216 aa, Glycine max
  peptide (1)..(216): Ceres Seq. ID no. 14311919
  misc_feature (51)..(197): Pfam Name: Pathogenesis-related protein Bet v I family Pfam Description: Pathogenesis-related protein Bet v I family
  misc_feature (39)..(202): Homolog of NCBI NO: 18378830 NR Description: expressed protein [Arabidopsis thaliana]
  misc_feature (39)..(205): Homolog of NCBI NO: 15238661 NR Description: expressed protein [Arabidopsis thaliana]
  misc_feature (32)..(210): Homolog of NCBI NO: 22327625 NR Description: expressed protein [Arabidopsis thaliana]
  misc_feature (32)..(210): Homolog of NCBI NO: 9758515 NR Description: gene_id:MZA15.21~pir||T05073~similar to unknown
  misc_feature (34)..(199): Homolog of NCBI NO: 15225245 NR Description: Bet v I allergen family [Arabidopsis thaliana]
  misc_feature (35)..(202): Homolog of NCBI NO: 34907924 NR Description: B1088C09.9 [Oryza sativa (japonica
  misc_feature (33)..(198): Homolog of NCBI NO: 15239114 NR Description: expressed protein [Arabidopsis thaliana]
  misc_feature (35)..(201): Homolog of NCBI NO: 25348262 NR Description: hypothetical protein At2g40330 [imported] -
  misc_feature (35)..(201): Homolog of NCBI NO: 18405351 NR Description: Bet v I allergen family [Arabidopsis thaliana]
  misc_feature (40)..(201): Homolog of NCBI NO: 18404709 NR Description: expressed protein [Arabidopsis thaliana]
MLQNSSMSSLLLHRINGGGGATTATNCHDTVFMTVPDGVARYHTHAVAPNQCCSSVAQEIGASVATVWSVLRRFDNPQAYKHFVKSCHVIGGDGDVGTLREVHVISGLPAARSTERLEILDDERHVISFSVVGGDHRLANYRSVTTLHPTASSASGGCSGTVVVESYVVDVPPGNTREDTRVFVDTIVKCNLQSLAQTAENLTLRKNNNNDYKCCS

SEQ ID NO: 51686 - protein, 210 aa, Glycine max
  peptide (1)..(210): Ceres Seq. ID no. 14311920
  misc_feature (45)..(191): Pfam Name: Pathogenesis-related protein Bet v I family Pfam Description: Pathogenesis-related protein Bet v I family
  misc_feature (33)..(196): Homolog of NCBI NO: 18378830 NR Description: expressed protein [Arabidopsis thaliana]
  misc_feature (33)..(199): Homolog of NCBI NO: 15238661 NR Description: expressed protein [Arabidopsis thaliana]
  misc_feature (26)..(204): Homolog of NCBI NO: 22327625 NR Description: expressed protein [Arabidopsis thaliana]
  misc_feature (26)..(204): Homolog of NCBI NO: 9758515 NR Description: gene_id:MZA15.21~pir||T05073~similar to unknown
  misc_feature (28)..(193): Homolog of NCBI NO: 15225245 NR Description: Bet v I allergen family [Arabidopsis thaliana]
  misc_feature (29)..(196): Homolog of NCBI NO: 34907924 NR Description: B1088C09.9 [Oryza sativa (japonica
  misc_feature (27)..(192): Homolog of NCBI NO: 15239114 NR Description: expressed protein [Arabidopsis thaliana]
  misc_feature (29)..(195): Homolog of NCBI NO: 25348262 NR Description: hypothetical protein At2g40330 [imported] -
  misc_feature (29)..(195): Homolog of NCBI NO: 18405351 NR Description: Bet v I allergen family [Arabidopsis thaliana]
  misc_feature (34)..(195): Homolog of NCBI NO: 18404709 NR Description: expressed protein [Arabidopsis thaliana]
MSSLLLHRINGGGGATTATNCHDTVFMTVPDGVARYHTHAVAPNQCCSSVAQEIGASVATVWSVLRRFDNPQAYKHFVKSCHVIGGDGDVGTLREVHVISGLPAARSTERLEILDDERHVISFSVVGGDHRLANYRSVTTLHPTASSASGGCSGTVVVESYVVDVPPGNTREDTRVFVDTIVKCNLQSLAQTAENLTLRKNNNNDYKCCS

SEQ ID NO: 51687 - protein, 184 aa, Glycine max
  peptide (1)..(184): Ceres Seq. ID no. 14311921
  misc_feature (19)..(165): Pfam Name: Pathogenesis-related protein Bet v I family Pfam Description: Pathogenesis-related protein Bet v I family
  misc_feature (7)..(170): Homolog of NCBI NO: 18378830 NR Description: expressed protein [Arabidopsis thaliana]
  misc_feature (7)..(173): Homolog of NCBI NO: 15238661 NR Description: expressed protein [Arabidopsis thaliana]
  misc_feature (1)..(178): Homolog of NCBI NO: 22327625 NR Description: expressed protein [Arabidopsis thaliana]
  misc_feature (1)..(178): Homolog of NCBI NO: 9758515 NR Description: gene_id:MZA15.21~pir||T05073~similar to unknown
  misc_feature (2)..(167): Homolog of NCBI NO: 15225245 NR Description: Bet v I allergen family [Arabidopsis thaliana]
  misc_feature (3)..(170): Homolog of NCBI NO: 34907924 NR Description: B1088C09.9 [Oryza sativa (japonica
  misc_feature (1)..(166): Homolog of NCBI NO: 15239114 NR Description: expressed protein [Arabidopsis thaliana]
  misc_feature (3)..(169): Homolog of NCBI NO: 25348262 NR Description: hypothetical protein At2g40330 [imported] -
  misc_feature (3)..(169): Homolog of NCBI NO: 18405351 NR Description: Bet v I allergen family [Arabidopsis thaliana]
  misc_feature (8)..(169): Homolog of NCBI NO: 18404709 NR Description: expressed protein [Arabidopsis thaliana]
MTVPDGVARYHTHAVAPNQCCSSVAQEIGASVATVWSVLRRFDNPQAYKHFVKSCHVIGGDGDVGTLREVHVISGLPAARSTERLEILDDERHVISFSVVGGDHRLANYRSVTTLHPTASSASGGCSGTVVVESYVVDVPPGNTREDTRVFVDTIVKCNLQSLAQTAENLTLRKNNNNDYKCCS

SEQ ID NO: 51688 - DNA, 1142 bp, Glycine max
  misc_feature (1)..(1142): Ceres Seq. ID no. 14311946
actacaaaatccaccaactcaaagaaagaaacagttcaagaaatgggtgaagcaaacgctcagtctcagagcgaacccttcatcgtaaactctccacaaccaacatttcagaaacacaaataccccgtcaccgcaaactcaccaccaccaccacactcaccaatgtgcgatcatcaccacattcttcaacaaaaccaagaagcggtggagcccacagacttgttctccatgatgcacctcaccaacggcaatggctgcagcaaccgtcagccaccctgctccgccgccaccaacaacaaccctatgaagcgccgatcgacgccatcttcctcctcctccggcgagccctgcgccaagaagctcttctgcgaccaagaggatctcaccctctacggcttctccgccgtctccattcccctcaacatcaaccccctcgtcaacaagcgcggctctttacccgtcctccgccgctgcgtctccgacccctgcacccctccggcgccgtcgccggaaccggagcaatccattcctccggagagaggctccgggctgccacccctgccgccgagattccaacggagcgtgtcggatctctctgttccttccccggacaaggctatgtcctgtttgagctctgaagaaaccgtcgcgcctgattccgtgaggctgagaaggatgaaggagcgtttgaaagagatgaggcagtggtgggatgaagttatgaaagatgagaaggaagatggtgtagaagaagagtgtgcagttgctgaagatgtcaaggtcctagctcaggatgatttgggaggtggagattctgaagaagctgttagtgttgattgggctgaacggtgcataaaccttgcgtttaggtgcccgtgtgggaaaggctatgaggttctcctctctgaaaataactgttactacaagttgatgtagaggaataagtaatgtgtttgactcctttcagtttgggatcacttctgtttttattctcttttagtttggcaaagtctttttctattctcatgtgtggcatttggttgtaactagaaccaaccaatgttatatcacttgctttcaataatgtaaataaaaatgttgtgtactatctccaagaaatagaggaaagtatattttgttcc

SEQ ID NO: 51689 - protein, 311 aa, Glycine max
  peptide (1)..(311): Ceres Seq. ID no. 14311947
  misc_feature (153)..(203): Pfam Name: Formin Homology 2 Domain Pfam Description: Formin Homology 2 Domain
  misc_feature (173)..(311): Homolog of NCBI NO: 28207126 NR Description: hypothetical protein [Arabidopsis thaliana]
  misc_feature (173)..(311): Homolog of NCBI NO: 30685228 NR Description: hypothetical protein [Arabidopsis thaliana]
TTKSTNSKKETVQEMGEANAQSQSEPFIVNSPQPTFQKHKYPVTANSPPPPHSPMCDHHHILQQNQEAVEPTDLFSMMHLTNGNGCSNRQPPCSAATNNNPMKRRSTPSSSSSGEPCAKKLFCDQEDLTLYGFSAVSIPLNINPLVNKRGSLPVLRRCVSDPCTPPAPSPEPEQSIPPERGSGLPPLPPRFQRSVSDLSVPSPDKAMSCLSSEETVAPDSVRLRRMKERLKEMRQWWDEVMKDEKEDGVEEECAVAEDVKVLAQDDLGGGDSEEAVSVDWAERCINLAFRCPCGKGYEVLLSENNCYYKLM

SEQ ID NO: 51690 - protein, 297 aa, Glycine max
  peptide (1)..(297): Ceres Seq. ID no. 14311948
  misc_feature (139)..(189): Pfam Name: Formin Homology 2 Domain Pfam Description: Formin Homology 2 Domain
  misc_feature (159)..(297): Homolog of NCBI NO: 28207126 NR Description: hypothetical protein [Arabidopsis thaliana]
  misc_feature (159)..(297): Homolog of NCBI NO: 30685228 NR Description: hypothetical protein [Arabidopsis thaliana]
MGEANAQSQSEPFIVNSPQPTFQKHKYPVTANSPPPPHSPMCDHHHILQQNQEAVEPTDLFSMMHLTNGNGCSNRQPPCSAATNNNPMKRRSTPSSSSSGEPCAKKLFCDQEDLTLYGFSAVSIPLNINPLVNKRGSLPVLRRCVSDPCTPPAPSPEPEQSIPPERGSGLPPLPPRFQRSVSDLSVPSPDKAMSCLSSEETVAPDSVRLRRMKERLKEMRQWWDEVMKDEKEDGVEEECAVAEDVKVLAQDDLGGGDSEEAVSVDWAERCINLAFRCPCGKGYEVLLSENNCYYKLM

SEQ ID NO: 51691 - protein, 257 aa, Glycine max
  peptide (1)..(257): Ceres Seq. ID no. 14311949
  misc_feature (99)..(149): Pfam Name: Formin Homology 2 Domain Pfam Description: Formin Homology 2 Domain
  misc_feature (119)..(257): Homolog of NCBI NO: 28207126 NR Description: hypothetical protein [Arabidopsis thaliana]
  misc_feature (119)..(257): Homolog of NCBI NO: 30685228 NR Description: hypothetical protein [Arabidopsis thaliana]
MCDHHHILQQNQEAVEPTDLFSMMHLTNGNGCSNRQPPCSAATNNNPMKRRSTPSSSSSGEPCAKKLFCDQEDLTLYGFSAVSIPLNINPLVNKRGSLPVLRRCVSDPCTPPAPSPEPEQSIPPERGSGLPPLPPRFQRSVSDLSVPSPDKAMSCLSSEETVAPDSVRLRRMKERLKEMRQWWDEVMKDEKEDGVEEECAVAEDVKVLAQDDLGGGDSEEAVSVDWAERCINLAFRCPCGKGYEVLLSENNCYYKLM

SEQ ID NO: 51692 - DNA, 1012 bp, Glycine max
  misc_feature (1)..(1012): Ceres Seq. ID no. 15169972
aaggtgacgatggaattggaagttgacgagaacgacttgaaagccgccggcgctgaactcttcgccgaaggtggccggcgaggcattcgtatcaatggctggttgatcgagactcggaggcactccatactgaactcttccacattccaagagtgggaacagaaactcgatacgtctcatttaccagaaatggtttttggggaaaacactttgattctaaaacacttgagcagtggaaccaacattcattttaatgcatttgatgctctacgtggctggaaacaggaagccttgccgccagttgaagttcctgcggcggctaaatggaaatttagaagcaagccctctcagcaagtaatactagattacgactatacatttacaacaccttattgtggaagtggcactattgagattgataaagatctgaatgagggagagacttctaaggaaaccagtgatatccattgggaagactgcaaggatcaaattgatgtagttgcacttgcatccaaggagcccatacttttctatgatgaggtggtgttatatgaggatgaactcgctgataatggagtatcacttcttactataaaagtgagagttatgcctagctcttggtttcttctgttgcgtttctggcttagagttgatggagtgttgattagactgagagaaacacgtatgcattgtgtatttggtggaagtacaaatcccattatacttcgagagagttgctggagataatctacatttcaagctttgtctgcaaaagggcacccttttgattctggtgcgtatggtgatccgagtttcatcagccagaagctccccatcataatgcataagacccaaaagcttgtaatttcctcttaaagttataagactgtaaatccccataatgcaaaagggttcttgttcatatttattcatctttaccatggctgtttggaaccataaattgcttcttatgagataagctcatagatgcatgctaatcatgttctgttct

SEQ ID NO: 51693 - protein, 248 aa, Glycine max
  peptide (1)..(248): Ceres Seq. ID no. 15169973
  misc_feature (64)..(248): Pfam Name: TIP41-like family Pfam Description: TIP41-like family
  misc_feature (29)..(121): Homolog of NCBI NO: 40739133 NR Description: hypothetical protein AN5814.2 [Aspergillus
  misc_feature (157)..(248): Homolog of NCBI NO: 40739133 NR Description: hypothetical protein AN5814.2 [Aspergillus
  misc_feature (29)..(248): Homolog of NCBI NO: 32403164 NR Description: hypothetical protein [Neurospora crassa]
  misc_feature (34)..(248): Homolog of NCBI NO: 34880821 NR Description: similar to CG9578-like [Rattus norvegicus]
  misc_feature (34)..(248): Homolog of NCBI NO: 21704010 NR Description: CG9578-like [Mus musculus]
  misc_feature (34)..(248): Homolog of NCBI NO: 34784442 NR Description: Unknown (protein for MGC:66327) [Danio rerio]
  misc_feature (23)..(248): Homolog of NCBI NO: 23097250 NR Description: CG9578-like
  misc_feature (64)..(248): Homolog of NCBI NO: 7485322 NR Description: hypothetical protein F10M10.40 - Arabidopsis
  misc_feature (12)..(248): Homolog of NCBI NO: 14488361 NR Description: unknown protein [Oryza sativa (japonica
  misc_feature (4)..(248): Homolog of NCBI NO: 22329154 NR Description: expressed protein [Arabidopsis thaliana]
KVTMELEVDENDLKAAGAELFAEGGRRGIRINGWLIETRRHSILNSSTFQEWEQKLDTSHLPEMVFGENTLILKHLSSGTNIHFNAFDALRGWKQEALPPVEVPAAAKWKFRSKPSQQVILDYDYTFTTPYCGSGTIEIDKDLNEGETSKETSDIHWEDCKDQIDVVALASKEPILFYDEVVLYEDELADNGVSLLTIKVRVMPSSWFLLLRFWLRVDGVLIRLRETRMHCVFGGSTNPIILRESCWR

SEQ ID NO: 51694 - protein, 245 aa, Glycine max
  peptide (1)..(245): Ceres Seq. ID no. 15169974
  misc_feature (61)..(245): Pfam Name: TIP41-like family Pfam Description: TIP41-like family
  misc_feature (26)..(118): Homolog of NCBI NO: 40739133 NR Description: hypothetical protein AN5814.2 [Aspergillus
  misc_feature (154)..(245): Homolog of NCBI NO: 40739133 NR Description: hypothetical protein AN5814.2 [Aspergillus
  misc_feature (26)..(245): Homolog of NCBI NO: 32403164 NR Description: hypothetical protein [Neurospora crassa]
  misc_feature (31)..(245): Homolog of NCBI NO: 34880821 NR Description: similar to CG9578-like [Rattus norvegicus]
  misc_feature (31)..(245): Homolog of NCBI NO: 21704010 NR Description: CG9578-like [Mus musculus]
  misc_feature (31)..(245): Homolog of NCBI NO: 34784442 NR Description: Unknown (protein for MGC:66327) [Danio rerio]
  misc_feature (20)..(245): Homolog of NCBI NO: 23097250 NR Description: CG9578-like
  misc_feature (61)..(245): Homolog of NCBI NO: 7485322 NR Description: hypothetical protein F10M10.40 - Arabidopsis
  misc_feature (9)..(245): Homolog of NCBI NO: 14488361 NR Description: unknown protein [Oryza sativa (japonica
  misc_feature (1)..(245): Homolog of NCBI NO: 22329154 NR Description: expressed protein [Arabidopsis thaliana]
MELEVDENDLKAAGAELFAEGGRRGIRINGWLIETRRHSILNSSTFQEWEQKLDTSHLPEMVFGENTLILKHLSSGTNIHFNAFDALRGWKQEALPPVEVPAAAKWKFRSKPSQQVILDYDYTFTTPYCGSGTIEIDKDLNEGETSKETSDIHWEDCKDQIDVVALASKEPILFYDEVVLYEDELADNGVSLLTIKVRVMPSSWFLLLRFWLRVDGVLIRLRETRMHCVFGGSTNPIILRESCWR

SEQ ID NO: 51695 - protein, 185 aa, Glycine max
  peptide (1)..(185): Ceres Seq. ID no. 15169975
  misc_feature (1)..(185): Pfam Name: TIP41-like family Pfam Description: TIP41-like family
  misc_feature (1)..(58): Homolog of NCBI NO: 40739133 NR Description: hypothetical protein AN5814.2 [Aspergillus
  misc_feature (94)..(185): Homolog of NCBI NO: 40739133 NR Description: hypothetical protein AN5814.2 [Aspergillus
  misc_feature (1)..(185): Homolog of NCBI NO: 32403164 NR Description: hypothetical protein [Neurospora crassa]
  misc_feature (1)..(185): Homolog of NCBI NO: 34880821 NR Description: similar to CG9578-like [Rattus norvegicus]
  misc_feature (1)..(185): Homolog of NCBI NO: 21704010 NR Description: CG9578-like [Mus musculus]
  misc_feature (1)..(185): Homolog of NCBI NO: 34784442 NR Description: Unknown (protein for MGC:66327) [Danio rerio]
  misc_feature (1)..(185): Homolog of NCBI NO: 23097250 NR Description: CG9578-like
  misc_feature (1)..(185): Homolog of NCBI NO: 7485322 NR Description: hypothetical protein F10M10.40 - Arabidopsis
  misc_feature (1)..(185): Homolog of NCBI NO: 14488361 NR Description: unknown protein [Oryza sativa (japonica
  misc_feature (1)..(185): Homolog of NCBI NO: 22329154 NR Description: expressed protein [Arabidopsis thaliana]
MVFGENTLILKHLSSGTNIHFNAFDALRGWKQEALPPVEVPAAAKWKFRSKPSQQVILDYDYTFTTPYCGSGTIEIDKDLNEGETSKETSDIHWEDCKDQIDVVALASKEPILFYDEVVLYEDELADNGVSLLTIKVRVMPSSWFLLLRFWLRVDGVLIRLRETRMHCVFGGSTNPIILRESCWR

SEQ ID NO: 51696 - DNA, 588 bp, Glycine max
  misc_feature (1)..(588): Ceres Seq. ID no. 12609077
ataatgaaatgctcaaaatccctagctaagcaaagtgaggaggaggcatagcagataacacaaacacaaccttagccaacaacaaagcaaaggaaaggaaaggaaagcatgggtttactgtggtggcgaaaggggaataaaacccaagcccaacctgaagcaaagtcgaacggcgcagactcaacgaaacccctcactgaggccccagggatgaacggcgccgtggaggttccccggccctcgaacaccaccgtctcgattttcgagtttggctccgtggccgcctccaacgacaaggtcacgctcgccggctattgccccgtctccgaagacctcgagccctgccgctgggagatcctccccgccgttcagtccaacgccccccagtttcgcgtggtcttctgattctgatacccaactttttttctctcttttgccgcttgtgggattcaattttatctactttttttttttttttgctataaaacattcgagtttaagcgcatttttctttttgttatgttatgtgtctcttttcttttcgcctgttcggttttttactcccaatattacatgactgtcactgtt

SEQ ID NO: 51697 - protein, 98 aa, Glycine max
  peptide (1)..(98): Ceres Seq. ID no. 12609078
  misc_feature (1)..(98): Homolog of NCBI NO: 18411349 NR Description: Expressed protein
  misc_feature (1)..(98): Homolog of NCBI NO: 11357163 NR Description: allyl alcohol dehydrogenase-like protein -
MGLLWWRKGNKTQAQPEAKSNGADSTKPLTEAPGMNGAVEVPRPSNTTVSIFEFGSVAASNDKVTLAGYCPVSEDLEPCRWEILPAVQSNAPQFRVVF

SEQ ID NO: 51698 - protein, 64 aa, Glycine max
  peptide (1)..(64): Ceres Seq. ID no. 12609079
  misc_feature (1)..(64): Homolog of NCBI NO: 18411349 NR Description: Expressed protein
  misc_feature (1)..(64): Homolog of NCBI NO: 11357163 NR Description: allyl alcohol dehydrogenase-like protein -
MNGAVEVPRPSNTTVSIFEFGSVAASNDKVTLAGYCPVSEDLEPCRWEILPAVQSNAPQFRVVF

SEQ ID NO: 51699 - DNA, 867 bp, Glycine max
  misc_feature (1)..(867): Ceres Seq. ID no. 12582729
acacttttccagatctagcattccgttcccgttccgttcaaacagtttgtctttctcacatacactttcttcctttgtttgtcaccgcagtttcaatctcagatccaacattgttcagtccaaattcaacgcattccatggcaaatcctgcatccgcaagattctccgttcttattcttctcgtttctttgctagtcaacatcgccgccaccgccgccaccgccgccgaatcgccagctccgactccgacgccggattttcctccgtcgtcttctcctccttttccttctcctgcttcgaatccttccacggccaattttccgccatctccaactccggcgccttctcatcactcgccgccggctccttcgcctagtagcaatccttctccgtctccggctccggctccagtggatgatgcacatgacggagttagccacgccggcgtggacggcagcgacggaaaatcgtcctcctccggcggaatgagttccggcaagaaagcgggaatagcgttgggagttatcatcggtgccggagtggttgtgttgggagcgctggtgtacaagaggcgccgccagaacattcaacggtctcagtacggatacgcagccaggagagaacttctgtaggttataaacattcagtaatattctcggtagtttttttttttgtttctaatttcaattgcattatagagaattcgtgatctctgaatttcaatttcaaaattcattttacaaattactacaaatttgttttgttcctcctagtcctagctagtagcaaaatataggttgttcaaaaattatccattcgtgtattgaattttggctattctttggtctattgcccagggaatcctct

SEQ ID NO: 51700 - protein, 209 aa, Glycine max
  peptide (1)..(209): Ceres Seq. ID no. 12582730
  misc_feature (55)..(136): Pfam Name: Extensin-like region Pfam Description: Extensin-like region
  misc_feature (57)..(183): Homolog of NCBI NO: 30140331 NR Description: putative arabinagalactan protein [Lotus japonicus]
  misc_feature (77)..(167): Homolog of NCBI NO: 1076211 NR Description: hypothetical protein VSP-3 - Chlamydomonas
  misc_feature (73)..(160): Homolog of NCBI NO: 16331063 NR Description: unknown protein [Synechocystis sp. PCC 6803]
  misc_feature (68)..(174): Homolog of NCBI NO: 25019697 NR Description: unknown [Synechococcus sp. PCC 7942]
  misc_feature (58)..(181): Homolog of NCBI NO: 15238164 NR Description: arabinogalactan-protein (AGP4)
  misc_feature (57)..(136): Homolog of NCBI NO: 37651399 NR Description: unknown [Choristoneura fumiferana defective
  misc_feature (24)..(209): Homolog of NCBI NO: 27573359 NR Description: unknown protein [Oryza sativa (japonica
  misc_feature (72)..(209): Homolog of NCBI NO: 15226398 NR Description: hydroxyproline-rich glycoprotein-related; protein
  misc_feature (54)..(209): Homolog of NCBI NO: 15230640 NR Description: hydroxyproline-rich glycoprotein-related; protein
  misc_feature (54)..(209): Homolog of NCBI NO: 26452231 NR Description: putative serine/proline-rich protein [Arabidopsis
TFPDLAFRSRSVQTVCLSHIHFLPLFVTAVSISDPTLFSPNSTHSMANPASARFSVLILLVSLLVNIAATAATAAESPAPTPTPDFPPSSSPPFPSPASNPSTANFPPSPTPAPSHHSPPAPSPSSNPSPSPAPAPVDDAHDGVSHAGVDGSDGKSSSSGGMSSGKKAGIALGVIIGAGVVVLGALVYKRRRQNIQRSQYGYAARRELL

SEQ ID NO: 51701 - protein, 164 aa, Glycine max
  peptide (1)..(164): Ceres Seq. ID no. 12582731
  misc_feature (10)..(91): Pfam Name: Extensin-like region Pfam Description: Extensin-like region
  misc_feature (12)..(138): Homolog of NCBI NO: 30140331 NR Description: putative arabinagalactan protein [Lotus japonicus]
  misc_feature (32)..(122): Homolog of NCBI NO: 1076211 NR Description: hypothetical protein VSP-3 - Chlamydomonas
  misc_feature (28)..(115): Homolog of NCBI NO: 16331063 NR Description: unknown protein [Synechocystis sp. PCC 6803]
  misc_feature (23)..(129): Homolog of NCBI NO: 25019697 NR Description: unknown [Synechococcus sp. PCC 7942]
  misc_feature (13)..(136): Homolog of NCBI NO: 15238164 NR Description: arabinogalactan-protein (AGP4)
  misc_feature (12)..(91): Homolog of NCBI NO: 37651399 NR Description: unknown [Choristoneura fumiferana defective
  misc_feature (1)..(164): Homolog of NCBI NO: 27573359 NR Description: unknown protein [Oryza sativa (japonica
  misc_feature (27)..(164): Homolog of NCBI NO: 15226398 NR Description: hydroxyproline-rich glycoprotein-related; protein
  misc_feature (9)..(164): Homolog of NCBI NO: 15230640 NR Description: hydroxyproline-rich glycoprotein-related; protein
  misc_feature (9)..(164): Homolog of NCBI NO: 26452231 NR Description: putative serine/proline-rich protein [Arabidopsis
MANPASARFSVLILLVSLLVNIAATAATAAESPAPTPTPDFPPSSSPPFPSPASNPSTANFPPSPTPAPSHHSPPAPSPSSNPSPSPAPAPVDDAHDGVSHAGVDGSDGKSSSSGGMSSGKKAGIALGVIIGAGVVVLGALVYKRRRQNIQRSQYGYAARRELL

SEQ ID NO: 51702 - protein, 124 aa, Glycine max
  peptide (1)..(124): Ceres Seq. ID no. 12582732
HFSRSSIPFPFRSNSLSFSHTLSSFVCHRSFNLRSNIVQSKFNAFHGKSCIRKILRSYSSRFFASQHRRHRRHRRRIASSDSDAGFSSVVFSSFSFSCFESFHGQFSAISNSGAFSSLAAGSFA

SEQ ID NO: 51703 - DNA, 1534 bp, Glycine max
  misc_feature (1)..(1534): Ceres Seq. ID no. 15177270
accttctttatctctcaaaagagagacacaacaaaaggaaccagagtggattaattagggacatgagaacaaggagaggagcgtgttactctggagtagtctcaaggatgtgttccgatgcgagggtttccaagaaaaaaaacaaggatctgcacatgcacatgcatatgcatatgcatgtccccgccggagactccattatttacagccggaaaaggcagaagaaaacgccggagaaaaccgccggcgctgattacgaatttttcgagtctttgccggacgacctcgtaatctccatcttctgcaaacttagttccaccgccactaaaccttccgatttcgtcaatattttaatcacgtgcaaaagattaaacagattagcacttcattcgcttgtattatccaaagcctcgccgaaaactttcactattaaagcaagagattggtgcgattcggcacacaaattcctcaaacactgtgccgatgccggaaacgttgaagcttgctatactttaggcatgattcggttctactgtttgcaaaaccgagggagcggcgcgtcgtttatggcgaaggcggccattaactctcacgcgcgggctctgtatgcgctggccgtgattcagttcaacggcagcggtggcacgaagagcgacaaggacctacgcgccggcgtggcgctgtgcgccagagcggcgtttcttggccacgtcgatgcgatgcgcgaactcggccactgcctgcaggacggttacggcgtgcggcagaacatcgccgagggacggcggttcctcgtgcaggcaaacgcgcgcgagctcgccgccgtgctgtctaccggcgccgccgcgcgcacctggctgagttggaatcttcagccgcagcagctccggcaggggtccgggtgtccgcttctcagcgatttcggatgcaacgtaccggcgccggaggtgcaccccgcgagcctgttcatggcggagtggttcgccgcgcggggcggttcgccgggaccggggctgagactctgttctcacgcggggtgcgggaggcccgagacgaggaagcacgagtttcgaaggtgttctgtgtgcggcgtggtgaattattgctcacgcgcgtgccaagcgcttgattggaagttccggcacaaggcggagtgctcccccgtgcaacggtggctcgaggaggacggcgaagatgtcggtaacgacgacggtgacggagaggtggaggttatggtagatagttagacaatttttacaacagtaacggtaacggaagtcgctttggacggaaaaatgaatatttttggcgaagtgaaagaaaaaaaggaattacttgtgatgatttattcgccgtctcaaaaaggtagaaaagagtatatggcttcttttcttttttccttgtataggtcgaaaattctcccgaaaaaaacgagaggagattatttttctttttttattttattttgcaatttcggagtttaaagttaatttagaaattcaatgctaaaactaagaggttactagttactgct

SEQ ID NO: 51704 - protein, 414 aa, Glycine max
  peptide (1)..(414): Ceres Seq. ID no. 15177271
  misc_feature (344)..(385): Pfam Name: MYND finger Pfam Description: MYND finger
  misc_feature (337)..(401): Homolog of NCBI NO: 32489984 NR Description: OSJNBa0044M19.1 [Oryza sativa (japonica
  misc_feature (82)..(363): Homolog of NCBI NO: 32489984 NR Description: OSJNBa0044M19.1 [Oryza sativa (japonica
  misc_feature (88)..(410): Homolog of NCBI NO: 15240674 NR Description: expressed protein [Arabidopsis thaliana]
  misc_feature (328)..(397): Homolog of NCBI NO: 19386803 NR Description: OJ1485_B09.11 [Oryza sativa (japonica
  misc_feature (21)..(363): Homolog of NCBI NO: 19386803 NR Description: OJ1485_B09.11 [Oryza sativa (japonica
  misc_feature (77)..(406): Homolog of NCBI NO: 18408746 NR Description: F-box protein family [Arabidopsis thaliana]
LLYLSKERHNKRNQSGLIRDMRTRRGACYSGVVSRMCSDARVSKKKNKDLHMHMHMHMHVPAGDSIIYSRKRQKKTPEKTAGADYEFFESLPDDLVISIFCKLSSTATKPSDFVNILITCKRLNRLALHSLVLSKASPKTFTIKARDWCDSAHKFLKHCADAGNVEACYTLGMIRFYCLQNRGSGASFMAKAAINSHARALYALAVIQFNGSGGTKSDKDLRAGVALCARAAFLGHVDAMRELGHCLQDGYGVRQNIAEGRRFLVQANARELAAVLSTGAAARTWLSWNLQPQQLRQGSGCPLLSDFGCNVPAPEVHPASLFMAEWFAARGGSPGPGLRLCSHAGCGRPETRKHEFRRCSVCGVVNYCSRACQALDWKFRHKAECSPVQRWLEEDGEDVGNDDGDGEVEVMVDS

SEQ ID NO: 51705 - protein, 394 aa, Glycine max
  peptide (1)..(394): Ceres Seq. ID no. 15177272
  misc_feature (324)..(365): Pfam Name: MYND finger Pfam Description: MYND finger
  misc_feature (317)..(381): Homolog of NCBI NO: 32489984 NR Description: OSJNBa0044M19.1 [Oryza sativa (japonica
  misc_feature (62)..(343): Homolog of NCBI NO: 32489984 NR Description: OSJNBa0044M19.1 [Oryza sativa (japonica
  misc_feature (68)..(390): Homolog of NCBI NO: 15240674 NR Description: expressed protein [Arabidopsis thaliana]
  misc_feature (308)..(377): Homolog of NCBI NO: 19386803 NR Description: OJ1485_B09.11 [Oryza sativa (japonica
  misc_feature (1)..(343): Homolog of NCBI NO: 19386803 NR Description: OJ1485_B09.11 [Oryza sativa (japonica
  misc_feature (57)..(386): Homolog of NCBI NO: 18408746 NR Description: F-box protein family [Arabidopsis thaliana]
MRTRRGACYSGVVSRMCSDARVSKKKNKDLHMHMHMHMHVPAGDSIIYSRKRQKKTPEKTAGADYEFFESLPDDLVISIFCKLSSTATKPSDFVNILITCKRLNRLALHSLVLSKASPKTFTIKARDWCDSAHKFLKHCADAGNVEACYTLGMIRFYCLQNRGSGASFMAKAAINSHARALYALAVIQFNGSGGTKSDKDLRAGVALCARAAFLGHVDAMRELGHCLQDGYGVRQNIAEGRRFLVQANARELAAVLSTGAAARTWLSWNLQPQQLRQGSGCPLLSDFGCNVPAPEVHPASLFMAEWFAARGGSPGPGLRLCSHAGCGRPETRKHEFRRCSVCGVVNYCSRACQALDWKFRHKAECSPVQRWLEEDGEDVGNDDGDGEVEVMVDS

SEQ ID NO: 51706 - protein, 379 aa, Glycine max
  peptide (1)..(379): Ceres Seq. ID no. 15177273
  misc_feature (309)..(350): Pfam Name: MYND finger Pfam Description: MYND finger
  misc_feature (302)..(366): Homolog of NCBI NO: 32489984 NR Description: OSJNBa0044M19.1 [Oryza sativa (japonica
  misc_feature (47)..(328): Homolog of NCBI NO: 32489984 NR Description: OSJNBa0044M19.1 [Oryza sativa (japonica
  misc_feature (53)..(375): Homolog of NCBI NO: 15240674 NR Description: expressed protein [Arabidopsis thaliana]
  misc_feature (293)..(362): Homolog of NCBI NO: 19386803 NR Description: OJ1485_B09.11 [Oryza sativa (japonica
  misc_feature (1)..(328): Homolog of NCBI NO: 19386803 NR Description: OJ1485_B09.11 [Oryza sativa (japonica
  misc_feature (42)..(371): Homolog of NCBI NO: 18408746 NR Description: F-box protein family [Arabidopsis thaliana]
MCSDARVSKKKNKDLHMHMHMHMHVPAGDSIIYSRKRQKKTPEKTAGADYEFFESLPDDLVISIFCKLSSTATKPSDFVNILITCKRLNRLALHSLVLSKASPKTFTIKARDWCDSAHKFLKHCADAGNVEACYTLGMIRFYCLQNRGSGASFMAKAAINSHARALYALAVIQFNGSGGTKSDKDLRAGVALCARAAFLGHVDAMRELGHCLQDGYGVRQNIAEGRRFLVQANARELAAVLSTGAAARTWLSWNLQPQQLRQGSGCPLLSDFGCNVPAPEVHPASLFMAEWFAARGGSPGPGLRLCSHAGCGRPETRKHEFRRCSVCGVVNYCSRACQALDWKFRHKAECSPVQRWLEEDGEDVGNDDGDGEVEVMVDS

SEQ ID NO: 51707 - DNA, 1178 bp, Glycine max
  misc_feature (1)..(1178): Ceres Seq. ID no. 13594549
atcgaaaactcttatctctattcatctttgtttttttgttagcaaagcaaaactattgtttctcgggaaatttaagataattcaattggataacctgaacgaaaatctcaattttgtgctgttgtcggagtgactcagaaaaaaatgcaatgcacgattctaatagcattaattatgatacattttctgttgttgaaggtagcgtaggttaattttcattttcagttttttgtgcagctccaatggcaacctctcaaatcacttcatcattgaggaacttgcctgcatttgaaaggtttcaaccttcaacgcttcgatttccttctgctgggcacgtcagaattgggacactgacacaaacctcgtttccctctttcgttgtcaaagccgccactgttgtcgcccccaagcacaccactgttaagcctctgggtgatagagtactggtgaaaattaaggatgcagaggagaagactgcaggtgggattttactgccagcaactgctcaaggcaagcctcaaggaggtgaagtggttgctgttggggatgggaagtcggttgggaagagcaaagtggatgttagtgtgaagacaggtttgcaggttgtgtattcaaagtatgcagggactgaggtggagttcaatggttcaaaacatcttattctgaaggacgatgacatcgttggtatccttgaaacagatgaggtcaaggatcttaaacccttaaatgatagagtcttgataaaggttgcagaagcggatgaaaaaactgctggagggttgttgctcacagaggcaaccaaggaaaaaccatctattggaacagtgatagcagttggtccggggcctctggatgaggaaggtaatagaaagccattgtctgtcgtgcccgggaatacagttctgtactccaagtatgcagggaatgacttcaagggcaaagatggttctgactacattgccttgagggcctcagatgtcatggctatcctgtcctagtcagtatttagtagcaaatattttttttgttccctaacccaaaattttgagttaatgccgagggaaatggatatttatgttgtgaagacagcttgaaatatagttgattgcaactctgttccttagacaattttgcgttaaattgaaacgtttgaaatatattattttctacggcctttc

SEQ ID NO: 51708 - protein, 251 aa, Glycine max
  peptide (1)..(251): Ceres Seq. ID no. 13594550
  misc_feature (156)..(251): Pfam Name: Chaperonin 10 Kd subunit Pfam Description: Chaperonin 10 Kd subunit
  misc_feature (60)..(150): Homolog of NCBI NO: 23113174 NR Description: hypothetical protein [Desulfitobacterium
  misc_feature (166)..(236): Homolog of NCBI NO: 37729500 NR Description: putative chaperonin 21 precursor [Pteris vittata]
  misc_feature (60)..(151): Homolog of NCBI NO: 20807075 NR Description: Co-chaperonin GroES (HSP10) [Thermoanaerobacter
  misc_feature (155)..(250): Homolog of NCBI NO: 22297730 NR Description: 10kD chaperonin [Thermosynechococcus elongatus
  misc_feature (60)..(151): Homolog of NCBI NO: 2493659 NR Description: 10 kDa chaperonin (Protein Cpn10) (groES protein)
  misc_feature (1)..(251): Homolog of NCBI NO: 399241 NR Description: 20 kDa chaperonin, chloroplast precursor (Protein (Chloroplast protein Cpn10) (Chloroplast chaperonin 10)
  misc_feature (1)..(251): Homolog of NCBI NO: 25453528 NR Description: chaperonin 10 [imported] - Arabidopsis thaliana
  misc_feature (1)..(251): Homolog of NCBI NO: 7331143 NR Description: chaperonin 21 precursor [Lycopersicon esculentum]
  misc_feature (1)..(251): Homolog of NCBI NO: 15242045 NR Description: chloroplast Cpn21 protein [Arabidopsis thaliana]
  misc_feature (1)..(251): Homolog of NCBI NO: 21780187 NR Description: cp10-like protein [Gossypium hirsutum]
MATSQITSSLRNLPAFERFQPSTLRFPSAGHVRIGTLTQTSFPSFVVKAATVVAPKHTTVKPLGDRVLVKIKDAEEKTAGGILLPATAQGKPQGGEVVAVGDGKSVGKSKVDVSVKTGLQVVYSKYAGTEVEFNGSKHLILKDDDIVGILETDEVKDLKPLNDRVLIKVAEADEKTAGGLLLTEATKEKPSIGTVIAVGPGPLDEEGNRKPLSVVPGNTVLYSKYAGNDFKGKDGSDYIALRASDVMAILS

SEQ ID NO: 51709 - DNA, 1442 bp, Glycine max
  misc_feature (1)..(1442): Ceres Seq. ID no. 14311590
ataaattagaaccgattgaaagtaatcaatccgtggattctctgaacttatcgcttcttcccggtaggtccatttcgcttttgtttctgtttcccatatcctgcctgtgttatcttattagggtttcgttcccaattgcaattcaattcaaattcgcacactatttactaggtttgaatttgggtgtttccgtttcaatggatgacggcgagcttgatttctccaaccatgaagtgttttcgagtcccaacatgggtgagcttcccagcagcggttcaatggacagtttcttcgacgagcttctcaaggacacgcacgcctgcacccacacccacacctgtaaccctcccggccccgatttctcccacactcacacgtgctaccatgtccacaccaaaatcgtccccgcccctgaggaggaccatgtcgccaccgatgacaccgccgagtccgccgagaagaagtcgtcgtcgtcgaagaagcggtctctggggaacaaagaggccgtccggaagtaccgcgagaagaagaaggcgcgtgcggcgtcgctggaggacgaggttgtgaagttgagggctctgaaccagcacttgatgaagaagctgaaggggcaggcggctctcgaggccgaaatcgcgaggctcaagtgtttgttggttgacataagggggaggattgaaggggaaattgggtcgtttccctatcagaaaccaacgccgaatgcgaaccctccggtggctaacttgcctggttcttatgtgatgaacccttgtaacttgcaatgtgatgatcgggtgtattgccatcacccctatgggaaaattggggagagtgcggctttgaatggggaagagtttgatggttgtgaatttgagaacctgcagtgtctggcaagccagaatttggggctcaaggatcttcgtgcctgtggggttggacaggcaaggtctaatgtaaattcttctgcatcaaataaaagaaaagggggatctcatgctgtgacagctggttgaagaattaataaattggtggttttcatctttgccatgaacttagggaagatgggggtgtgtttcatctttcagtacttagtgctgtggacagcatttttgctggacaagggtagaaggaactgttcctttaactgaagattttgcatatgggcatgtcttctacaagttaagacagacaagtgatttgttttgtatttgagaacgcaaagtaactgtttcgatgatgggaaaagcatatctgcctgtctgcccttagagaacaagtcttgaatagatttcggtaaattaaaaatgctcttgctgatcctcttttggaatgattaataaaacattacattattgtatcttctacttcgaccgccgttgtggacaaaatttgtaataattttactttgcgttagagtctctatagtaaataattgcttaaat

SEQ ID NO: 51710 - protein, 336 aa, Glycine max
  peptide (1)..(336): Ceres Seq. ID no. 14311591
  misc_feature (159)..(220): Pfam Name: bZIP transcription factor Pfam Description: bZIP transcription factor
  misc_feature (147)..(236): Homolog of NCBI NO: 34908964 NR Description: P0003D09.19 [Oryza sativa (japonica
  misc_feature (104)..(236): Homolog of NCBI NO: 11357780 NR Description: hypothetical protein F4F15.70 - Arabidopsis
  misc_feature (104)..(267): Homolog of NCBI NO: 30693563 NR Description: bZIP family transcription factor [Arabidopsis
  misc_feature (104)..(267): Homolog of NCBI NO: 30693560 NR Description: bZIP family transcription factor [Arabidopsis
  misc_feature (66)..(310): Homolog of NCBI NO: 18855044 NR Description: putative transcription factor [Oryza sativa]
  misc_feature (66)..(328): Homolog of NCBI NO: 25370607 NR Description: hypothetical protein At2g16770 [imported] -
  misc_feature (66)..(335): Homolog of NCBI NO: 30679757 NR Description: bZIP protein [Arabidopsis thaliana]
  misc_feature (66)..(328): Homolog of NCBI NO: 7486791 NR Description: hypothetical protein M4E13.100 - Arabidopsis
  misc_feature (66)..(335): Homolog of NCBI NO: 18418563 NR Description: bZIP protein [Arabidopsis thaliana]
  misc_feature (66)..(335): Homolog of NCBI NO: 21554283 NR Description: putative transcription factor [Arabidopsis
KLEPIESNQSVDSLNLSLLPGRSISLLFLFPISCLCYLIRVSFPIAIQFKFAHYLLGLNLGVSVSMDDGELDFSNHEVFSSPNMGELPSSGSMDSFFDELLKDTHACTHTHTCNPPGPDFSHTHTCYHVHTKIVPAPEEDHVATDDTAESAEKKSSSSKKRSLGNKEAVRKYREKKKARAASLEDEVVKLRALNQHLMKKLKGQAALEAEIARLKCLLVDIRGRIEGEIGSFPYQKPTPNANPPVANLPGSYVMNPCNLQCDDRVYCHHPYGKIGESAALNGEEFDGCEFENLQCLASQNLGLKDLRACGVGQARSNVNSSASNKRKGGSHAVTAG

SEQ ID NO: 51711 - protein, 271 aa, Glycine max
  peptide (1)..(271): Ceres Seq. ID no. 14311592
  misc_feature (94)..(155): Pfam Name: bZIP transcription factor Pfam Description: bZIP transcription factor
  misc_feature (82)..(171): Homolog of NCBI NO: 34908964 NR Description: P0003D09.19 [Oryza sativa (japonica
  misc_feature (39)..(171): Homolog of NCBI NO: 11357780 NR Description: hypothetical protein F4F15.70 - Arabidopsis
  misc_feature (39)..(202): Homolog of NCBI NO: 30693563 NR Description: bZIP family transcription factor [Arabidopsis
  misc_feature (39)..(202): Homolog of NCBI NO: 30693560 NR Description: bZIP family transcription factor [Arabidopsis
  misc_feature (1)..(245): Homolog of NCBI NO: 18855044 NR Description: putative transcription factor [Oryza sativa]
  misc_feature (1)..(263): Homolog of NCBI NO: 25370607 NR Description: hypothetical protein At2g16770 [imported] -
  misc_feature (1)..(270): Homolog of NCBI NO: 30679757 NR Description: bZIP protein [Arabidopsis thaliana]
  misc_feature (1)..(263): Homolog of NCBI NO: 7486791 NR Description: hypothetical protein M4E13.100 - Arabidopsis
  misc_feature (1)..(270): Homolog of NCBI NO: 18418563 NR Description: bZIP protein [Arabidopsis thaliana]
  misc_feature (1)..(270): Homolog of NCBI NO: 21554283 NR Description: putative transcription factor [Arabidopsis
MDDGELDFSNHEVFSSPNMGELPSSGSMDSFFDELLKDTHACTHTHTCNPPGPDFSHTHTCYHVHTKIVPAPEEDHVATDDTAESAEKKSSSSKKRSLGNKEAVRKYREKKKARAASLEDEVVKLRALNQHLMKKLKGQAALEAEIARLKCLLVDIRGRIEGEIGSFPYQKPTPNANPPVANLPGSYVMNPCNLQCDDRVYCHHPYGKIGESAALNGEEFDGCEFENLQCLASQNLGLKDLRACGVGQARSNVNSSASNKRKGGSHAVTAG

SEQ ID NO: 51712 - protein, 253 aa, Glycine max
  peptide (1)..(253): Ceres Seq. ID no. 14311593
  misc_feature (76)..(137): Pfam Name: bZIP transcription factor Pfam Description: bZIP transcription factor
  misc_feature (64)..(153): Homolog of NCBI NO: 34908964 NR Description: P0003D09.19 [Oryza sativa (japonica
  misc_feature (21)..(153): Homolog of NCBI NO: 11357780 NR Description: hypothetical protein F4F15.70 - Arabidopsis
  misc_feature (21)..(184): Homolog of NCBI NO: 30693563 NR Description: bZIP family transcription factor [Arabidopsis
  misc_feature (21)..(184): Homolog of NCBI NO: 30693560 NR Description: bZIP family transcription factor [Arabidopsis
  misc_feature (1)..(227): Homolog of NCBI NO: 18855044 NR Description: putative transcription factor [Oryza sativa]
  misc_feature (1)..(245): Homolog of NCBI NO: 25370607 NR Description: hypothetical protein At2g16770 [imported] -
  misc_feature (1)..(252): Homolog of NCBI NO: 30679757 NR Description: bZIP protein [Arabidopsis thaliana]
  misc_feature (1)..(245): Homolog of NCBI NO: 7486791 NR Description: hypothetical protein M4E13.100 - Arabidopsis
  misc_feature (1)..(252): Homolog of NCBI NO: 18418563 NR Description: bZIP protein [Arabidopsis thaliana]
  misc_feature (1)..(252): Homolog of NCBI NO: 21554283 NR Description: putative transcription factor [Arabidopsis
MGELPSSGSMDSFFDELLKDTHACTHTHTCNPPGPDFSHTHTCYHVHTKIVPAPEEDHVATDDTAESAEKKSSSSKKRSLGNKEAVRKYREKKKARAASLEDEVVKLRALNQHLMKKLKGQAALEAEIARLKCLLVDIRGRIEGEIGSFPYQKPTPNANPPVANLPGSYVMNPCNLQCDDRVYCHHPYGKIGESAALNGEEFDGCEFENLQCLASQNLGLKDLRACGVGQARSNVNSSASNKRKGGSHAVTAG

SEQ ID NO: 51713 - DNA, 1179 bp, Glycine max
  misc_feature (1)..(1179): Ceres Seq. ID no. 14311572
atcgatccaaaaccttctaagccttcactatgacagatcctaagtccaatttatacactgaaaccttcaacttcatgcccctctattctcacctctcttcttttagtacttctcaatcaaacttattctcttcttactcaaacaacaacactttcgccattcaatctgaaacctcttcctcttatgctcctccttctcctcctctcagagaagcccttcctctcataaacaacataagcctcagaaaacaaaaggaaaaaaatgaaccatcaaagagtggtggtggtatggttgaagaggaaggaggaaagaaaagggacatggatgagacgacccttttgatgactagtactactactgaagagggtgatgctgaaactgtgacagtagcactgcaaatagggcttcctagcgtggctgcttctgatgatcttaatgggtcaaggaagatccctgcagcttgtgcacaaatgaatgaaaaggaggatgcgaggagtgtgatttctggacacccttttgatagattgaacaaggttcagtattggattcccaccccttctcagattctcattggtcctactcagtttttgtgtcatgtgtgctctaagagtttcaacagatataataatcttcagatgcatatgtggggacatggatctcaatatagaaagggccctgattctctaaaaggaacacaaccatcagcaatgctacggcttccatgcttttgttgtgcaccaggttgcaagcacaacatagaccacccaagagcaaggcctctgaaggacttcagaacccttcaaacacactacaagagaaaacacggcattaaaccctacatgtgcagaaaatgtgacaaaacgtttgcggtgaaaggtgattggaggacacacgagaagaactgtggcaaaatatggtactgtttatgtgggtctgatttcaaacacaaaagatctctaaaggatcacataaaggcctttggccatggccacggtgctgttgacattgattgcatgcaagaagatgaagcggcctccgaaattgaacatgatggggatatctcaatgtgaaaattaataagtttggaaaatcaaaattgaagtgacttttcatgtaattaattaattaatttcacatacatgcttaattgtaatagattgtataaggtgtattttatat

SEQ ID NO: 51714 - protein, 346 aa, Glycine max
  peptide (1)..(346): Ceres Seq. ID no. 14311573
  misc_feature (296)..(321): Pfam Name: Zinc finger, C2H2 type Pfam Description: Zinc finger, C2H2 type
  misc_feature (170)..(344): Homolog of NCBI NO: 15222242 NR Description: zinc finger protein -related [Arabidopsis
  misc_feature (111)..(338): Homolog of NCBI NO: 30693123 NR Description: transparent testa 1 (TT1) protein [Arabidopsis
  misc_feature (111)..(338): Homolog of NCBI NO: 18253283 NR Description: transparent testa 1 [Arabidopsis thaliana]
  misc_feature (15)..(339): Homolog of NCBI NO: 30685975 NR Description: DNA-binding protein -related [Arabidopsis
  misc_feature (15)..(339): Homolog of NCBI NO: 9294415 NR Description: zinc finger-like protein [Arabidopsis thaliana]
  misc_feature (1)..(339): Homolog of NCBI NO: 15223781 NR Description: expressed protein [Arabidopsis thaliana]
  misc_feature (1)..(133): Homolog of NCBI NO: 15230370 NR Description: zinc finger - like protein [Arabidopsis thaliana]
  misc_feature (149)..(343): Homolog of NCBI NO: 15230370 NR Description: zinc finger - like protein [Arabidopsis thaliana]
  misc_feature (1)..(133): Homolog of NCBI NO: 28973719 NR Description: putative zinc finger protein [Arabidopsis
  misc_feature (150)..(343): Homolog of NCBI NO: 28973719 NR Description: putative zinc finger protein [Arabidopsis
MTDPKSNLYTETFNFMPLYSHLSSFSTSQSNLFSSYSNNNTFAIQSETSSSYAPPSPPLREALPLINNISLRKQKEKNEPSKSGGGMVEEEGGKKRDMDETTLLMTSTTTEEGDAETVTVALQIGLPSVAASDDLNGSRKIPAACAQMNEKEDARSVISGHPFDRLNKVQYWIPTPSQILIGPTQFLCHVCSKSFNRYNNLQMHMWGHGSQYRKGPDSLKGTQPSAMLRLPCFCCAPGCKHNIDHPRARPLKDFRTLQTHYKRKHGIKPYMCRKCDKTFAVKGDWRTHEKNCGKIWYCLCGSDFKHKRSLKDHIKAFGHGHGAVDIDCMQEDEAASEIEHDGDISM

SEQ ID NO: 51715 - protein, 331 aa, Glycine max
  peptide (1)..(331): Ceres Seq. ID no. 14311574
  misc_feature (281)..(306): Pfam Name: Zinc finger, C2H2 type Pfam Description: Zinc finger, C2H2 type
  misc_feature (155)..(329): Homolog of NCBI NO: 15222242 NR Description: zinc finger protein -related [Arabidopsis
  misc_feature (96)..(323): Homolog of NCBI NO: 30693123 NR Description: transparent testa 1 (TT1) protein [Arabidopsis
  misc_feature (96)..(323): Homolog of NCBI NO: 18253283 NR Description: transparent testa 1 [Arabidopsis thaliana]
  misc_feature (1)..(324): Homolog of NCBI NO: 30685975 NR Description: DNA-binding protein -related [Arabidopsis
  misc_feature (1)..(324): Homolog of NCBI NO: 9294415 NR Description: zinc finger-like protein [Arabidopsis thaliana]
  misc_feature (1)..(324): Homolog of NCBI NO: 15223781 NR Description: expressed protein [Arabidopsis thaliana]
  misc_feature (1)..(118): Homolog of NCBI NO: 15230370 NR Description: zinc finger - like protein [Arabidopsis thaliana]
  misc_feature (134)..(328): Homolog of NCBI NO: 15230370 NR Description: zinc finger - like protein [Arabidopsis thaliana]
  misc_feature (1)..(118): Homolog of NCBI NO: 28973719 NR Description: putative zinc finger protein [Arabidopsis
  misc_feature (135)..(328): Homolog of NCBI NO: 28973719 NR Description: putative zinc finger protein [Arabidopsis
MPLYSHLSSFSTSQSNLFSSYSNNNTFAIQSETSSSYAPPSPPLREALPLINNISLRKQKEKNEPSKSGGGMVEEEGGKKRDMDETTLLMTSTTTEEGDAETVTVALQIGLPSVAASDDLNGSRKIPAACAQMNEKEDARSVISGHPFDRLNKVQYWIPTPSQILIGPTQFLCHVCSKSFNRYNNLQMHMWGHGSQYRKGPDSLKGTQPSAMLRLPCFCCAPGCKHNIDHPRARPLKDFRTLQTHYKRKHGIKPYMCRKCDKTFAVKGDWRTHEKNCGKIWYCLCGSDFKHKRSLKDHIKAFGHGHGAVDIDCMQEDEAASEIEHDGDISM

SEQ ID NO: 51716 - protein, 260 aa, Glycine max
  peptide (1)..(260): Ceres Seq. ID no. 14311575
  misc_feature (210)..(235): Pfam Name: Zinc finger, C2H2 type Pfam Description: Zinc finger, C2H2 type
  misc_feature (84)..(258): Homolog of NCBI NO: 15222242 NR Description: zinc finger protein -related [Arabidopsis
  misc_feature (25)..(252): Homolog of NCBI NO: 30693123 NR Description: transparent testa 1 (TT1) protein [Arabidopsis
  misc_feature (25)..(252): Homolog of NCBI NO: 18253283 NR Description: transparent testa 1 [Arabidopsis thaliana]
  misc_feature (1)..(253): Homolog of NCBI NO: 30685975 NR Description: DNA-binding protein -related [Arabidopsis
  misc_feature (1)..(253): Homolog of NCBI NO: 9294415 NR Description: zinc finger-like protein [Arabidopsis thaliana]
  misc_feature (1)..(253): Homolog of NCBI NO: 15223781 NR Description: expressed protein [Arabidopsis thaliana]
  misc_feature (1)..(47): Homolog of NCBI NO: 15230370 NR Description: zinc finger - like protein [Arabidopsis thaliana]
  misc_feature (63)..(257): Homolog of NCBI NO: 15230370 NR Description: zinc finger - like protein [Arabidopsis thaliana]
  misc_feature (1)..(47): Homolog of NCBI NO: 28973719 NR Description: putative zinc finger protein [Arabidopsis
  misc_feature (64)..(257): Homolog of NCBI NO: 28973719 NR Description: putative zinc finger protein [Arabidopsis
MVEEEGGKKRDMDETTLLMTSTTTEEGDAETVTVALQIGLPSVAASDDLNGSRKIPAACAQMNEKEDARSVISGHPFDRLNKVQYWIPTPSQILIGPTQFLCHVCSKSFNRYNNLQMHMWGHGSQYRKGPDSLKGTQPSAMLRLPCFCCAPGCKHNIDHPRARPLKDFRTLQTHYKRKHGIKPYMCRKCDKTFAVKGDWRTHEKNCGKIWYCLCGSDFKHKRSLKDHIKAFGHGHGAVDIDCMQEDEAASEIEHDGDISM

SEQ ID NO: 51717 - DNA, 1365 bp, Glycine max
  misc_feature (1)..(1365): Ceres Seq. ID no. 14311579
ccttaatcttaacagaaacacacacttgttctgttcctacggttttgttatggctcttccttcactatcctttctcttcatcttcacttccttcatcgtctccgtctcacactcaataccctttattgttattcatggaattggggatcagtgctctaatcgtggagtgaaaaaattcacacagcaattgagcagcttctctggtgctgaaggatattgtgtcgaggttggaaatggatcatgggattcatggtttgagcctttgaaagagcaggctgagattgtttgtgaaaaggtgaagcaaatgaaagaattgaaggaaggatacaacattgttggactttcccagggaaatttaattggtcgaggcgttgtggaattttgtgaaggaggacctcctgttaaaaactttatctctttagcaggccctcacgctggtactgcttcagttcccctatgtggttcaggtatcttctgcgttcttgcagacaccctcatcaagggagaggtttacagtagctatattcaagaacacttggctcctagtggatatcttaaattaccgaatgccatacctgattatttggagaactgtagatttcttccagtgcttaacaatgaaataccagataagagaaattctacttacaaggaaagatttagtagcttgcagaatttggtacttatcatgtttgagcacgacactgttttaataccaaaggaaacttcctggtttggatattacccagatggctacttcaagccagttttaccaccacaatcaacagaactctacattgaggattggataggcttaagaactctagatgaagctggaaaagttcacttcattagtgttccaggaaatcatcttggaatctcccaagaggatatgaaaaagcatgtagtgccatatttgaaggatcacatattcgtacaagatagtatcaataaggctaggttcaggttgcgaggagttaatcagaaagttattcaaagtaatatgatggaacaatctcaaaaggaggaggtggaaccatcatcctccccattacttgatggatcattgccatactggtggcctacaccattcaagactttccttggtgaattgattggcattaatgaagaggaatctatacaaaggaaataatcacattacacgttattgtgaaactaaatctattaaattgaacaaaatgtgtttggactgatcaaaagatttatcagatagatatagaaaaatagtattatatgttgatattagtttagttgataaatatcaaaatgcttcacttggaagtcttaggttctattttctttggtgaatacttatgaacacctaattttgtttgacttctctct

SEQ ID NO: 51718 - protein, 383 aa, Glycine max
  peptide (1)..(383): Ceres Seq. ID no. 14311580
  misc_feature (38)..(306): Pfam Name: Palmitoyl protein thioesterase Pfam Description: Palmitoyl protein thioesterase
  misc_feature (19)..(308): Homolog of NCBI NO: 15236077 NR Description: palmitoyl protein thioesterase precursor,
  misc_feature (31)..(308): Homolog of NCBI NO: 21554369 NR Description: palmitoyl-protein thioesterase precursor-like
  misc_feature (32)..(306): Homolog of NCBI NO: 15236079 NR Description: palmitoyl protein thioesterase precursor,
  misc_feature (31)..(308): Homolog of NCBI NO: 15236078 NR Description: palmitoyl protein thioesterase precursor,
  misc_feature (32)..(318): Homolog of NCBI NO: 28393539 NR Description: putative palmitoyl-protein thioesterase precursor
  misc_feature (32)..(318): Homolog of NCBI NO: 15238063 NR Description: palmitoyl protein thioesterase precursor,
  misc_feature (18)..(296): Homolog of NCBI NO: 37536884 NR Description: putative palmitoyl-protein thioesterase
  misc_feature (34)..(308): Homolog of NCBI NO: 21593393 NR Description: palmitoyl-protein thioesterase precursor-like
  misc_feature (34)..(308): Homolog of NCBI NO: 14334718 NR Description: putative palmitoyl-protein thioesterase precursor
  misc_feature (34)..(308): Homolog of NCBI NO: 15232301 NR Description: palmitoyl protein thioesterase precursor,
LNLNRNTHLFCSYGFVMALPSLSFLFIFTSFIVSVSHSIPFIVIHGIGDQCSNRGVKKFTQQLSSFSGAEGYCVEVGNGSWDSWFEPLKEQAEIVCEKVKQMKELKEGYNIVGLSQGNLIGRGVVEFCEGGPPVKNFISLAGPHAGTASVPLCGSGIFCVLADTLIKGEVYSSYIQEHLAPSGYLKLPNAIPDYLENCRFLPVLNNEIPDKRNSTYKERFSSLQNLVLIMFEHDTVLIPKETSWFGYYPDGYFKPVLPPQSTELYIEDWIGLRTLDEAGKVHFISVPGNHLGISQEDMKKHVVPYLKDHIFVQDSINKARFRLRGVNQKVIQSNMMEQSQKEEVEPSSSPLLDGSLPYWWPTPFKTFLGELIGINEEESIQRK

SEQ ID NO: 51719 - protein, 367 aa, Glycine max
  peptide (1)..(367): Ceres Seq. ID no. 14311581
  misc_feature (22)..(290): Pfam Name: Palmitoyl protein thioesterase Pfam Description: Palmitoyl protein thioesterase
  misc_feature (3)..(292): Homolog of NCBI NO: 15236077 NR Description: palmitoyl protein thioesterase precursor,
  misc_feature (15)..(292): Homolog of NCBI NO: 21554369 NR Description: palmitoyl-protein thioesterase precursor-like
  misc_feature (16)..(290): Homolog of NCBI NO: 15236079 NR Description: palmitoyl protein thioesterase precursor,
  misc_feature (15)..(292): Homolog of NCBI NO: 15236078 NR Description: palmitoyl protein thioesterase precursor,
  misc_feature (16)..(302): Homolog of NCBI NO: 28393539 NR Description: putative palmitoyl-protein thioesterase precursor
  misc_feature (16)..(302): Homolog of NCBI NO: 15238063 NR Description: palmitoyl protein thioesterase precursor,
  misc_feature (2)..(280): Homolog of NCBI NO: 37536884 NR Description: putative palmitoyl-protein thioesterase
  misc_feature (18)..(292): Homolog of NCBI NO: 21593393 NR Description: palmitoyl-protein thioesterase precursor-like
  misc_feature (18)..(292): Homolog of NCBI NO: 14334718 NR Description: putative palmitoyl-protein thioesterase precursor
  misc_feature (18)..(292): Homolog of NCBI NO: 15232301 NR Description: palmitoyl protein thioesterase precursor,
MALPSLSFLFIFTSFIVSVSHSIPFIVIHGIGDQCSNRGVKKFTQQLSSFSGAEGYCVEVGNGSWDSWFEPLKEQAEIVCEKVKQMKELKEGYNIVGLSQGNLIGRGVVEFCEGGPPVKNFISLAGPHAGTASVPLCGSGIFCVLADTLIKGEVYSSYIQEHLAPSGYLKLPNAIPDYLENCRFLPVLNNEIPDKRNSTYKERFSSLQNLVLIMFEHDTVLIPKETSWFGYYPDGYFKPVLPPQSTELYIEDWIGLRTLDEAGKVHFISVPGNHLGISQEDMKKHVVPYLKDHIFVQDSINKARFRLRGVNQKVIQSNMMEQSQKEEVEPSSSPLLDGSLPYWWPTPFKTFLGELIGINEEESIQRK

SEQ ID NO: 51720 - protein, 282 aa, Glycine max
  peptide (1)..(282): Ceres Seq. ID no. 14311582
  misc_feature (1)..(205): Pfam Name: Palmitoyl protein thioesterase Pfam Description: Palmitoyl protein thioesterase
  misc_feature (1)..(207): Homolog of NCBI NO: 15236077 NR Description: palmitoyl protein thioesterase precursor,
  misc_feature (1)..(207): Homolog of NCBI NO: 21554369 NR Description: palmitoyl-protein thioesterase precursor-like
  misc_feature (1)..(205): Homolog of NCBI NO: 15236079 NR Description: palmitoyl protein thioesterase precursor,
  misc_feature (1)..(207): Homolog of NCBI NO: 15236078 NR Description: palmitoyl protein thioesterase precursor,
  misc_feature (1)..(217): Homolog of NCBI NO: 28393539 NR Description: putative palmitoyl-protein thioesterase precursor
  misc_feature (1)..(217): Homolog of NCBI NO: 15238063 NR Description: palmitoyl protein thioesterase precursor,
  misc_feature (1)..(195): Homolog of NCBI NO: 37536884 NR Description: putative palmitoyl-protein thioesterase
  misc_feature (1)..(207): Homolog of NCBI NO: 21593393 NR Description: palmitoyl-protein thioesterase precursor-like
  misc_feature (1)..(207): Homolog of NCBI NO: 14334718 NR Description: putative palmitoyl-protein thioesterase precursor
  misc_feature (1)..(207): Homolog of NCBI NO: 15232301 NR Description: palmitoyl protein thioesterase precursor,
MKELKEGYNIVGLSQGNLIGRGVVEFCEGGPPVKNFISLAGPHAGTASVPLCGSGIFCVLADTLIKGEVYSSYIQEHLAPSGYLKLPNAIPDYLENCRFLPVLNNEIPDKRNSTYKERFSSLQNLVLIMFEHDTVLIPKETSWFGYYPDGYFKPVLPPQSTELYIEDWIGLRTLDEAGKVHFISVPGNHLGISQEDMKKHVVPYLKDHIFVQDSINKARFRLRGVNQKVIQSNMMEQSQKEEVEPSSSPLLDGSLPYWWPTPFKTFLGELIGINEEESIQRK

SEQ ID NO: 51721 - DNA, 1397 bp, Glycine max
  misc_feature (1)..(1397): Ceres Seq. ID no. 13594740
atctctctatccctccctccctctctctttctctttctctctttccctgggttggagaacttgcaggtccttaaaattaaaccatggcttcatctttaaaccaacgcatgttattccctcttatgttcgtaattggtatgttctgcttaatggtaactccttctattgcggaacttcccatattcaaacaccctccaaaaaaacaacaatctcttaatatattggtccttggagattggggaagaaaaggaacctacaatcaatctttggtcgccaatcagatgggaattgtgggagagaaactagacatagattttgtgatctccactggtgacaatttttacgaagatggactaaaaggggttgatgatccagcattctaccaatcattcgtcgacatgtacactgccccaagcttgcaaaagacatggtacactgttctgggtaaccatgactacagaggtgatgttggggcacaactaagtccaattctaaaacaaaaagatagcagatggctttgcatgagatcttttattctcgatggagaaattgtggaatttttctttgtggacaccactccatttgtagaagagtacttcacggacccaggagagcatacctatgactgggaaggcgttcttcctcgcctagcttacctttcagaactcttgaaggatgttgatttagctttggctcaatcaaaagcaaaatggaagatggtggtgggtcatcataccatcaacagtgctgggcatcatggtaacaccgaagagcttaaacagctacttgttcccatcttagaggcgaacgatgttgatgcatacataaatggacatgaccactgcttgcagcatataattgacaataatagtggaattcactttataacaagtggaggtggatcaaaggcatggtcgggcgatgtcaagccatggaaactggaagaactgaagttgtattatgatgggcaaggattcatgtctatgcagatcaccaaaagcaaagcagatatcatattttatgatgcctttggcaaagttttgcatacatggagcatatccaaagaccgtaacgtagcagcctggatataataagctaaagtacacacattaccggctctatgttatgaaaatggaggtccctctggctgacaattagggcaacttaaaaatgtactatttgtaacaaagaaaagaagaaaaaagaacgtttagagaaattctaatgtccttgcagtagctgtagtatgcaccctaactcgtgctatagaagtttcagaaacaaaggcatacactactttgtagtatttgtaagtacttctgtaagtgatcattgagccttgaggcttgccctgaccctggtgagcccttgggacccaatcacataaacttttcctt

SEQ ID NO: 51722 - protein, 335 aa, Glycine max
  peptide (1)..(335): Ceres Seq. ID no. 13594741
  misc_feature (44)..(255): Pfam Name: Calcineurin-like phosphoesterase Pfam Description: Calcineurin-like phosphoesterase
  misc_feature (13)..(327): Homolog of NCBI NO: 26452681 NR Description: putative purple acid phosphatase [Arabidopsis
  misc_feature (1)..(323): Homolog of NCBI NO: 30911094 NR Description: putative purple acid phosphatase [Arabidopsis
  misc_feature (1)..(323): Homolog of NCBI NO: 30683951 NR Description: calcineurin-like phosphoesterase family
  misc_feature (13)..(327): Homolog of NCBI NO: 22325417 NR Description: purple acid phosphatase (PAP7) [Arabidopsis
  misc_feature (12)..(328): Homolog of NCBI NO: 22325419 NR Description: calcineurin-like phosphoesterase family
MASSLNQRMLFPLMFVIGMFCLMVTPSIAELPIFKHPPKKQQSLNILVLGDWGRKGTYNQSLVANQMGIVGEKLDIDFVISTGDNFYEDGLKGVDDPAFYQSFVDMYTAPSLQKTWYTVLGNHDYRGDVGAQLSPILKQKDSRWLCMRSFILDGEIVEFFFVDTTPFVEEYFTDPGEHTYDWEGVLPRLAYLSELLKDVDLALAQSKAKWKMVVGHHTINSAGHHGNTEELKQLLVPILEANDVDAYINGHDHCLQHIIDNNSGIHFITSGGGSKAWSGDVKPWKLEELKLYYDGQGFMSMQITKSKADIIFYDAFGKVLHTWSISKDRNVAAWI

SEQ ID NO: 51723 - protein, 327 aa, Glycine max
  peptide (1)..(327): Ceres Seq. ID no. 13594742
  misc_feature (36)..(247): Pfam Name: Calcineurin-like phosphoesterase Pfam Description: Calcineurin-like phosphoesterase
  misc_feature (5)..(319): Homolog of NCBI NO: 26452681 NR Description: putative purple acid phosphatase [Arabidopsis
  misc_feature (1)..(315): Homolog of NCBI NO: 30911094 NR Description: putative purple acid phosphatase [Arabidopsis
  misc_feature (1)..(315): Homolog of NCBI NO: 30683951 NR Description: calcineurin-like phosphoesterase family
  misc_feature (5)..(319): Homolog of NCBI NO: 22325417 NR Description: purple acid phosphatase (PAP7) [Arabidopsis
  misc_feature (4)..(320): Homolog of NCBI NO: 22325419 NR Description: calcineurin-like phosphoesterase family
MLFPLMFVIGMFCLMVTPSIAELPIFKHPPKKQQSLNILVLGDWGRKGTYNQSLVANQMGIVGEKLDIDFVISTGDNFYEDGLKGVDDPAFYQSFVDMYTAPSLQKTWYTVLGNHDYRGDVGAQLSPILKQKDSRWLCMRSFILDGEIVEFFFVDTTPFVEEYFTDPGEHTYDWEGVLPRLAYLSELLKDVDLALAQSKAKWKMVVGHHTINSAGHHGNTEELKQLLVPILEANDVDAYINGHDHCLQHIIDNNSGIHFITSGGGSKAWSGDVKPWKLEELKLYYDGQGFMSMQITKSKADIIFYDAFGKVLHTWSISKDRNVAAWI

SEQ ID NO: 51724 - protein, 322 aa, Glycine max
  peptide (1)..(322): Ceres Seq. ID no. 13594743
  misc_feature (31)..(242): Pfam Name: Calcineurin-like phosphoesterase Pfam Description: Calcineurin-like phosphoesterase
  misc_feature (1)..(314): Homolog of NCBI NO: 26452681 NR Description: putative purple acid phosphatase [Arabidopsis
  misc_feature (1)..(310): Homolog of NCBI NO: 30911094 NR Description: putative purple acid phosphatase [Arabidopsis
  misc_feature (1)..(310): Homolog of NCBI NO: 30683951 NR Description: calcineurin-like phosphoesterase family
  misc_feature (1)..(314): Homolog of NCBI NO: 22325417 NR Description: purple acid phosphatase (PAP7) [Arabidopsis
  misc_feature (1)..(315): Homolog of NCBI NO: 22325419 NR Description: calcineurin-like phosphoesterase family
MFVIGMFCLMVTPSIAELPIFKHPPKKQQSLNILVLGDWGRKGTYNQSLVANQMGIVGEKLDIDFVISTGDNFYEDGLKGVDDPAFYQSFVDMYTAPSLQKTWYTVLGNHDYRGDVGAQLSPILKQKDSRWLCMRSFILDGEIVEFFFVDTTPFVEEYFTDPGEHTYDWEGVLPRLAYLSELLKDVDLALAQSKAKWKMVVGHHTINSAGHHGNTEELKQLLVPILEANDVDAYINGHDHCLQHIIDNNSGIHFITSGGGSKAWSGDVKPWKLEELKLYYDGQGFMSMQITKSKADIIFYDAFGKVLHTWSISKDRNVAAWI

SEQ ID NO: 51725 - DNA, 637 bp, Glycine max
  misc_feature (1)..(637): Ceres Seq. ID no. 15172982
gttagaaataaaacaaaggagattggtctgggagaaagaagcaaagaagaaaaatggcagcaacatttgcagctccatcgacagtgataggtctcggaggatcatctgtttctcccatcaaggccaaagctctctcttcatcctttttgaaaccaacattaagagcaaagaaccctctgaaagtcgccggagcatcaggaggaagattcacttgctttgagaggaactggctgaggagagatctgaacgtggtggggttcgggcttgtcggatggctagctccgtctagcattccggcgataaacgggaagagcctgacgggtctcttctttgagagcataggaactgagctcgctcacttcccaactcctccagctctcacgtcacagttctggttgtggctgatcacctggcacttaggcctcttcatctgcctcaccttcggacaaatcggatttaagggcaggaccgaagattacttcaagaaataaaccattccctcttgttccatctgtacttattatcttactctctcttggttctctgtgtaatagtatgactctatatgaagctttctttcgattcctatatttgatgttttgagtattcaaaaccggttcgatgaccgagttcaacc

SEQ ID NO: 51726 - protein, 145 aa, Glycine max; identical to SEQ ID NO: 126
  peptide (1)..(145): Ceres Seq. ID no. 15172983
  misc_feature (7)..(145): Homolog of NCBI NO: 32479727 NR Description: OJ991214_12.3 [Oryza sativa (japonica
  misc_feature (1)..(145): Homolog of NCBI NO: 6996562 NR Description: putative 16kDa membrane protein [Nicotiana
  misc_feature (1)..(143): Homolog of NCBI NO: 22531014 NR Description: expressed protein [Arabidopsis thaliana]
  misc_feature (1)..(143): Homolog of NCBI NO: 18390888 NR Description: expressed protein [Arabidopsis thaliana]

SEQ ID NO: 51727 - protein, 72 aa, Glycine max
  peptide (1)..(72): Ceres Seq. ID no. 15172984
LEIKQRRLVWEKEAKKKNGSNICSSIDSDRSRRIICFSHQGQSSLFILFETNIKSKEPSESRRSIRRKIHLL

SEQ ID NO: 51728 - DNA, 1157 bp, Glycine max
  misc_feature (1)..(1157): Ceres Seq. ID no. 14311596
atcctaatttgttattgttatctcgtcctagcacactccagactctgcgaacagctaccactgtcgaccatcaccatgcagtccagctccaaggccggcggcaatggcgacgaggagcacctggtttgcgtgacgggggcggggagcttcatcgggtcgtgggtggtcaaggagctcctcctccgtggctaccatgtccggggaaccgccagagatcccgctgaccgcaagaacgcgcatctgctggcgctggacggcgccgaggagaggctcaccctgtgccgcgccgacgtcatggacggcgacagcctcggcgccgcattccatggctgccgcggcgtgttccatgtcgcctccccggtctccaatgaccctgagctcatgcctgaggccgtggaggggacgaggaacgtgatcaacgcggcagcagacgcgggcgtgcggcgtgtggtgttcacttcctcctacggtgccgtgcacatggacccaaagcggagcccggacaccgtcgtcgatgagtcgtgctggagcgactacgactactgcaaacaaaccggcaatctgtactgctgcgccaagatgatggcggaggtcgccgcgaaggaggaggcgaccaagagggggctggagctggcggtggtggtgccggcgacgaccatcggtcctgccctgcagcagacgctcaacttcagcagtgaccacgtcgcccgctacctcacaggcgccaagccggcctaccagaacgtcgtcaccgcctacatcgatgtccgagacgtcgcccgcgcgcacgccctcgtctacgagcaccctgacgcgcgcggcgatcgctacctctgcgtcagcgccgtgatgcaccgcgctcacttcgtccggctcctcaaggacctctacccgcagtaccccgtcaccgccaagcgcgaagacgacggcaagccgatggcgagggagtacaggttctcgaatcagaagctcggggatttgggcttggagttcactgacatgaggacaagtttgtacgacacggtgatttgcctgcagcacaggggccatgtccctgtcatcgtgccacgtcatcgtgcatgtttgtgaaaattataatgtgtacacaaattgaactcgattataagcaaataaatgaggataagtactctgttttc

SEQ ID NO: 51729 - protein, 362 aa, Glycine max
  peptide (1)..(362): Ceres Seq. ID no. 14311597
  misc_feature (42)..(278): Pfam Name: 3-beta hydroxysteroid dehydrogenase/isomerase family Pfam Description: 3-beta hydroxysteroid dehydrogenase/isomerase
  misc_feature (34)..(357): Homolog of NCBI NO: 3242328 NR Description: cinnamoyl-CoA reductase [Zea mays]
  misc_feature (23)..(356): Homolog of NCBI NO: 9964087 NR Description: cinnamoyl CoA reductase [Lolium perenne]
  misc_feature (29)..(360): Homolog of NCBI NO: 2960364 NR Description: cinnamoyl CoA reductase [Populus balsamifera
  misc_feature (29)..(360): Homolog of NCBI NO: 40233135 NR Description: cinnamoyl CoA reductase [Populus tomentosa]
  misc_feature (29)..(360): Homolog of NCBI NO: 9998901 NR Description: cinnamoyl-CoA reductase [Populus balsamifera
  misc_feature (32)..(351): Homolog of NCBI NO: 17978649 NR Description: cinnamoyl-CoA reductase [Pinus taeda]
  misc_feature (29)..(353): Homolog of NCBI NO: 31414896 NR Description: cinnamoyl CoA reductase [Fragaria x ananassa]
  misc_feature (39)..(357): Homolog of NCBI NO: 34902518 NR Description: putative cinnamoyl-CoA reductase
  misc_feature (36)..(360): Homolog of NCBI NO: 34902520 NR Description: putative cinnamoyl-CoA reductase
  misc_feature (26)..(356): Homolog of NCBI NO: 18307514 NR Description: cinnamoyl CoA reductase [Oryza sativa]
ILICYCYLVLAHSRLCEQLPLSTITMQSSSKAGGNGDEEHLVCVTGAGSFIGSWVVKELLLRGYHVRGTARDPADRKNAHLLALDGAEERLTLCRADVMDGDSLGAAFHGCRGVFHVASPVSNDPELMPEAVEGTRNVINAAADAGVRRVVFTSSYGAVHMDPKRSPDTVVDESCWSDYDYCKQTGNLYCCAKMMAEVAAKEEATKRGLELAVVVPATTIGPALQQTLNFSSDHVARYLTGAKPAYQNVVTAYIDVRDVARAHALVYEHPDARGDRYLCVSAVMHRAHFVRLLKDLYPQYPVTAKREDDGKPMAREYRFSNQKLGDLGLEFTDMRTSLYDTVICLQHRGHVPVIVPRHRACL

SEQ ID NO: 51730 - protein, 337 aa, Glycine max
  peptide (1)..(337): Ceres Seq. ID no. 14311598
  misc_feature (17)..(253): Pfam Name: 3-beta hydroxysteroid dehydrogenase/isomerase family Pfam Description: 3-beta hydroxysteroid dehydrogenase/isomerase
  misc_feature (9)..(332): Homolog of NCBI NO: 3242328 NR Description: cinnamoyl-CoA reductase [Zea mays]
  misc_feature (1)..(331): Homolog of NCBI NO: 9964087 NR Description: cinnamoyl CoA reductase [Lolium perenne]
  misc_feature (4)..(335): Homolog of NCBI NO: 2960364 NR Description: cinnamoyl CoA reductase [Populus balsamifera
  misc_feature (4)..(335): Homolog of NCBI NO: 40233135 NR Description: cinnamoyl CoA reductase [Populus tomentosa]
  misc_feature (4)..(335): Homolog of NCBI NO: 9998901 NR Description: cinnamoyl-CoA reductase [Populus balsamifera
  misc_feature (7)..(326): Homolog of NCBI NO: 17978649 NR Description: cinnamoyl-CoA reductase [Pinus taeda]
  misc_feature (4)..(328): Homolog of NCBI NO: 31414896 NR Description: cinnamoyl CoA reductase [Fragaria x ananassa]
  misc_feature (14)..(332): Homolog of NCBI NO: 34902518 NR Description: putative cinnamoyl-CoA reductase
  misc_feature (11)..(335): Homolog of NCBI NO: 34902520 NR Description: putative cinnamoyl-CoA reductase
  misc_feature (1)..(331): Homolog of NCBI NO: 18307514 NR Description: cinnamoyl CoA reductase [Oryza sativa]
MQSSSKAGGNGDEEHLVCVTGAGSFIGSWVVKELLLRGYHVRGTARDPADRKNAHLLALDGAEERLTLCRADVMDGDSLGAAFHGCRGVFHVASPVSNDPELMPEAVEGTRNVINAAADAGVRRVVFTSSYGAVHMDPKRSPDTVVDESCWSDYDYCKQTGNLYCCAKMMAEVAAKEEATKRGLELAVVVPATTIGPALQQTLNFSSDHVARYLTGAKPAYQNVVTAYIDVRDVARAHALVYEHPDARGDRYLCVSAVMHRAHFVRLLKDLYPQYPVTAKREDDGKPMAREYRFSNQKLGDLGLEFTDMRTSLYDTVICLQHRGHVPVIVPRHRACL

SEQ ID NO: 51731 - protein, 264 aa, Glycine max
  peptide (1)..(264): Ceres Seq. ID no. 14311599
  misc_feature (1)..(180): Pfam Name: 3-beta hydroxysteroid dehydrogenase/isomerase family Pfam Description: 3-beta hydroxysteroid dehydrogenase/isomerase
  misc_feature (1)..(259): Homolog of NCBI NO: 3242328 NR Description: cinnamoyl-CoA reductase [Zea mays]
  misc_feature (1)..(258): Homolog of NCBI NO: 9964087 NR Description: cinnamoyl CoA reductase [Lolium perenne]
  misc_feature (1)..(262): Homolog of NCBI NO: 2960364 NR Description: cinnamoyl CoA reductase [Populus balsamifera
  misc_feature (1)..(262): Homolog of NCBI NO: 40233135 NR Description: cinnamoyl CoA reductase [Populus tomentosa]
  misc_feature (1)..(262): Homolog of NCBI NO: 9998901 NR Description: cinnamoyl-CoA reductase [Populus balsamifera
  misc_feature (1)..(253): Homolog of NCBI NO: 17978649 NR Description: cinnamoyl-CoA reductase [Pinus taeda]
  misc_feature (1)..(255): Homolog of NCBI NO: 31414896 NR Description: cinnamoyl CoA reductase [Fragaria x ananassa]
  misc_feature (1)..(259): Homolog of NCBI NO: 34902518 NR Description: putative cinnamoyl-CoA reductase
  misc_feature (1)..(262): Homolog of NCBI NO: 34902520 NR Description: putative cinnamoyl-CoA reductase
  misc_feature (1)..(258): Homolog of NCBI NO: 18307514 NR Description: cinnamoyl CoA reductase [Oryza sativa]
MDGDSLGAAFHGCRGVFHVASPVSNDPELMPEAVEGTRNVINAAADAGVRRVVFTSSYGAVHMDPKRSPDTVVDESCWSDYDYCKQTGNLYCCAKMMAEVAAKEEATKRGLELAVVVPATTIGPALQQTLNFSSDHVARYLTGAKPAYQNVVTAYIDVRDVARAHALVYEHPDARGDRYLCVSAVMHRAHFVRLLKDLYPQYPVTAKREDDGKPMAREYRFSNQKLGDLGLEFTDMRTSLYDTVICLQHRGHVPVIVPRHRACL

SEQ ID NO: 51732 - DNA, 1320 bp, Glycine max
  misc_feature (1)..(1320): Ceres Seq. ID no. 14311568
tttacttaaatttgtctactgctagagggcataaaagcaactccacctagtggggggataagactagattattgttctaactcccattattgcaatttcctttggttcttggttttattatgagaatgggtaatagttataccagaatcttgcatatttcttttgcttgacagtttttttggggggtagagaagtggatttagcctgagaacttgagtggctgaacgactgataacgtaccaattcaggaagggtttttccttagaggcctatggaatatggaatgttgcttttgttaccattcttaataatcttagcaatacattcttatgtaattaatatatttctattcccttttactgttagataattactttttcctttctaaaacatatatgtttgggatttgaggccatatacatatttgtttggtcaattatggctgctgacattttattcatgactgtatctactactccaccggtgtccctagaaaaaaaattattgactggattttctttattacaatattatctgctcctagcgttgaaattgatggctcgttgggggattctgacagtctcaaagagtctggctcaaagaaaagggttaggtctgagtcatgtgctgcttctggctccaaggcatgtcgggagaagttgagaagggataggcttaatgacaagtttgttgaattgggcgccattttggagcctggaaggcctgccaaaacagacaaggctgctatcctgattgatgctgtccgaatggtgacccagttacggggtgaagcccagaagttgaaagacactaatcagggtcttcaagaaaagattaaagagttaaaggctgagaagaacgaacttcgcgatgagaaacagaggctcaaggcagagaaggagaaactggagcagcagctgaaatctttgaatgcacagcctagtttcatgcctccccctgctgcaatgcctgctgcatttgcggcacaaggccaagcccatggcaacaagttggtaccttttattagttatcccggagttgcaatgtggcaattcatgccacctgctgcagtggatacctcacaggatcatgttctccgtccaccagttgcctaagctggcactgtacaattctctgggccagcattttggctcaaggttgtatccattttaccaataccttcttggctttgttagttctcttctaagtattctaactggactcagtggtgacttctgactatatctggcatatgatactattatgattaatgctggtagttgcatgtaaatcagtcaatgttaaataagcttgtctggc

SEQ ID NO: 51733 - protein, 115 aa, Glycine max
  peptide (1)..(115): Ceres Seq. ID no. 14311569
  misc_feature (1)..(115): Homolog of NCBI NO: 30682847 NR Description: bHLH protein [Arabidopsis thaliana]
  misc_feature (1)..(115): Homolog of NCBI NO: 18414212 NR Description: bHLH protein [Arabidopsis thaliana]
  misc_feature (1)..(115): Homolog of NCBI NO: 22331274 NR Description: bHLH protein [Arabidopsis thaliana]
  misc_feature (1)..(115): Homolog of NCBI NO: 20127030 NR Description: putative bHLH transcription factor [Arabidopsis
  misc_feature (1)..(115): Homolog of NCBI NO: 32352190 NR Description: hypothetical protein [Oryza sativa (japonica
  misc_feature (1)..(115): Homolog of NCBI NO: 38636768 NR Description: helix-loop-helix-like protein
  misc_feature (1)..(115): Homolog of NCBI NO: 29367409 NR Description: helix-loop-helix-like protein
  misc_feature (1)..(115): Homolog of NCBI NO: 15223710 NR Description: bHLH protein [Arabidopsis thaliana]
  misc_feature (1)..(115): Homolog of NCBI NO: 21592325 NR Description: bHLH transcription factor, putative [Arabidopsis
  misc_feature (1)..(115): Homolog of NCBI NO: 15239706 NR Description: bHLH protein [Arabidopsis thaliana]
MVTQLRGEAQKLKDTNQGLQEKIKELKAEKNELRDEKQRLKAEKEKLEQQLKSLNAQPSFMPPPAAMPAAFAAQGQAHGNKLVPFISYPGVAMWQFMPPAAVDTSQDHVLRPPVA

SEQ ID NO: 51734 - protein, 102 aa, Glycine max
  peptide (1)..(102): Ceres Seq. ID no. 14311570
MHSLVSCLPLLQCLLHLRHKAKPMATSWYLLLVIPELQCGNSCHLLQWIPHRIMFSVHQLPKLALYNSLGQHFGSRLYPFYQYLLGFVSSLLSILTGLSGDF

SEQ ID NO: 51735 - protein, 79 aa, Glycine max
  peptide (1)..(79): Ceres Seq. ID no. 14311571
MATSWYLLLVIPELQCGNSCHLLQWIPHRIMFSVHQLPKLALYNSLGQHFGSRLYPFYQYLLGFVSSLLSILTGLSGDF

SEQ ID NO: 51736 - DNA, 780 bp, Glycine max
  misc_feature (1)..(780): Ceres Seq. ID no. 15172970
atcccaagctagcaaagcccacctagcgctcagccacaagccagtacactctagctagctactagtgttatccacatagcaatggcgcccttcaagctcgccctcttcctcgccatgaacctggccatcctcttggccgtgcatggctgcgggtcatgcggcaacacaccgcccgtcccagtcccaagcccgcccatcgccgtgcccccaccagctcccgtgccgtctccgccttcgtccggtggtgggggcggcacctgctccatcgacacgctgaagctgaaggtatgcgccaacgtgttgaacctgctgaagctaaacctcggcgtgccgacggacgagcagtgctgcccccttctgagcggcctcgccgacctagacgccgccgtgtgcctctgcaccgccatcaaggccaatgtcctcggcatcaagctcaacgtccctgtcgacctcgttctcctcctcaaccagtgcggcaagacctgccctgccgatttcacctgccctagctgatccatccatcacaaaccatgcatttcatacttgcatcatcatcatcatcgccgtacttgcaattacaatgttttctcgtatacgcatgcacctatatatttcctcgtaattacaatatgttatatgtcagtcgcgtgcatgcatgggctccctccctcgtgcatgcatgcttcaggcattcagttagtcatttgccgttacggtattccagtatttgtaaaagggtatatgtgcgtggaataaaaagtttgttcatgttgtcttttt

SEQ ID NO: 51737 - protein, 143 aa, Glycine max
  peptide (1)..(143): Ceres Seq. ID no. 15172971
  misc_feature (60)..(141): Pfam Name: Protease inhibitor/seed storage/LTP family Pfam Description: Protease inhibitor/seed storage/LTP family
  misc_feature (1)..(143): Homolog of NCBI NO: 38568019 NR Description: OSJNBa0070C17.11 [Oryza sativa (japonica
  misc_feature (29)..(141): Homolog of NCBI NO: 15235388 NR Description: protease inhibitor/seed storage/lipid transfer
  misc_feature (29)..(141): Homolog of NCBI NO: 15235390 NR Description: protease inhibitor/seed storage/lipid transfer
  misc_feature (1)..(143): Homolog of NCBI NO: 399204 NR Description: CORTICAL CELL DELINEATING PROTEIN PRECURSOR
  misc_feature (1)..(141): Homolog of NCBI NO: 37536712 NR Description: putative lipid transfer protein
  misc_feature (1)..(143): Homolog of NCBI NO: 2226329 NR Description: physical impedance induced protein [Zea mays]
  misc_feature (1)..(141): Homolog of NCBI NO: 1084460 NR Description: RCc2 protein - rice
  misc_feature (1)..(141): Homolog of NCBI NO: 37536702 NR Description: putative lipid transfer protein
  misc_feature (1)..(141): Homolog of NCBI NO: 37536704 NR Description: putative lipid transfer protein
  misc_feature (7)..(142): Homolog of NCBI NO: 39748092 NR Description: lipid transfer protein-like protein
MAPFKLALFLAMNLAILLAVHGCGSCGNTPPVPVPSPPIAVPPPAPVPSPPSSGGGGGTCSIDTLKLKVCANVLNLLKLNLGVPTDEQCCPLLSGLADLDAAVCLCTAIKANVLGIKLNVPVDLVLLLNQCGKTCPADFTCPS

SEQ ID NO: 51738 - protein, 132 aa, Glycine max
  peptide (1)..(132): Ceres Seq. ID no. 15172972
  misc_feature (49)..(130): Pfam Name: Protease inhibitor/seed storage/LTP family Pfam Description: Protease inhibitor/seed storage/LTP family
  misc_feature (1)..(132): Homolog of NCBI NO: 38568019 NR Description: OSJNBa0070C17.11 [Oryza sativa (japonica
  misc_feature (18)..(130): Homolog of NCBI NO: 15235388 NR Description: protease inhibitor/seed storage/lipid transfer
  misc_feature (18)..(130): Homolog of NCBI NO: 15235390 NR Description: protease inhibitor/seed storage/lipid transfer
  misc_feature (1)..(132): Homolog of NCBI NO: 399204 NR Description: CORTICAL CELL DELINEATING PROTEIN PRECURSOR
  misc_feature (1)..(130): Homolog of NCBI NO: 37536712 NR Description: putative lipid transfer protein
  misc_feature (1)..(132): Homolog of NCBI NO: 2226329 NR Description: physical impedance induced protein [Zea mays]
  misc_feature (1)..(130): Homolog of NCBI NO: 1084460 NR Description: RCc2 protein - rice
  misc_feature (1)..(130): Homolog of NCBI NO: 37536702 NR Description: putative lipid transfer protein
  misc_feature (1)..(130): Homolog of NCBI NO: 37536704 NR Description: putative lipid transfer protein
  misc_feature (1)..(131): Homolog of NCBI NO: 39748092 NR Description: lipid transfer protein-like protein
MNLAILLAVHGCGSCGNTPPVPVPSPPIAVPPPAPVPSPPSSGGGGGTCSIDTLKLKVCANVLNLLKLNLGVPTDEQCCPLLSGLADLDAAVCLCTAIKANVLGIKLNVPVDLVLLLNQCGKTCPADFTCPS

SEQ ID NO: 51739 - protein, 117 aa, Glycine max
  peptide (1)..(117): Ceres Seq. ID no. 15172973
MRQHTARPSPKPAHRRAPTSSRAVSAFVRWWGRHLLHRHAEAEGMRQRVEPAEAKPRRADGRAVLPPSERPRRPRRRRVPLHRHQGQCPRHQAQRPCRPRSPPQPVRQDLPCRFHLP

SEQ ID NO: 51740 - DNA, 1369 bp, Glycine max
  misc_feature (1)..(1369): Ceres Seq. ID no. 13594719
cctagagcatcctaatcgaaaacctgcttggttgctgagaaaattttccaaatatttcccctttcgattttctcccctttccgggattgcgaaaaacgacgctaattcgtgtagctgcatttagaatcgccaactcagaagcagtcctaattcctcaatggagagttctgaagaggaaactgatggagtctctggtaatcatgctcctaaggaactgattcgtttggcatcaaatggtgcaaaatttatagatgaagtactcaatggtcaaaatgaatgctgtctggataattttcgcatggataaacatgtattctataagttgtgtgatatcctgcaagccaagggtttattgcgtcacacaaatcgaatcaaaattgaggagcaactgggcatatttatgttcattattgggcataatctacggacaagggcggttcaagagttattccgttattctggagaaactattagtcgtcactttaacaatgttttgaatgctataatgtcaatttctctggatctctttcagcctcccggctctggtgttccttcagaaatcattgaagatcctagattctatccatattttaaagattgtgtcggagtaatagatggtatacatgtaccagtaacggtaggtgtagatgagcaaggaccattccgcaataagaatggtttgctttcacagaatattctggcagcttgctcatttgacctcaagtttcattatgttttggctggatgggaaggatctgccacagacttactagtttttaattcagcaatcacaaggaggaacaaattgcaggtccccgaaggtaaatactacatcgtagacagcaagtacccaaatgtgccaggtttcattgctccatattccagtactccctactactccaaggaatttctcagcgattaccacccacaagatgccagtgaactgttcaatcaacgacattcattattacgacatgttacagatcgaacttttgggatcttaaaggcacggtttcctatattgatgtctgctccttcttatccattacaaacacaagtgaagttagtggtggctgcatgtgcgttgcacaattacattcgcagagagaagccagatgattggcttttcaagatgtatgaagaagggtcatttccaatggaggaaccacaacccccattggagatggaagtacctccaaagatggatgttgagacccagacccagccatctgttcatacttttgattcagaagaaattggacttgcttcacagttaagggactccattgctactgaaatgtggaatgattttatccacgatttcccccccatgtaaatttctttagttaagcttatatatgatcatatt

SEQ ID NO: 51741 - protein, 392 aa, Glycine max
  peptide (1)..(392): Ceres Seq. ID no. 15221410
  misc_feature (231)..(321): Pfam Name: Protein of unknown function (DUF635) Pfam Description: Protein of unknown function (DUF635)
  misc_feature (14)..(382): Homolog of NCBI NO: 37531902 NR Description: hypothetical protein [Oryza sativa (japonica
  misc_feature (14)..(382): Homolog of NCBI NO: 38569143 NR Description: OSJNBb0033P05.11 [Oryza sativa (japonica
  misc_feature (42)..(272): Homolog of NCBI NO: 38345208 NR Description: OSJNBb0012E08.4 [Oryza sativa (japonica
  misc_feature (107)..(384): Homolog of NCBI NO: 15230463 NR Description: hypothetical protein [Arabidopsis thaliana]
  misc_feature (34)..(323): Homolog of NCBI NO: 21397269 NR Description: Unknown protein [Oryza sativa (japonica
  misc_feature (42)..(321): Homolog of NCBI NO: 38345857 NR Description: OSJNBa0084K11.21 [Oryza sativa (japonica
  misc_feature (34)..(323): Homolog of NCBI NO: 37530736 NR Description: putative transposase [Oryza sativa (japonica
  misc_feature (27)..(323): Homolog of NCBI NO: 37530994 NR Description: putative transposase [Oryza sativa (japonica
  misc_feature (5)..(386): Homolog of NCBI NO: 34915332 NR Description: transposase-like [Oryza sativa (japonica
  misc_feature (1)..(388): Homolog of NCBI NO: 15238244 NR Description: expressed protein [Arabidopsis thaliana]
MESSEEETDGVSGNHAPKELIRLASNGAKFIDEVLNGQNECCLDNFRMDKHVFYKLCDILQAKGLLRHTNRIKIEEQLGIFMFIIGHNLRTRAVQELFRYSGETISRHFNNVLNAIMSISLDLFQPPGSGVPSEIIEDPRFYPYFKDCVGVIDGIHVPVTVGVDEQGPFRNKNGLLSQNILAACSFDLKFHYVLAGWEGSATDLLVFNSAITRRNKLQVPEGKYYIVDSKYPNVPGFIAPYSSTPYYSKEFLSDYHPQDASELFNQRHSLLRHVTDRTFGILKARFPILMSAPSYPLQTQVKLVVAACALHNYIRREKPDDWLFKMYEEGSFPMEEPQPPLEMEVPPKMDVETQTQPSVHTFDSEEIGLASQLRDSIATEMWNDFIHDFPPM

SEQ ID NO: 51742 - protein, 345 aa, Glycine max
  peptide (1)..(345): Ceres Seq. ID no. 15221411
  misc_feature (184)..(274): Pfam Name: Protein of unknown function (DUF635) Pfam Description: Protein of unknown function (DUF635)
  misc_feature (1)..(335): Homolog of NCBI NO: 37531902 NR Description: hypothetical protein [Oryza sativa (japonica
  misc_feature (1)..(335): Homolog of NCBI NO: 38569143 NR Description: OSJNBb0033P05.11 [Oryza sativa (japonica
  misc_feature (1)..(225): Homolog of NCBI NO: 38345208 NR Description: OSJNBb0012E08.4 [Oryza sativa (japonica
  misc_feature (60)..(337): Homolog of NCBI NO: 15230463 NR Description: hypothetical protein [Arabidopsis thaliana]
  misc_feature (1)..(276): Homolog of NCBI NO: 21397269 NR Description: Unknown protein [Oryza sativa (japonica
  misc_feature (1)..(274): Homolog of NCBI NO: 38345857 NR Description: OSJNBa0084K11.21 [Oryza sativa (japonica
  misc_feature (1)..(276): Homolog of NCBI NO: 37530736 NR Description: putative transposase [Oryza sativa (japonica
  misc_feature (1)..(276): Homolog of NCBI NO: 37530994 NR Description: putative transposase [Oryza sativa (japonica
  misc_feature (1)..(339): Homolog of NCBI NO: 34915332 NR Description: transposase-like [Oryza sativa (japonica
  misc_feature (1)..(341): Homolog of NCBI NO: 15238244 NR Description: expressed protein [Arabidopsis thaliana]
MDKHVFYKLCDILQAKGLLRHTNRIKIEEQLGIFMFIIGHNLRTRAVQELFRYSGETISRHFNNVLNAIMSISLDLFQPPGSGVPSEIIEDPRFYPYFKDCVGVIDGIHVPVTVGVDEQGPFRNKNGLLSQNILAACSFDLKFHYVLAGWEGSATDLLVFNSAITRRNKLQVPEGKYYIVDSKYPNVPGFIAPYSSTPYYSKEFLSDYHPQDASELFNQRHSLLRHVTDRTFGILKARFPILMSAPSYPLQTQVKLVVAACALHNYIRREKPDDWLFKMYEEGSFPMEEPQPPLEMEVPPKMDVETQTQPSVHTFDSEEIGLASQLRDSIATEMWNDFIHDFPPM

SEQ ID NO: 51743 - protein, 311 aa, Glycine max
  peptide (1)..(311): Ceres Seq. ID no. 15221412
  misc_feature (150)..(240): Pfam Name: Protein of unknown function (DUF635) Pfam Description: Protein of unknown function (DUF635)
  misc_feature (1)..(301): Homolog of NCBI NO: 37531902 NR Description: hypothetical protein [Oryza sativa (japonica
  misc_feature (1)..(301): Homolog of NCBI NO: 38569143 NR Description: OSJNBb0033P05.11 [Oryza sativa (japonica
  misc_feature (1)..(191): Homolog of NCBI NO: 38345208 NR Description: OSJNBb0012E08.4 [Oryza sativa (japonica
  misc_feature (26)..(303): Homolog of NCBI NO: 15230463 NR Description: hypothetical protein [Arabidopsis thaliana]
  misc_feature (1)..(242): Homolog of NCBI NO: 21397269 NR Description: Unknown protein [Oryza sativa (japonica
  misc_feature (1)..(240): Homolog of NCBI NO: 38345857 NR Description: OSJNBa0084K11.21 [Oryza sativa (japonica
  misc_feature (1)..(242): Homolog of NCBI NO: 37530736 NR Description: putative transposase [Oryza sativa (japonica
  misc_feature (1)..(242): Homolog of NCBI NO: 37530994 NR Description: putative transposase [Oryza sativa (japonica
  misc_feature (1)..(305): Homolog of NCBI NO: 34915332 NR Description: transposase-like [Oryza sativa (japonica
  misc_feature (1)..(307): Homolog of NCBI NO: 15238244 NR Description: expressed protein [Arabidopsis thaliana]
MFIIGHNLRTRAVQELFRYSGETISRHFNNVLNAIMSISLDLFQPPGSGVPSEIIEDPRFYPYFKDCVGVIDGIHVPVTVGVDEQGPFRNKNGLLSQNILAACSFDLKFHYVLAGWEGSATDLLVFNSAITRRNKLQVPEGKYYIVDSKYPNVPGFIAPYSSTPYYSKEFLSDYHPQDASELFNQRHSLLRHVTDRTFGILKARFPILMSAPSYPLQTQVKLVVAACALHNYIRREKPDDWLFKMYEEGSFPMEEPQPPLEMEVPPKMDVETQTQPSVHTFDSEEIGLASQLRDSIATEMWNDFIHDFPPM

SEQ ID NO: 51744 - DNA, 1502 bp, Glycine max
  misc_feature (1)..(1502): Ceres Seq. ID no. 15171293
acatgatgtaacagacttacatgccttgtgactctttcatttttctccataccttttcttgttccttctgagcttaatcgtattcctcacttcggctgcttggcaatccaagccaaaagcagatcctgcagacgtcataagaaaatcttatgaagaaggatatgataactaatgttaccgagtatgaggcaattgcaaaggaaaaattgccaaagatggtttatgacttctatgcatcaggggctgaggatcagtggactttgaaagagaaccgaaatgcgttctcaaggattctgttccagccgcgtattcttattgatgtaagcaagatagacttgactacaactgtaatgggcttcaaaatatcaatgcctatcatgattgctccaacagccatgcaaaagatggctcaccctgaaggagaattagctactgctagagcagcatcagcagctggcacaatcatgacactatcctcaactgcgacttccagtgtcgaggaggttgcttcaacaggtcccggcattcgtttttttcaactttatgtgttaaaagacagaaatgtggttgctcaggttgtgagaagagctgaaaaagcaggtttcaaggcaattacccttactgtggacagtccaattcttggtcgtagggaggctgatatcaaaaacagatttacattgccaccaaacctggttttgaagaattttgaagggttggatcttggaaagctgaacaagactagtgactcttttgctgcctcttatgctgctgaactatacgatcggtcactcaactggaaggatatcaaatggattcaaacaatcacttctttgcctattttattaaagggtgtacttactcctgaagatacaatgatagccatacaagctggagctgctggaatcattgtttccaatcacggagctcgccaacttgactatgtccctgcaactattatggctttggaagaggtggttaaagctacacaaggaagaattccagtttttctggatggcggaattcgccgagggacagatgtttttaaagcactagctcttggagcagccggtgtattcattggtagacctgtggtgttctcattggcagctgatggtgaggctggtgtgagaaaagtacttcaaatgcttcgtgatgagtttgaattaactatggcactaagtggttgtcgttcactcaaggagataactcgtgaccatgttctcacagagtgggatcgtccaagattttctcccaagttataatatggcaggactccaccttcttctatattctaaaataggagggattttagaataacctttgttcttatttcatgctttagtagaaatcttatgagtgaggcgttagtcatccattagtaattgctacttctttattcactgtacaaaataagtttttacttgaactcatttcattgcacttggtgcgatttggtaaactctagaaacatgatagcctataaaatgtacttttttcttgac

SEQ ID NO: 51745 - protein, 370 aa, Glycine max
  peptide (1)..(370): Ceres Seq. ID no. 15171294
  misc_feature (16)..(359): Pfam Name: FMN-dependent dehydrogenase Pfam Description: FMN-dependent dehydrogenase
  misc_feature (6)..(362): Homolog of NCBI NO: 2554675 NR Description: Three-Dimensional Structure Of Glycolate Oxidase
  misc_feature (6)..(369): Homolog of NCBI NO: 228403 NR Description: glycolate oxidase
  misc_feature (6)..(364): Homolog of NCBI NO: 121530 NR Description: (S)-2-hydroxy-acid oxidase, peroxisomal
  misc_feature (6)..(370): Homolog of NCBI NO: 1773330 NR Description: glycolate oxidase [Mesembryanthemum crystallinum]
  misc_feature (6)..(364): Homolog of NCBI NO: 999542 NR Description: Chain A, Glycolate Oxidase (E.C.1.1.3.15) Mutant
  misc_feature (6)..(370): Homolog of NCBI NO: 27549566 NR Description: glycolate oxidase [Zantedeschia aethiopica]
  misc_feature (6)..(370): Homolog of NCBI NO: 15229497 NR Description: glycolate oxidase [Arabidopsis thaliana]
  misc_feature (6)..(370): Homolog of NCBI NO: 7431428 NR Description: (S)-2-hydroxy-acid oxidase (EC 1.1.3.15) -
  misc_feature (6)..(370): Homolog of NCBI NO: 16226772 NR Description: AT3g14420/MOA2_2 [Arabidopsis thaliana]
  misc_feature (6)..(370): Homolog of NCBI NO: 15231850 NR Description: glycolate oxidase -related [Arabidopsis thaliana]
MKKDMITNVTEYEAIAKEKLPKMVYDFYASGAEDQWTLKENRNAFSRILFQPRILIDVSKIDLTTTVMGFKISMPIMIAPTAMQKMAHPEGELATARAASAAGTIMTLSSTATSSVEEVASTGPGIRFFQLYVLKDRNVVAQVVRRAEKAGFKAITLTVDSPILGRREADIKNRFTLPPNLVLKNFEGLDLGKLNKTSDSFAASYAAELYDRSLNWKDIKWIQTITSLPILLKGVLTPEDTMIAIQAGAAGIIVSNHGARQLDYVPATIMALEEVVKATQGRIPVFLDGGIRRGTDVFKALALGAAGVFIGRPVVFSLAADGEAGVRKVLQMLRDEFELTMALSGCRSLKEITRDHVLTEWDRPRFSPKL

SEQ ID NO: 51746 - protein, 366 aa, Glycine max
  peptide (1)..(366): Ceres Seq. ID no. 15171295
  misc_feature (12)..(355): Pfam Name: FMN-dependent dehydrogenase Pfam Description: FMN-dependent dehydrogenase
  misc_feature (2)..(358): Homolog of NCBI NO: 2554675 NR Description: Three-Dimensional Structure Of Glycolate Oxidase
  misc_feature (2)..(365): Homolog of NCBI NO: 228403 NR Description: glycolate oxidase
  misc_feature (2)..(360): Homolog of NCBI NO: 121530 NR Description: (S)-2-hydroxy-acid oxidase, peroxisomal
  misc_feature (2)..(366): Homolog of NCBI NO: 1773330 NR Description: glycolate oxidase [Mesembryanthemum crystallinum]
  misc_feature (2)..(360): Homolog of NCBI NO: 999542 NR Description: Chain A, Glycolate Oxidase (E.C.1.1.3.15) Mutant
  misc_feature (2)..(366): Homolog of NCBI NO: 27549566 NR Description: glycolate oxidase [Zantedeschia aethiopica]
  misc_feature (2)..(366): Homolog of NCBI NO: 15229497 NR Description: glycolate oxidase [Arabidopsis thaliana]
  misc_feature (2)..(366): Homolog of NCBI NO: 7431428 NR Description: (S)-2-hydroxy-acid oxidase (EC 1.1.3.15) -
  misc_feature (2)..(366): Homolog of NCBI NO: 16226772 NR Description: AT3g14420/MOA2_2 [Arabidopsis thaliana]
  misc_feature (2)..(366): Homolog of NCBI NO: 15231850 NR Description: glycolate oxidase -related [Arabidopsis thaliana]
MITNVTEYEAIAKEKLPKMVYDFYASGAEDQWTLKENRNAFSRILFQPRILIDVSKIDLTTTVMGFKISMPIMIAPTAMQKMAHPEGELATARAASAAGTIMTLSSTATSSVEEVASTGPGIRFFQLYVLKDRNVVAQVVRRAEKAGFKAITLTVDSPILGRREADIKNRFTLPPNLVLKNFEGLDLGKLNKTSDSFAASYAAELYDRSLNWKDIKWIQTITSLPILLKGVLTPEDTMIAIQAGAAGIIVSNHGARQLDYVPATIMALEEVVKATQGRIPVFLDGGIRRGTDVFKALALGAAGVFIGRPVVFSLAADGEAGVRKVLQMLRDEFELTMALSGCRSLKEITRDHVLTEWDRPRFSPKL

SEQ ID NO: 51747 - protein, 348 aa, Glycine max
  peptide (1)..(348): Ceres Seq. ID no. 15171296
  misc_feature (1)..(337): Pfam Name: FMN-dependent dehydrogenase Pfam Description: FMN-dependent dehydrogenase
  misc_feature (1)..(340): Homolog of NCBI NO: 2554675 NR Description: Three-Dimensional Structure Of Glycolate Oxidase
  misc_feature (1)..(347): Homolog of NCBI NO: 228403 NR Description: glycolate oxidase
  misc_feature (1)..(342): Homolog of NCBI NO: 121530 NR Description: (S)-2-hydroxy-acid oxidase, peroxisomal
  misc_feature (1)..(348): Homolog of NCBI NO: 1773330 NR Description: glycolate oxidase [Mesembryanthemum crystallinum]
  misc_feature (1)..(342): Homolog of NCBI NO: 999542 NR Description: Chain A, Glycolate Oxidase (E.C.1.1.3.15) Mutant
  misc_feature (1)..(348): Homolog of NCBI NO: 27549566 NR Description: glycolate oxidase [Zantedeschia aethiopica]
  misc_feature (1)..(348): Homolog of NCBI NO: 15229497 NR Description: glycolate oxidase [Arabidopsis thaliana]
  misc_feature (1)..(348): Homolog of NCBI NO: 7431428 NR Description: (S)-2-hydroxy-acid oxidase (EC 1.1.3.15) -
  misc_feature (1)..(348): Homolog of NCBI NO: 16226772 NR Description: AT3g14420/MOA2_2 [Arabidopsis thaliana]
  misc_feature (1)..(348): Homolog of NCBI NO: 15231850 NR Description: glycolate oxidase -related [Arabidopsis thaliana]
MVYDFYASGAEDQWTLKENRNAFSRILFQPRILIDVSKIDLTTTVMGFKISMPIMIAPTAMQKMAHPEGELATARAASAAGTIMTLSSTATSSVEEVASTGPGIRFFQLYVLKDRNVVAQVVRRAEKAGFKAITLTVDSPILGRREADIKNRFTLPPNLVLKNFEGLDLGKLNKTSDSFAASYAAELYDRSLNWKDIKWIQTITSLPILLKGVLTPEDTMIAIQAGAAGIIVSNHGARQLDYVPATIMALEEVVKATQGRIPVFLDGGIRRGTDVFKALALGAAGVFIGRPVVFSLAADGEAGVRKVLQMLRDEFELTMALSGCRSLKEITRDHVLTEWDRPRFSPKL

SEQ ID NO: 51748 - DNA, 1394 bp, Glycine max
  misc_feature (1)..(1394): Ceres Seq. ID no. 15171329
atcctcgtccattcgatctctctctctgatatgcggtaaacaccagccctttgagtttcaaaaatcttttcttctaaaccactctaatcaccattttcaaatcaagaaatttagctagctttctttcaactctcttgggagcttgcttagggctttaggaggcttgggtggagcaactcatcacctctttttctcctctcttcgcatagttcaacttgagaaattcggcggtgggaactgatggtggctctgagcttccagggtgtgcgggcaagtcctgcccaaccccaacacccatcattgtgtagtggaagagccgctggagtcatcaggattcggtgtgggatagctgagccatctggtgaacctgctcctttaggacaaaagacgcggtactatgacggcatttttgagaaggccttcatgactctcttcgcacgtaagatggagaaattttcagatccaccagcaggaaaagctagagagaataagggttggtgggattggggttatgactatgagagtttcgtggatgtgtcaaggagggtaatgcagcgtaggtctcgtatccagcaacaacaagtggttcgagaggttctcctgtctatgcttcctccaggtgcgcctgcccagttccggaaattgtttccgccaacaaaatgggctgcagagtttaatgctgcattgacagtgcctttcttcgactggttagttgggccatctgaggttgtggaagtagagataaatggagtgaagcaaaaaagtggcgtgcatataaagaagtgcaggtacctggagaatagtggctgtgttggaatgtgtgtcaatatgtgcaagattcctacccaagattttttcactaatgaatttggacttccgttaacaatgactcctaattttgaagatatgagttgtgatatggtgtatggccaatccccacctacatttgaagaggaccctgtttcaaaacaaccttgctatgcggatatatgttctatggcaaaaccaagctctagtgtgtgtcctaaactacaggcatgagaaggcattccttttggatttaattttccattgcagaattagtgtttagtaagcttttttttttttttttttaaatcagcaaagataagtatatatatttaatatgtggtgggtacaaagggtatccaaatctatatacatgtctagtaagcttctaattcgacccgaggtgctcttcccgctctagcttcagaaaatttcatttttcatgtgtaataatattaataccagccttgctaggcttttacttctttcatagagtcattacattcacaaacgagagaacattgtctacaaatacttcatgtaaatttgtaattatagtgtcaaatatcggtattgccagattgtac

SEQ ID NO: 51749 - protein, 266 aa, Glycine max
  peptide (1)..(266): Ceres Seq. ID no. 15171330
  misc_feature (31)..(262): Homolog of NCBI NO: 22328234 NR Description: expressed protein [Arabidopsis thaliana]
  misc_feature (91)..(262): Homolog of NCBI NO: 22299485 NR Description: ORF_ID:tll1942~hypothetical protein
  misc_feature (92)..(255): Homolog of NCBI NO: 18379048 NR Description: expressed protein [Arabidopsis thaliana]
  misc_feature (33)..(266): Homolog of NCBI NO: 18408106 NR Description: expressed protein [Arabidopsis thaliana]
MVALSFQGVRASPAQPQHPSLCSGRAAGVIRIRCGIAEPSGEPAPLGQKTRYYDGIFEKAFMTLFARKMEKFSDPPAGKARENKGWWDWGYDYESFVDVSRRVMQRRSRIQQQQVVREVLLSMLPPGAPAQFRKLFPPTKWAAEFNAALTVPFFDWLVGPSEVVEVEINGVKQKSGVHIKKCRYLENSGCVGMCVNMCKIPTQDFFTNEFGLPLTMTPNFEDMSCDMVYGQSPPTFEEDPVSKQPCYADICSMAKPSSSVCPKLQA

SEQ ID NO: 51750 - protein, 205 aa, Glycine max
  peptide (1)..(205): Ceres Seq. ID no. 15171331
  misc_feature (1)..(201): Homolog of NCBI NO: 22328234 NR Description: expressed protein [Arabidopsis thaliana]
  misc_feature (30)..(201): Homolog of NCBI NO: 22299485 NR Description: ORF_ID:tll1942~hypothetical protein
  misc_feature (31)..(194): Homolog of NCBI NO: 18379048 NR Description: expressed protein [Arabidopsis thaliana]
  misc_feature (1)..(205): Homolog of NCBI NO: 18408106 NR Description: expressed protein [Arabidopsis thaliana]
MTLFARKMEKFSDPPAGKARENKGWWDWGYDYESFVDVSRRVMQRRSRIQQQQVVREVLLSMLPPGAPAQFRKLFPPTKWAAEFNAALTVPFFDWLVGPSEVVEVEINGVKQKSGVHIKKCRYLENSGCVGMCVNMCKIPTQDFFTNEFGLPLTMTPNFEDMSCDMVYGQSPPTFEEDPVSKQPCYADICSMAKPSSSVCPKLQA

SEQ ID NO: 51751 - protein, 198 aa, Glycine max
  peptide (1)..(198): Ceres Seq. ID no. 15171332
  misc_feature (1)..(194): Homolog of NCBI NO: 22328234 NR Description: expressed protein [Arabidopsis thaliana]
  misc_feature (23)..(194): Homolog of NCBI NO: 22299485 NR Description: ORF_ID:tll1942~hypothetical protein
  misc_feature (24)..(187): Homolog of NCBI NO: 18379048 NR Description: expressed protein [Arabidopsis thaliana]
  misc_feature (1)..(198): Homolog of NCBI NO: 18408106 NR Description: expressed protein [Arabidopsis thaliana]
MEKFSDPPAGKARENKGWWDWGYDYESFVDVSRRVMQRRSRIQQQQVVREVLLSMLPPGAPAQFRKLFPPTKWAAEFNAALTVPFFDWLVGPSEVVEVEINGVKQKSGVHIKKCRYLENSGCVGMCVNMCKIPTQDFFTNEFGLPLTMTPNFEDMSCDMVYGQSPPTFEEDPVSKQPCYADICSMAKPSSSVCPKLQA

SEQ ID NO: 51752 - DNA, 1232 bp, Glycine max
  misc_feature (1)..(1232): Ceres Seq. ID no. 15177100
cccgaggacagatctgggctctcccttccgacggcgacgcagatccgccgccgtcgatggccgccgccgcccccctccccgtcctcctcctcctcctcgccgccgccctcctcctcccggccgccgacgccatctactgcgatgaggacgactgctacgacctcctcggggtgaagcaggatgccaacgcgtcggagatcaagaaggcctactacaagctctccctcaaacaccacccggacaagaaccccgacccggagtcgcgcgcgctcttcgtcaaggtcgccaatgcctacgagatactgaaagatgaagaaactagggagaagtatgactatgctgttgcacatccagaggagttcttctacaacactgctcaatactacagggcttactacggatataaaacggatactcgttctgtgttgattggccttcttttaatcgtgtcagcattccaatacataaaccagttgacatcatatagtcaggccatcgaaagtgtgaagcaaactcctgcctacagaaataggttgaaagcattggagtttgagcgaacaggaggaatttcaagcaaaaagaagggtaacaagcagatggataaaaaggtggaagatgagcttagaagtgaagtcgacttgcaaattcagggagttcagaaaccttctgtgtggaatctctgcggtgtccaattgatacttctgccttacttaattggcaagctgcttatttggcaaatttgttggttttggagataccgggtaaagaaatcaccatatgcatgggaggatgcttgctatttgactcggacatcccttaggatgcctgctaacacatggcaaaatattgatgagtttacgaaggaggatctcgtcatgaagcgcctctgggagaaggccaacatggagaggcacatagcggaggcgagaagaggatcgaagcagcgcagaagatagcttctcttgtagcagctcaattttgactgaagattacgagatgaggctgtttaacagcatgtcatgtaggaggacaactacatacctgagtggaaagggaaggcatacatgagtcaggcctgggttcgtcgacccataaacatgggacattgatactgaagaaacataagatacaggggattcttttaccatatcgtacaccgtggaggagttatgtggtgatgataacatttcttacgtctatttggattctatagatacatctacttggatgct

SEQ ID NO: 51753 - protein, 317 aa, Glycine max
  peptide (1)..(317): Ceres Seq. ID no. 15177101
  misc_feature (50)..(114): Pfam Name: DnaJ domain Pfam Description: DnaJ domain
  misc_feature (19)..(316): Homolog of NCBI NO: 17538212 NR Description: DNaJ domain (prokaryotic heat shock protein)
  misc_feature (19)..(315): Homolog of NCBI NO: 39593758 NR Description: Hypothetical protein CBG06069 [Caenorhabditis
  misc_feature (42)..(315): Homolog of NCBI NO: 31219417 NR Description: ENSANGP00000010358 [Anopheles gambiae]
  misc_feature (17)..(315): Homolog of NCBI NO: 38078426 NR Description: RIKEN cDNA 2010203O07 [Mus musculus]
  misc_feature (17)..(315): Homolog of NCBI NO: 34868434 NR Description: similar to bA16L21.2.1 (novel DnaJ domain protein to Drosophila, C. elegans and Arabidopsis predicted proteins
  misc_feature (19)..(315): Homolog of NCBI NO: 12313893 NR Description: bA16L21.2.1 (novel DnaJ domain protein similar to
  misc_feature (25)..(315): Homolog of NCBI NO: 18859921 NR Description: CG7872-PA [Drosophila melanogaster]
  misc_feature (118)..(316): Homolog of NCBI NO: 19347731 NR Description: unknown protein [Arabidopsis thaliana]
  misc_feature (29)..(282): Homolog of NCBI NO: 25404348 NR Description: hypothetical protein T13M11.13 [imported] -
  misc_feature (29)..(316): Homolog of NCBI NO: 30696610 NR Description: DnaJ protein family [Arabidopsis thaliana]
RGQIWALPSDGDADPPPSMAAAAPLPVLLLLLAAALLLPAADAIYCDEDDCYDLLGVKQDANASEIKKAYYKLSLKHHPDKNPDPESRALFVKVANAYEILKDEETREKYDYAVAHPEEFFYNTAQYYRAYYGYKTDTRSVLIGLLLIVSAFQYINQLTSYSQAIESVKQTPAYRNRLKALEFERTGGISSKKKGNKQMDKKVEDELRSEVDLQIQGVQKPSVWNLCGVQLILLPYLIGKLLIWQICWFWRYRVKKSPYAWEDACYLTRTSLRMPANTWQNIDEFTKEDLVMKRLWEKANMERHIAEARRGSKQRRR

SEQ ID NO: 51754 - protein, 299 aa, Glycine max
  peptide (1)..(299): Ceres Seq. ID no. 15177102
  misc_feature (32)..(96): Pfam Name: DnaJ domain Pfam Description: DnaJ domain
  misc_feature (1)..(298): Homolog of NCBI NO: 17538212 NR Description: DNaJ domain (prokaryotic heat shock protein)
  misc_feature (1)..(297): Homolog of NCBI NO: 39593758 NR Description: Hypothetical protein CBG06069 [Caenorhabditis
  misc_feature (24)..(297): Homolog of NCBI NO: 31219417 NR Description: ENSANGP00000010358 [Anopheles gambiae]
  misc_feature (1)..(297): Homolog of NCBI NO: 38078426 NR Description: RIKEN cDNA 2010203O07 [Mus musculus]
  misc_feature (1)..(297): Homolog of NCBI NO: 34868434 NR Description: similar to bA16L21.2.1 (novel DnaJ domain protein to Drosophila, C. elegans and Arabidopsis predicted proteins
  misc_feature (1)..(297): Homolog of NCBI NO: 12313893 NR Description: bA16L21.2.1 (novel DnaJ domain protein similar to
  misc_feature (7)..(297): Homolog of NCBI NO: 18859921 NR Description: CG7872-PA [Drosophila melanogaster]
  misc_feature (100)..(298): Homolog of NCBI NO: 19347731 NR Description: unknown protein [Arabidopsis thaliana]
  misc_feature (11)..(264): Homolog of NCBI NO: 25404348 NR Description: hypothetical protein T13M11.13 [imported] -
  misc_feature (11)..(298): Homolog of NCBI NO: 30696610 NR Description: DnaJ protein family [Arabidopsis thaliana]
MAAAAPLPVLLLLLAAALLLPAADAIYCDEDDCYDLLGVKQDANASEIKKAYYKLSLKHHPDKNPDPESRALFVKVANAYEILKDEETREKYDYAVAHPEEFFYNTAQYYRAYYGYKTDTRSVLIGLLLIVSAFQYINQLTSYSQAIESVKQTPAYRNRLKALEFERTGGISSKKKGNKQMDKKVEDELRSEVDLQIQGVQKPSVWNLCGVQLILLPYLIGKLLIWQICWFWRYRVKKSPYAWEDACYLTRTSLRMPANTWQNIDEFTKEDLVMKRLWEKANMERHIAEARRGSKQRRR

SEQ ID NO: 51755 - DNA, 793 bp, Glycine max
  misc_feature (1)..(793): Ceres Seq. ID no. 15172968
agcatcagcaattcagcgtcaagtatcctcttccttcttctgcatcaactcatcttattagagtttttgactaatcaattatggcctatgagataactgagataaagaagattggcataggcctaattggtttcggcatatttttcgcatttcttggcataattcttttctttgaccgtggtttgcttgctctgggaaatattttttccttggcaggggtagccattttgcttggttggcgttccacgtgggcactcttcacatatagagcaaactttaagggttctgcatcatttctactaggtctctttttcatttgtgtgaggtggccaattgttggtataatacttgaaatatacagttgtgtttttctcttcagtggattttggtcatctatcaaagtgttcctctatcatatccctgttgttggatggattatacagtttatctctcctccttgattgtcacagaagggataactgatgccttagtatatggctaatcatgggtttcgattgtattggtaatttttccaatgacttgtgcatgaatgcaatgttaagctagtttttccaagagtttgcatcaggcagattagcttcctttagtgagaagtatcgcagcatgttatttatgtagaagagttggtacttggtagccatattttgttgctttaaatgtaaacaagaatacaagctggttatgctgttcagttgtctgatagcatgagggcttgctactgatgtcagactgaacatatattaaccttcggctttatgcgccttgtcattgt

SEQ ID NO: 51756 - protein, 126 aa, Glycine max
  peptide (1)..(126): Ceres Seq. ID no. 15172969
  misc_feature (29)..(122): Pfam Name: Got1-like family Pfam Description: Got1-like family
  misc_feature (4)..(117): Homolog of NCBI NO: 24642432 NR Description: CG32576-PA [Drosophila melanogaster]
  misc_feature (5)..(120): Homolog of NCBI NO: 7634779 NR Description: HDCMA39P [Homo sapiens]
  misc_feature (5)..(120): Homolog of NCBI NO: 7705636 NR Description: CGI-141 protein [Homo sapiens]
  misc_feature (5)..(120): Homolog of NCBI NO: 26384022 NR Description: unnamed protein product [Mus musculus]
  misc_feature (5)..(120): Homolog of NCBI NO: 13385354 NR Description: CGI-141 protein; EST AA407874 [Mus musculus]
  misc_feature (10)..(119): Homolog of NCBI NO: 33146513 NR Description: NFkB activating protein-like
  misc_feature (4)..(121): Homolog of NCBI NO: 30678779 NR Description: expressed protein [Arabidopsis thaliana]
  misc_feature (1)..(121): Homolog of NCBI NO: 15229139 NR Description: expressed protein [Arabidopsis thaliana]
  misc_feature (1)..(121): Homolog of NCBI NO: 12324443 NR Description: unknown protein; 50647-51606 [Arabidopsis
  misc_feature (1)..(122): Homolog of NCBI NO: 22329359 NR Description: expressed protein [Arabidopsis thaliana]
MAYEITEIKKIGIGLIGFGIFFAFLGIILFFDRGLLALGNIFSLAGVAILLGWRSTWALFTYRANFKGSASFLLGLFFICVRWPIVGIILEIYSCVFLFSGFWSSIKVFLYHIPVVGWIIQFISPP

SEQ ID NO: 51757 - DNA, 826 bp, Glycine max
  misc_feature (1)..(826): Ceres Seq. ID no. 15172961
atcctgtccgggagcacggagccgcttcgttatccgctggccgctgctgctgcttctctgcgagtgagcgagtgaggaaagaggacggcgacgatggccggcatggcggcgctgcagggcgccatgggggcgctctccgtctcggccgcgagcaccagcgcattctggggcaacccgctcgccgccaccttctccgccgcgccgtctggggtcagattcatggccaagacaagcccaattgaaatgaggcttaagcgatgggaacggaagaagtgtaagccaaacagtcttcctatgctgcacaagatgcatgttagggtcggcgacacggtgcaggtcatcgcaggccgtgagaaaggtaaagttggggaagtcgtacggctttataagcacaacagcactgtgatagtgaaggatctgaacttgaagtcaaagcacaagaaaggcactgaggatgaaccgggtgaaattgtcatgattgaaggccccattcatagctcgaacatgatgctctactcaaaggagaagaacgtgacgagtagggttgggcacaaaatcctcgaggatggcaccaaggtccgctacctgaagaagaccggtgaagtaatcgacagcgttgacaactgggtgaaggtgttcaaggaaggagattctgagtcatcatcgtagtatggaaatgctgcgcatgctctcaaccttagctgcgcttattgctgcccaaacgcttactcggctggtgccactgcttgtactgtcagtttttttctagcttcagagcctcttttgtaaattactactactactacaaagttgtcaccatttttgc

SEQ ID NO: 51758 - protein, 191 aa, Glycine max
  peptide (1)..(191): Ceres Seq. ID no. 15172962
  misc_feature (74)..(107): Pfam Name: KOW motif Pfam Description: KOW motif
  misc_feature (62)..(173): Homolog of NCBI NO: 23124117 NR Description: hypothetical protein [Nostoc punctiforme]
  misc_feature (58)..(173): Homolog of NCBI NO: 23042779 NR Description: hypothetical protein [Trichodesmium erythraeum
  misc_feature (62)..(173): Homolog of NCBI NO: 22297636 NR Description: 50S ribosomal protein L24 [Thermosynechococcus
  misc_feature (123)..(190): Homolog of NCBI NO: 30696487 NR Description: 50S ribosomal protein L24, chloroplast precursor
  misc_feature (1)..(104): Homolog of NCBI NO: 30696487 NR Description: 50S ribosomal protein L24, chloroplast precursor
  misc_feature (1)..(190): Homolog of NCBI NO: 132821 NR Description: 50S RIBOSOMAL PROTEIN L24, CHLOROPLAST PRECURSOR
  misc_feature (4)..(191): Homolog of NCBI NO: 400989 NR Description: 50S RIBOSOMAL PROTEIN L24, CHLOROPLAST PRECURSOR
  misc_feature (1)..(190): Homolog of NCBI NO: 1694974 NR Description: plastid ribosomal protein [Arabidopsis thaliana]
  misc_feature (1)..(190): Homolog of NCBI NO: 30696483 NR Description: 50S ribosomal protein L24, chloroplast precursor
  misc_feature (4)..(190): Homolog of NCBI NO: 132819 NR Description: 50S RIBOSOMAL PROTEIN L24, CHLOROPLAST PRECURSOR
MAGMAALQGAMGALSVSAASTSAFWGNPLAATFSAAPSGVRFMAKTSPIEMRLKRWERKKCKPNSLPMLHKMHVRVGDTVQVIAGREKGKVGEVVRLYKHNSTVIVKDLNLKSKHKKGTEDEPGEIVMIEGPIHSSNMMLYSKEKNVTSRVGHKILEDGTKVRYLKKTGEVIDSVDNWVKVFKEGDSESSS

SEQ ID NO: 51759 - protein, 188 aa, Glycine max
  peptide (1)..(188): Ceres Seq. ID no. 15172963
  misc_feature (71)..(104): Pfam Name: KOW motif Pfam Description: KOW motif
  misc_feature (59)..(170): Homolog of NCBI NO: 23124117 NR Description: hypothetical protein [Nostoc punctiforme]
  misc_feature (55)..(170): Homolog of NCBI NO: 23042779 NR Description: hypothetical protein [Trichodesmium erythraeum
  misc_feature (59)..(170): Homolog of NCBI NO: 22297636 NR Description: 50S ribosomal protein L24 [Thermosynechococcus
  misc_feature (120)..(187): Homolog of NCBI NO: 30696487 NR Description: 50S ribosomal protein L24, chloroplast precursor
  misc_feature (1)..(101): Homolog of NCBI NO: 30696487 NR Description: 50S ribosomal protein L24, chloroplast precursor
  misc_feature (1)..(187): Homolog of NCBI NO: 132821 NR Description: 50S RIBOSOMAL PROTEIN L24, CHLOROPLAST PRECURSOR
  misc_feature (1)..(188): Homolog of NCBI NO: 400989 NR Description: 50S RIBOSOMAL PROTEIN L24, CHLOROPLAST PRECURSOR
  misc_feature (1)..(187): Homolog of NCBI NO: 1694974 NR Description: plastid ribosomal protein [Arabidopsis thaliana]
  misc_feature (1)..(187): Homolog of NCBI NO: 30696483 NR Description: 50S ribosomal protein L24, chloroplast precursor
  misc_feature (1)..(187): Homolog of NCBI NO: 132819 NR Description: 50S RIBOSOMAL PROTEIN L24, CHLOROPLAST PRECURSOR
MAALQGAMGALSVSAASTSAFWGNPLAATFSAAPSGVRFMAKTSPIEMRLKRWERKKCKPNSLPMLHKMHVRVGDTVQVIAGREKGKVGEVVRLYKHNSTVIVKDLNLKSKHKKGTEDEPGEIVMIEGPIHSSNMMLYSKEKNVTSRVGHKILEDGTKVRYLKKTGEVIDSVDNWVKVFKEGDSESSS

SEQ ID NO: 51760 - protein, 181 aa, Glycine max
  peptide (1)..(181): Ceres Seq. ID no. 15172964
  misc_feature (64)..(97): Pfam Name: KOW motif Pfam Description: KOW motif
  misc_feature (52)..(163): Homolog of NCBI NO: 23124117 NR Description: hypothetical protein [Nostoc punctiforme]
  misc_feature (48)..(163): Homolog of NCBI NO: 23042779 NR Description: hypothetical protein [Trichodesmium erythraeum
  misc_feature (52)..(163): Homolog of NCBI NO: 22297636 NR Description: 50S ribosomal protein L24 [Thermosynechococcus
  misc_feature (113)..(180): Homolog of NCBI NO: 30696487 NR Description: 50S ribosomal protein L24, chloroplast precursor
  misc_feature (1)..(94): Homolog of NCBI NO: 30696487 NR Description: 50S ribosomal protein L24, chloroplast precursor
  misc_feature (1)..(180): Homolog of NCBI NO: 132821 NR Description: 50S RIBOSOMAL PROTEIN L24, CHLOROPLAST PRECURSOR
  misc_feature (1)..(181): Homolog of NCBI NO: 400989 NR Description: 50S RIBOSOMAL PROTEIN L24, CHLOROPLAST PRECURSOR
  misc_feature (1)..(180): Homolog of NCBI NO: 1694974 NR Description: plastid ribosomal protein [Arabidopsis thaliana]
  misc_feature (1)..(180): Homolog of NCBI NO: 30696483 NR Description: 50S ribosomal protein L24, chloroplast precursor
  misc_feature (1)..(180): Homolog of NCBI NO: 132819 NR Description: 50S RIBOSOMAL PROTEIN L24, CHLOROPLAST PRECURSOR
MGALSVSAASTSAFWGNPLAATFSAAPSGVRFMAKTSPIEMRLKRWERKKCKPNSLPMLHKMHVRVGDTVQVIAGREKGKVGEVVRLYKHNSTVIVKDLNLKSKHKKGTEDEPGEIVMIEGPIHSSNMMLYSKEKNVTSRVGHKILEDGTKVRYLKKTGEVIDSVDNWVKVFKEGDSESSS

SEQ ID NO: 51761 - DNA, 787 bp, Glycine max
  misc_feature (1)..(787): Ceres Seq. ID no. 13594794
agacacacgtctatagcacgattcataagtagaaagatatggtttcagagactgaatcaccaccgttgattggacctcgtatctctttctctgacggtggagatttcatctgcacagagctggagaaagaaatcgtcaaagggtcagtgaaagtctccgactttgagttcttgtcggagaatgcgagtccagagaggatgcacaccgccgacgaactcttctctgaaggaaagttgcttcctttatggcaagaaaagcactcagagaagcttaaaaacgttaacttgaagaccaacgaagaagaagagagtcgtaaagtggaagcagcgatgacgagtgacgatagtagtaagaacagagtgtgttggtttatagacgaagacccatctccacgtcctccgaaatgcacagttctttggaaagagcttttgcgtttgaagaaacagaggagctcttcgtcggtgaagtcctctctgtctccgtcatcgtccacgtcatcatctagctcgcttgaggataagagagaagggaagagaggtaagaaaggattagagaggacgagatcgtcgacgagtgtgaggataaggccgatgattcacgtccctgtttgcactcctccttctaaatcctctgtttcattgcctcctctgtttccgtcgcttaggcttaagaagaacagagcagagaaaagcaagctttaatctttttatttgacacagcttatttggttgattagttcggtttctcatgtgatatgtaactctaatgcatgtgattaagcattttt

SEQ ID NO: 51762 - protein, 220 aa, Glycine max
  peptide (1)..(220): Ceres Seq. ID no. 13594795
  misc_feature (39)..(200): Homolog of NCBI NO: 15222823 NR Description: expressed protein [Arabidopsis thaliana]
  misc_feature (39)..(198): Homolog of NCBI NO: 27311593 NR Description: unknown protein [Arabidopsis thaliana]
  misc_feature (39)..(198): Homolog of NCBI NO: 15230654 NR Description: expressed protein [Arabidopsis thaliana]
  misc_feature (29)..(217): Homolog of NCBI NO: 30687257 NR Description: expressed protein [Arabidopsis thaliana]
  misc_feature (1)..(217): Homolog of NCBI NO: 18397426 NR Description: expressed protein [Arabidopsis thaliana]
MVSETESPPLIGPRISFSDGGDFICTELEKEIVKGSVKVSDFEFLSENASPERMHTADELFSEGKLLPLWQEKHSEKLKNVNLKTNEEEESRKVEAAMTSDDSSKNRVCWFIDEDPSPRPPKCTVLWKELLRLKKQRSSSSVKSSLSPSSSTSSSSSLEDKREGKRGKKGLERTRSSTSVRIRPMIHVPVCTPPSKSSVSLPPLFPSLRLKKNRAEKSKL

SEQ ID NO: 51763 - protein, 167 aa, Glycine max
  peptide (1)..(167): Ceres Seq. ID no. 13594796
  misc_feature (1)..(147): Homolog of NCBI NO: 15222823 NR Description: expressed protein [Arabidopsis thaliana]
  misc_feature (1)..(145): Homolog of NCBI NO: 27311593 NR Description: unknown protein [Arabidopsis thaliana]
  misc_feature (1)..(145): Homolog of NCBI NO: 15230654 NR Description: expressed protein [Arabidopsis thaliana]
  misc_feature (1)..(164): Homolog of NCBI NO: 30687257 NR Description: expressed protein [Arabidopsis thaliana]
  misc_feature (1)..(164): Homolog of NCBI NO: 18397426 NR Description: expressed protein [Arabidopsis thaliana]
MHTADELFSEGKLLPLWQEKHSEKLKNVNLKTNEEEESRKVEAAMTSDDSSKNRVCWFIDEDPSPRPPKCTVLWKELLRLKKQRSSSSVKSSLSPSSSTSSSSSLEDKREGKRGKKGLERTRSSTSVRIRPMIHVPVCTPPSKSSVSLPPLFPSLRLKKNRAEKSKL

SEQ ID NO: 51764 - protein, 123 aa, Glycine max
  peptide (1)..(123): Ceres Seq. ID no. 13594797
  misc_feature (1)..(103): Homolog of NCBI NO: 15222823 NR Description: expressed protein [Arabidopsis thaliana]
  misc_feature (1)..(101): Homolog of NCBI NO: 27311593 NR Description: unknown protein [Arabidopsis thaliana]
  misc_feature (1)..(101): Homolog of NCBI NO: 15230654 NR Description: expressed protein [Arabidopsis thaliana]
  misc_feature (1)..(120): Homolog of NCBI NO: 30687257 NR Description: expressed protein [Arabidopsis thaliana]
  misc_feature (1)..(120): Homolog of NCBI NO: 18397426 NR Description: expressed protein [Arabidopsis thaliana]
MTSDDSSKNRVCWFIDEDPSPRPPKCTVLWKELLRLKKQRSSSSVKSSLSPSSSTSSSSSLEDKREGKRGKKGLERTRSSTSVRIRPMIHVPVCTPPSKSSVSLPPLFPSLRLKKNRAEKSKL

SEQ ID NO: 51765 - DNA, 1157 bp, Glycine max
  misc_feature (1)..(1157): Ceres Seq. ID no. 15177850
agcacagcaccaccacccgccacctcaacgcacgcaaaggccgaggaggacaagctaggaggagcgagcagccatggcttcgtcggtggccgccgcggcgagcgcgttcctcgggacccggctggcggacccggcgccgcagaacgggcgcatcgtggcgcggttcggcttcggcaagaagaaggccccgccgaagaaggccaaggcgcccccgaccaccgaccggccgctgtggttccccggcgcgcaggcgcccgagtacctcgacgggacgctcgtcggcgactacggcttcgaccccttcggccttgggaagcccgcggagtacctgcagtacgacgtggactccctggaccagaacctggcccagaacctggcgggcgagatcatcggcacccggttcgaggacgccgacgtcaagtccaccccgttccagccctacgccgaggtgttcggcctccagaggttccgcgagtgcgagctcatccacggtcgctgggccatgctcgccaccctcggcgccctcaccgtcgagtggctcaccggcgtcacctggcaggacgccggcaaggtggagctggtggacgggtcgtcgtacctggggcagccgctgccgttcacgctcaccacgctgatctggatcgaggtgctggtgatcgggtacatcgagttccagcgcaacgcggagctggacccggagaggaggctctaccccggtggctcctacttcgacccgctggggctcgcggcggacccggagaagaaggagactctgcagctggcggagatcaagcacgcccgcctcgccatggtcgccttcctcggcttcgccgtgcaggccgccgccaccggcaaggggcctctcaacaactgggccacccacctcagcgacccgctgcacaccaccatcttcgacaccttgggttcctcttaagtggtcggtggtcgagcaatttctgtcagctcagcagcaaaatggacgaacgcgcgtccgtgtaacgaacgtgctttggttttgtatgacgagtgatggatgagagggtatcgcacagatcctttgttgattaatgcaggtctgatcacataggagagctgctgggacttggtgatttgtaaaatatgaaccaatggtaacttaatgcatccacttgtacatc

SEQ ID NO: 51766 - protein, 332 aa, Glycine max
  peptide (1)..(332): Ceres Seq. ID no. 15177851
STAPPPATSTHAKAEEDKLGGASSHGFVGGRRGERVPRDPAGGPGAAERAHRGAVRLRQEEGPAEEGQGAPDHRPAAVVPRRAGARVPRRDARRRLRLRPLRPWEARGVPAVRRGLPGPEPGPEPGGRDHRHPVRGRRRQVHPVPALRRGVRPPEVPRVRAHPRSLGHARHPRRPHRRVAHRRHLAGRRQGGAGGRVVVPGAAAAVHAHHADLDRGAGDRVHRVPAQRGAGPGEEALPRWLLLRPAGARGGPGEEGDSAAGGDQARPPRHGRLPRLRRAGRRHRQGASQQLGHPPQRPAAHHHLRHLGFLLSGRWSSNFCQLSSKMDERASV

SEQ ID NO: 51767 - protein, 286 aa, Glycine max
  peptide (1)..(286): Ceres Seq. ID no. 15177852
  misc_feature (60)..(257): Pfam Name: Chlorophyll A-B binding protein Pfam Description: Chlorophyll A-B binding protein
  misc_feature (1)..(269): Homolog of NCBI NO: 15225630 NR Description: light-harvesting chlorophyll a/b binding protein
  misc_feature (1)..(286): Homolog of NCBI NO: 15081739 NR Description: AT5g01530/F7A7_50 [Arabidopsis thaliana]
  misc_feature (2)..(286): Homolog of NCBI NO: 15231990 NR Description: chlorophyll a/b-binding protein -related
  misc_feature (1)..(286): Homolog of NCBI NO: 13877547 NR Description: chlorophyll a/b-binding protein CP29 [Arabidopsis
  misc_feature (1)..(286): Homolog of NCBI NO: 20260162 NR Description: chlorophyll a/b-binding protein CP29 [Arabidopsis
  misc_feature (1)..(286): Homolog of NCBI NO: 15241005 NR Description: light-harvesting chlorophyll a/b binding protein
  misc_feature (1)..(286): Homolog of NCBI NO: 4689382 NR Description: chlorophyll a/b binding protein CP29 [Vigna
  misc_feature (1)..(286): Homolog of NCBI NO: 7443231 NR Description: chlorophyll a/b-binding protein CP29 precursor -
  misc_feature (1)..(286): Homolog of NCBI NO: 7443230 NR Description: probable chlorophyll a/b-binding protein - rice
  misc_feature (1)..(286): Homolog of NCBI NO: 445116 NR Description: light-harvesting complex IIa protein;
MASSVAAAASAFLGTRLADPAPQNGRIVARFGFGKKKAPPKKAKAPPTTDRPLWFPGAQAPEYLDGTLVGDYGFDPFGLGKPAEYLQYDVDSLDQNLAQNLAGEIIGTRFEDADVKSTPFQPYAEVFGLQRFRECELIHGRWAMLATLGALTVEWLTGVTWQDAGKVELVDGSSYLGQPLPFTLTTLIWIEVLVIGYIEFQRNAELDPERRLYPGGSYFDPLGLAADPEKKETLQLAEIKHARLAMVAFLGFAVQAAATGKGPLNNWATHLSDPLHTTIFDTLGSS

SEQ ID NO: 51768 - protein, 210 aa, Glycine max
  peptide (1)..(210): Ceres Seq. ID no. 15177853
  misc_feature (55)..(210): Pfam Name: Equine herpesvirus glycoprotein gp2 Pfam Description: Equine herpesvirus glycoprotein gp2
  misc_feature (20)..(210): Homolog of NCBI NO: 30424862 NR Description: RIKEN cDNA 5033413A03 [Mus musculus]
  misc_feature (10)..(210): Homolog of NCBI NO: 30424862 NR Description: RIKEN cDNA 5033413A03 [Mus musculus]
  misc_feature (1)..(210): Homolog of NCBI NO: 30424862 NR Description: RIKEN cDNA 5033413A03 [Mus musculus]
HSTTTRHLNARKGRGGQARRSEQPWLRRWPPRRARSSGPGWRTRRRRTGASWRGSASARRRPRRRRPRRPRPPTGRCGSPARRRPSTSTGRSSATTASTPSALGSPRSTCSTTWTPWTRTWPRTWRARSSAPGSRTPTSSPPRSSPTPRCSASRGSASASSSTVAGPCSPPSAPSPSSGSPASPGRTPARWSWWTGRRTWGSRCRSRSPR

SEQ ID NO: 51769 - DNA, 713 bp, Glycine max
  misc_feature (1)..(713): Ceres Seq. ID no. 12609671
ttcaaagcaaacgcacaagcaagctcagtaagcacgccatgggaatgaagcgatgcgtcgttcctagcatcctgctgatgcttgcactgcaggcagccctcctcgtcgccggcgacgtggatgccattctcctgccgagccaaggccaagacgaagcagccatggcggccaagaagaggccgtggaagtgctgcgaccaggcggtgtgcaccaggtccatcccgccgatctgccgctgcatggaccaggtcttcgagtgcccctccacctgcaaggcctgcgggccgtccgtgggcgacccgtcccgccgcgtctgccaagaccagtacgtcggcgaccccgggcccatctgcaggccctgggactgctgcgacctgcccctgtgcaccaggtccaacccgccgacgtgccaatgcatggacgaggtcgacaagtgtgctccgacctgcaagacctgcctgccgtccaggtcgcgcccttctctccgcgtctgcatcgaccgctactttggacccttcccgcccgcgtgcacgccgtcagaggctgttgccgccggcggtaactagcacgctcacgcgttgatcacccgatcaacgccgtcgagtgtcctctcccgccctgctgcagcagcagtgtctaagaataaaatagaaatggatggcctatatgtgtggtggacacacaattatgaataagacaacgtggcaatgttc

SEQ ID NO: 51770 - protein, 187 aa, Glycine max
  peptide (1)..(187): Ceres Seq. ID no. 12609672
  misc_feature (63)..(87): Pfam Name: Bowman-Birk serine protease inhibitor family Pfam Description: Bowman-Birk serine protease inhibitor family
  misc_feature (24)..(179): Homolog of NCBI NO: 7635919 NR Description: putative Bowman Birk trypsin inhibitor
  misc_feature (58)..(178): Homolog of NCBI NO: 34895440 NR Description: Bowman Birk trypsin inhibitor
  misc_feature (58)..(178): Homolog of NCBI NO: 476550 NR Description: trypsin inhibitor (Bowman-Birk) - rice
  misc_feature (58)..(178): Homolog of NCBI NO: 7619801 NR Description: Bowman Birk trypsin inhibitor
  misc_feature (58)..(178): Homolog of NCBI NO: 34895436 NR Description: putative Bowman Birk trypsin inhibitor
  misc_feature (55)..(110): Homolog of NCBI NO: 124024 NR Description: BOWMAN-BIRK TYPE PROTEINASE INHIBITOR I-2B
  misc_feature (25)..(180): Homolog of NCBI NO: 34895446 NR Description: putative Bowman Birk tryspin inhibitor
  misc_feature (25)..(180): Homolog of NCBI NO: 7635923 NR Description: putative Bowman Birk tryspin inhibitor
  misc_feature (58)..(177): Homolog of NCBI NO: 6730112 NR Description: Chain A, Crystal Structure Of Barley Bbi
  misc_feature (55)..(178): Homolog of NCBI NO: 124037 NR Description: BOWMAN-BIRK TYPE TRYPSIN INHIBITOR
QSKRTSKLSKHAMGMKRCVVPSILLMLALQAALLVAGDVDAILLPSQGQDEAAMAAKKRPWKCCDQAVCTRSIPPICRCMDQVFECPSTCKACGPSVGDPSRRVCQDQYVGDPGPICRPWDCCDLPLCTRSNPPTCQCMDEVDKCAPTCKTCLPSRSRPSLRVCIDRYFGPFPPACTPSEAVAAGGN

SEQ ID NO: 51771 - protein, 175 aa, Glycine max
  peptide (1)..(175): Ceres Seq. ID no. 12609673
  misc_feature (51)..(75): Pfam Name: Bowman-Birk serine protease inhibitor family Pfam Description: Bowman-Birk serine protease inhibitor family
  misc_feature (12)..(167): Homolog of NCBI NO: 7635919 NR Description: putative Bowman Birk trypsin inhibitor
  misc_feature (46)..(166): Homolog of NCBI NO: 34895440 NR Description: Bowman Birk trypsin inhibitor
  misc_feature (46)..(166): Homolog of NCBI NO: 476550 NR Description: trypsin inhibitor (Bowman-Birk) - rice
  misc_feature (46)..(166): Homolog of NCBI NO: 7619801 NR Description: Bowman Birk trypsin inhibitor
  misc_feature (46)..(166): Homolog of NCBI NO: 34895436 NR Description: putative Bowman Birk trypsin inhibitor
  misc_feature (43)..(98): Homolog of NCBI NO: 124024 NR Description: BOWMAN-BIRK TYPE PROTEINASE INHIBITOR I-2B
  misc_feature (13)..(168): Homolog of NCBI NO: 34895446 NR Description: putative Bowman Birk tryspin inhibitor
  misc_feature (13)..(168): Homolog of NCBI NO: 7635923 NR Description: putative Bowman Birk tryspin inhibitor
  misc_feature (46)..(165): Homolog of NCBI NO: 6730112 NR Description: Chain A, Crystal Structure Of Barley Bbi
  misc_feature (43)..(166): Homolog of NCBI NO: 124037 NR Description: BOWMAN-BIRK TYPE TRYPSIN INHIBITOR
MGMKRCVVPSILLMLALQAALLVAGDVDAILLPSQGQDEAAMAAKKRPWKCCDQAVCTRSIPPICRCMDQVFECPSTCKACGPSVGDPSRRVCQDQYVGDPGPICRPWDCCDLPLCTRSNPPTCQCMDEVDKCAPTCKTCLPSRSRPSLRVCIDRYFGPFPPACTPSEAVAAGGN

SEQ ID NO: 51772 - protein, 173 aa, Glycine max
  peptide (1)..(173): Ceres Seq. ID no. 12609674
  misc_feature (49)..(73): Pfam Name: Bowman-Birk serine protease inhibitor family Pfam Description: Bowman-Birk serine protease inhibitor family
  misc_feature (10)..(165): Homolog of NCBI NO: 7635919 NR Description: putative Bowman Birk trypsin inhibitor
  misc_feature (44)..(164): Homolog of NCBI NO: 34895440 NR Description: Bowman Birk trypsin inhibitor
  misc_feature (44)..(164): Homolog of NCBI NO: 476550 NR Description: trypsin inhibitor (Bowman-Birk) - rice
  misc_feature (44)..(164): Homolog of NCBI NO: 7619801 NR Description: Bowman Birk trypsin inhibitor
  misc_feature (44)..(164): Homolog of NCBI NO: 34895436 NR Description: putative Bowman Birk trypsin inhibitor
  misc_feature (41)..(96): Homolog of NCBI NO: 124024 NR Description: BOWMAN-BIRK TYPE PROTEINASE INHIBITOR I-2B
  misc_feature (11)..(166): Homolog of NCBI NO: 34895446 NR Description: putative Bowman Birk tryspin inhibitor
  misc_feature (11)..(166): Homolog of NCBI NO: 7635923 NR Description: putative Bowman Birk tryspin inhibitor
  misc_feature (44)..(163): Homolog of NCBI NO: 6730112 NR Description: Chain A, Crystal Structure Of Barley Bbi
  misc_feature (41)..(164): Homolog of NCBI NO: 124037 NR Description: BOWMAN-BIRK TYPE TRYPSIN INHIBITOR
MKRCVVPSILLMLALQAALLVAGDVDAILLPSQGQDEAAMAAKKRPWKCCDQAVCTRSIPPICRCMDQVFECPSTCKACGPSVGDPSRRVCQDQYVGDPGPICRPWDCCDLPLCTRSNPPTCQCMDEVDKCAPTCKTCLPSRSRPSLRVCIDRYFGPFPPACTPSEAVAAGGN

SEQ ID NO: 51773 - DNA, 769 bp, Glycine max
  misc_feature (1)..(769): Ceres Seq. ID no. 13638769
accacaccaccaccagacagagagaacacacgcaaggagcacgaggaggaggcaagggaagccgccgccgccgccgccccgtccctcctcgccggccggccgccacaggtttcaagatgtcaacctgcacgtttgcagcttcctgtgccctcttgggcaatgctcgaacaaccgatgccccccagaaagcggtcaagagccgcctgagcttcctcggccgaggcgcgccgcagctgcggagcctgaggtcctccttcccctccaagaagctggacgtctccgcggcggccacgtacaaggtgaagctggtgaccccggaaggggacgagcacgagtttgaggcgccggacgacgcctacatcctggactcggcggagacggcgggggtggagctgccctactcgtgccgggcgggggcgtgctcgacctgcgcgggcaagatcgaggctggcgcggtggaccagtcggacgggtcgttcctggacgacgcgcagcaggaggagggctacgtgctgacatgcgtggcctaccccaagtcggactgcgtcatccacacccacaaggagggcgacctgtattaggagggctctcatctctggtgcccccagttggttgtgtgttgagtagaacaaaccttggtggttgtttatcccgtgcctgcctgtgtgcgtgctttggtcgttattagtcggaggtggttaagattgttgggtgaagaggccacccatggagaaggcgaataaaatctggctgtgactgatggcatcat

SEQ ID NO: 51774 - protein, 192 aa, Glycine max
  peptide (1)..(192): Ceres Seq. ID no. 13638770
  misc_feature (103)..(179): Pfam Name: 2Fe-2S iron-sulfur cluster binding domain Pfam Description: 2Fe-2S iron-sulfur cluster binding domain
  misc_feature (95)..(192): Homolog of NCBI NO: 15225888 NR Description: ferredoxin, putative [Arabidopsis thaliana]
  misc_feature (95)..(192): Homolog of NCBI NO: 119934 NR Description: Ferredoxin, root R-B1
  misc_feature (39)..(191): Homolog of NCBI NO: 2129915 NR Description: ferredoxin
  misc_feature (39)..(192): Homolog of NCBI NO: 7430754 NR Description: ferredoxin [2Fe-2S], root - rice
  misc_feature (98)..(192): Homolog of NCBI NO: 6688560 NR Description: putative ferredoxin [Lycopersicon esculentum]
  misc_feature (39)..(192): Homolog of NCBI NO: 19569591 NR Description: ferredoxin precursor [Triticum aestivum]
  misc_feature (39)..(192): Homolog of NCBI NO: 13182955 NR Description: ferredoxin [Impatiens balsamina]
  misc_feature (55)..(192): Homolog of NCBI NO: 3023750 NR Description: Ferredoxin VI, chloroplast precursor (Fd VI)
  misc_feature (39)..(192): Homolog of NCBI NO: 119958 NR Description: Ferredoxin III, chloroplast precursor (Fd III)
  misc_feature (39)..(192): Homolog of NCBI NO: 40714664 NR Description: putative ferredoxin [Oryza sativa (japonica
HTTTRQREHTQGARGGGKGSRRRRRPVPPRRPAATGFKMSTCTFAASCALLGNARTTDAPQKAVKSRLSFLGRGAPQLRSLRSSFPSKKLDVSAAATYKVKLVTPEGDEHEFEAPDDAYILDSAETAGVELPYSCRAGACSTCAGKIEAGAVDQSDGSFLDDAQQEEGYVLTCVAYPKSDCVIHTHKEGDLY

SEQ ID NO: 51775 - protein, 154 aa, Glycine max
  peptide (1)..(154): Ceres Seq. ID no. 13638771
  misc_feature (65)..(141): Pfam Name: 2Fe-2S iron-sulfur cluster binding domain Pfam Description: 2Fe-2S iron-sulfur cluster binding domain
  misc_feature (57)..(154): Homolog of NCBI NO: 15225888 NR Description: ferredoxin, putative [Arabidopsis thaliana]
  misc_feature (57)..(154): Homolog of NCBI NO: 119934 NR Description: Ferredoxin, root R-B1
  misc_feature (1)..(153): Homolog of NCBI NO: 2129915 NR Description: ferredoxin
  misc_feature (1)..(154): Homolog of NCBI NO: 7430754 NR Description: ferredoxin [2Fe-2S], root - rice
  misc_feature (60)..(154): Homolog of NCBI NO: 6688560 NR Description: putative ferredoxin [Lycopersicon esculentum]
  misc_feature (1)..(154): Homolog of NCBI NO: 19569591 NR Description: ferredoxin precursor [Triticum aestivum]
  misc_feature (1)..(154): Homolog of NCBI NO: 13182955 NR Description: ferredoxin [Impatiens balsamina]
  misc_feature (17)..(154): Homolog of NCBI NO: 3023750 NR Description: Ferredoxin VI, chloroplast precursor (Fd VI)
  misc_feature (1)..(154): Homolog of NCBI NO: 119958 NR Description: Ferredoxin III, chloroplast precursor (Fd III)
  misc_feature (1)..(154): Homolog of NCBI NO: 40714664 NR Description: putative ferredoxin [Oryza sativa (japonica
MSTCTFAASCALLGNARTTDAPQKAVKSRLSFLGRGAPQLRSLRSSFPSKKLDVSAAATYKVKLVTPEGDEHEFEAPDDAYILDSAETAGVELPYSCRAGACSTCAGKIEAGAVDQSDGSFLDDAQQEEGYVLTCVAYPKSDCVIHTHKEGDLY

SEQ ID NO: 51776 - protein, 112 aa, Glycine max
  peptide (1)..(112): Ceres Seq. ID no. 13638772
PHHHQTERTHARSTRRRQGKPPPPPPRPSSPAGRHRFQDVNLHVCSFLCPLGQCSNNRCPPESGQEPPELPRPRRAAAAEPEVLLPLQEAGRLRGGHVQGEAGDPGRGRARV

SEQ ID NO: 51777 - DNA, 845 bp, Glycine max
  misc_feature (1)..(845): Ceres Seq. ID no. 15172948
gtttcgatttatagacctttgccttttgcattttacacaccaacaacgcgcttcactctagtttctcccttttcgattccaaaagatgagtgaagagcagcagcgacctgcgcctcgtctgaacgagaggatcctctcttccttgtccagacgttccgttgctgctcatccttggcatgatcttgagattggacctggagctccccagattttcaatgttgtcgttgagattacaaagggaagcaaagtcaaatatgaacttgacaaaaagactggactcatcaaggttgatcgtattctctactcatcagttgtttacccacacaactatggtttcgttcctcgcacattgtgtgaagacaatgaccctattgatgttttagtcatcatgcaggaacctgtgcttcctggttgttttctacgtgctcgtgctattggattaatgcctatgattgaccagggtgagaaagatgacaagatcatagcagtctgtgttgatgatcctgagtacaagcattacactgacatcaaagaacttcctcctcaccgtctctctgagatccgtcgtttctttgaagactacaagaagaacgagaacaaggaagttgcggttaatgattttctgccatctgagaatgctattgaagctatccagtactctatggacctctatgcggagtacattctccataccctgagacgttgaagcttcttctcctcagaacatctcttgcaacatcttggtttctgtttacctttttatctttaattgatacttcctctgcattttcttgtaagactttggatctttcatttgtccttgtcaactcattacgattgaatct

SEQ ID NO: 51778 - protein, 206 aa, Glycine max
  peptide (1)..(206): Ceres Seq. ID no. 15172949
  misc_feature (44)..(198): Pfam Name: Inorganic pyrophosphatase Pfam Description: Inorganic pyrophosphatase
  misc_feature (5)..(206): Homolog of NCBI NO: 38345829 NR Description: OSJNBa0070M12.12 [Oryza sativa (japonica
  misc_feature (2)..(206): Homolog of NCBI NO: 4033424 NR Description: Soluble inorganic pyrophosphatase (Pyrophosphate
  misc_feature (6)..(206): Homolog of NCBI NO: 2500047 NR Description: Soluble inorganic pyrophosphatase (Pyrophosphate
  misc_feature (2)..(206): Homolog of NCBI NO: 26451240 NR Description: putative inorganic pyrophosphatase [Arabidopsis
  misc_feature (2)..(206): Homolog of NCBI NO: 15226453 NR Description: inorganic pyrophosphatase -related [Arabidopsis
  misc_feature (1)..(206): Homolog of NCBI NO: 15234191 NR Description: inorganic phosphatase -related [Arabidopsis
  misc_feature (1)..(206): Homolog of NCBI NO: 5669924 NR Description: soluble inorganic pyrophosphatase
  misc_feature (167)..(206): Homolog of NCBI NO: 25290346 NR Description: protein T25K16.5 [imported] - Arabidopsis
  misc_feature (1)..(165): Homolog of NCBI NO: 25290346 NR Description: protein T25K16.5 [imported] - Arabidopsis
  misc_feature (1)..(206): Homolog of NCBI NO: 15223288 NR Description: soluble inorganic pyrophosphatase -related
MSEEQQRPAPRLNERILSSLSRRSVAAHPWHDLEIGPGAPQIFNVVVEITKGSKVKYELDKKTGLIKVDRILYSSVVYPHNYGFVPRTLCEDNDPIDVLVIMQEPVLPGCFLRARAIGLMPMIDQGEKDDKIIAVCVDDPEYKHYTDIKELPPHRLSEIRRFFEDYKKNENKEVAVNDFLPSENAIEAIQYSMDLYAEYILHTLRR

SEQ ID NO: 51779 - protein, 105 aa, Glycine max
  peptide (1)..(105): Ceres Seq. ID no. 15172950
  misc_feature (1)..(97): Pfam Name: Inorganic pyrophosphatase Pfam Description: Inorganic pyrophosphatase
  misc_feature (1)..(105): Homolog of NCBI NO: 38345829 NR Description: OSJNBa0070M12.12 [Oryza sativa (japonica
  misc_feature (1)..(105): Homolog of NCBI NO: 4033424 NR Description: Soluble inorganic pyrophosphatase (Pyrophosphate
  misc_feature (1)..(105): Homolog of NCBI NO: 2500047 NR Description: Soluble inorganic pyrophosphatase (Pyrophosphate
  misc_feature (1)..(105): Homolog of NCBI NO: 26451240 NR Description: putative inorganic pyrophosphatase [Arabidopsis
  misc_feature (1)..(105): Homolog of NCBI NO: 15226453 NR Description: inorganic pyrophosphatase -related [Arabidopsis
  misc_feature (1)..(105): Homolog of NCBI NO: 15234191 NR Description: inorganic phosphatase -related [Arabidopsis
  misc_feature (1)..(105): Homolog of NCBI NO: 5669924 NR Description: soluble inorganic pyrophosphatase
  misc_feature (66)..(105): Homolog of NCBI NO: 25290346 NR Description: protein T25K16.5 [imported] - Arabidopsis
  misc_feature (1)..(64): Homolog of NCBI NO: 25290346 NR Description: protein T25K16.5 [imported] - Arabidopsis
  misc_feature (1)..(105): Homolog of NCBI NO: 15223288 NR Description: soluble inorganic pyrophosphatase -related
MQEPVLPGCFLRARAIGLMPMIDQGEKDDKIIAVCVDDPEYKHYTDIKELPPHRLSEIRRFFEDYKKNENKEVAVNDFLPSENAIEAIQYSMDLYAEYILHTLRR

SEQ ID NO: 51780 - DNA, 888 bp, Glycine max
  misc_feature (1)..(888): Ceres Seq. ID no. 12609339
acatctagtagtggaggaagaggagaaaggggtagcaggcagcaatggcgacggccaagcccatcctgtacggcgcctggatcagctcttgctctcaccgtgtccggatcgctctcactctcaaaggtgtggactatgagtacaaggcagtcaatcctcggacagatccagactatgaaaaaataaacccgatcaaatacataccagcattggtagatggggactttgttctatctgattctctcgctatcatgttgtatctggaagataagtatcctcagcatcctctcgtacctaaagatatcaaaacgaaaggtcttgatcttcagattgcgaacatagtttgctcaagcatccaacctctccaaggctacggcgtaattggtttgcatgagggtaggttgagccccgatgagagccttgaggtggttcaacgttatattgacaagggcttcaaagcaatagaaaagctcttggatggatgtgacagcaaatattgcgtcggagatgaagtccatttgggagatgtgtgtctagccccacagatccatgccgccatcaatcgcttccagattgatttgacgaagtacccaaccttgtcgcgacttcacgatgcctacatggaaattccggcatttcaagccgcactgccccagaatcagccagatgcaccttcagcaaaataatcaagaaatcaagccagttacaactatacgcgtgtaatttccacaataatgaggaatgtagtctgcaatgcatggaagaacctctcataagtcataacttgtcagtttgtctgcgtgtacacgactttgtcgtccatctagatgccatggcgagctgccggccgggctccggtaccatgtaaaattagtattgatcgattcg

SEQ ID NO: 51781 - protein, 213 aa, Glycine max
  peptide (1)..(213): Ceres Seq. ID no. 12609340
  misc_feature (8)..(211): Homolog of NCBI NO: 24061762 NR Description: glutathione S-transferase [Capsicum annuum]
  misc_feature (8)..(212): Homolog of NCBI NO: 15226952 NR Description: glutathione transferase, putative
  misc_feature (8)..(212): Homolog of NCBI NO: 28932694 NR Description: glutathione S-transferase zeta [Brassica napus]
  misc_feature (8)..(211): Homolog of NCBI NO: 11132235 NR Description: Glutathione S-transferase zeta class
  misc_feature (7)..(212): Homolog of NCBI NO: 11385485 NR Description: glutathione S-transferase GST 17 [Zea mays]
  misc_feature (8)..(212): Homolog of NCBI NO: 29420155 NR Description: glutathione S-transferase Z1 [Malva pusilla]
  misc_feature (1)..(212): Homolog of NCBI NO: 11177839 NR Description: putative glutathione S-transferase OsGSTZ1
  misc_feature (1)..(212): Homolog of NCBI NO: 11385487 NR Description: glutathione S-transferase GST 18 [Zea mays]
  misc_feature (1)..(211): Homolog of NCBI NO: 15430707 NR Description: putative glutathione S-transferase OsGSTZ2
  misc_feature (1)..(213): Homolog of NCBI NO: 11132027 NR Description: Glutathione S-transferase (GST class-zeta)
MATAKPILYGAWISSCSHRVRIALTLKGVDYEYKAVNPRTDPDYEKINPIKYIPALVDGDFVLSDSLAIMLYLEDKYPQHPLVPKDIKTKGLDLQIANIVCSSIQPLQGYGVIGLHEGRLSPDESLEVVQRYIDKGFKAIEKLLDGCDSKYCVGDEVHLGDVCLAPQIHAAINRFQIDLTKYPTLSRLHDAYMEIPAFQAALPQNQPDAPSAK

SEQ ID NO: 51782 - protein, 144 aa, Glycine max
  peptide (1)..(144): Ceres Seq. ID no. 12609341
  misc_feature (1)..(142): Homolog of NCBI NO: 24061762 NR Description: glutathione S-transferase [Capsicum annuum]
  misc_feature (1)..(143): Homolog of NCBI NO: 15226952 NR Description: glutathione transferase, putative
  misc_feature (1)..(143): Homolog of NCBI NO: 28932694 NR Description: glutathione S-transferase zeta [Brassica napus]
  misc_feature (1)..(142): Homolog of NCBI NO: 11132235 NR Description: Glutathione S-transferase zeta class
  misc_feature (1)..(143): Homolog of NCBI NO: 11385485 NR Description: glutathione S-transferase GST 17 [Zea mays]
  misc_feature (1)..(143): Homolog of NCBI NO: 29420155 NR Description: glutathione S-transferase Z1 [Malva pusilla]
  misc_feature (1)..(143): Homolog of NCBI NO: 11177839 NR Description: putative glutathione S-transferase OsGSTZ1
  misc_feature (1)..(143): Homolog of NCBI NO: 11385487 NR Description: glutathione S-transferase GST 18 [Zea mays]
  misc_feature (1)..(142): Homolog of NCBI NO: 15430707 NR Description: putative glutathione S-transferase OsGSTZ2
  misc_feature (1)..(144): Homolog of NCBI NO: 11132027 NR Description: Glutathione S-transferase (GST class-zeta)
MLYLEDKYPQHPLVPKDIKTKGLDLQIANIVCSSIQPLQGYGVIGLHEGRLSPDESLEVVQRYIDKGFKAIEKLLDGCDSKYCVGDEVHLGDVCLAPQIHAAINRFQIDLTKYPTLSRLHDAYMEIPAFQAALPQNQPDAPSAK

SEQ ID NO: 51783 - DNA, 855 bp, Glycine max
  misc_feature (1)..(855): Ceres Seq. ID no. 15172934
cccatcctcgtcgtctccacgctaccgcctcctcccccccaaactcccaactacccgctctgctcctgagttccgagcccgctcgatctccgccgacgccgctccgtcaactcgcacggggaatctcgccatggccgccgcgtcctccgccacctccgtccacgacttcaccgtcaaggatgcaagcggcaaggacgtcgacctgagcgtctacaaggggaaggttcttctcattgttaacgtcgcttcgcagtgtggcttgaccaactccaactacaccgagctgagccagctgtacccgaagtacaaggaccaaggctttgagatcttggctttcccatgcaatcagtttggtgggcaggagcctggcaccaatgatgagatcgttcagtttgcctgcactcgcttcaaggccgagtaccccattttcgacaaggttgatgtcaatggcaacaatgtttctcccctatacaagttcctgaagtctagcaaaggtggccttttcggcgacagcatcaagtggaacttctccaagttcttggttgacaaggagggtcgcgttgtagaccgctatgccccgaccacttcccccctgagcattgagaaggatatcaagaagctgcttgggagctcttagacccgccgctggctggagcgtctggagaaatcggcactctgtattctagaaacaagaataatgtcgtgttgaaataaaatctgtacccagcatttcagaggatgcatctgctatattttcagcatcctgctctgtacttgttgtatatgtcgtgttaatgaatgaattcaaatattgtagctgttcggtgtgcctttcattggatcgtgttgttgtcg

SEQ ID NO: 51784 - protein, 211 aa, Glycine max
  peptide (1)..(211): Ceres Seq. ID no. 15172935
  misc_feature (52)..(161): Pfam Name: Glutathione peroxidase Pfam Description: Glutathione peroxidase
  misc_feature (45)..(210): Homolog of NCBI NO: 22329066 NR Description: glutathione peroxidase, putative [Arabidopsis
  misc_feature (28)..(210): Homolog of NCBI NO: 2982362 NR Description: glutathione peroxidase [Zantedeschia aethiopica]
  misc_feature (2)..(209): Homolog of NCBI NO: 30681827 NR Description: glutathione peroxidase, putative [Arabidopsis
  misc_feature (44)..(211): Homolog of NCBI NO: 38345591 NR Description: OSJNBb0012E24.9 [Oryza sativa (japonica
  misc_feature (45)..(211): Homolog of NCBI NO: 27544804 NR Description: phospholipid hydroperoxide glutathione
  misc_feature (44)..(210): Homolog of NCBI NO: 22268405 NR Description: putative glutathione peroxidase [Zea mays]
  misc_feature (44)..(211): Homolog of NCBI NO: 21360380 NR Description: glutathione peroxidase 1 [Oryza sativa]
  misc_feature (5)..(211): Homolog of NCBI NO: 6179600 NR Description: GPX12Hv, glutathione peroxidase-like protein
  misc_feature (44)..(208): Homolog of NCBI NO: 6179604 NR Description: glutathione peroxidase-like protein GPX54Hv
  misc_feature (44)..(211): Homolog of NCBI NO: 34334012 NR Description: cytosolic glutathione peroxidase [Triticum
PSSSSPRYRLLPPKLPTTRSAPEFRARSISADAAPSTRTGNLAMAAASSATSVHDFTVKDASGKDVDLSVYKGKVLLIVNVASQCGLTNSNYTELSQLYPKYKDQGFEILAFPCNQFGGQEPGTNDEIVQFACTRFKAEYPIFDKVDVNGNNVSPLYKFLKSSKGGLFGDSIKWNFSKFLVDKEGRVVDRYAPTTSPLSIEKDIKKLLGSS

SEQ ID NO: 51785 - protein, 168 aa, Glycine max
  peptide (1)..(168): Ceres Seq. ID no. 15172936
  misc_feature (9)..(118): Pfam Name: Glutathione peroxidase Pfam Description: Glutathione peroxidase
  misc_feature (2)..(167): Homolog of NCBI NO: 22329066 NR Description: glutathione peroxidase, putative [Arabidopsis
  misc_feature (1)..(167): Homolog of NCBI NO: 2982362 NR Description: glutathione peroxidase [Zantedeschia aethiopica]
  misc_feature (1)..(166): Homolog of NCBI NO: 30681827 NR Description: glutathione peroxidase, putative [Arabidopsis
  misc_feature (1)..(168): Homolog of NCBI NO: 38345591 NR Description: OSJNBb0012E24.9 [Oryza sativa (japonica
  misc_feature (2)..(168): Homolog of NCBI NO: 27544804 NR Description: phospholipid hydroperoxide glutathione
  misc_feature (1)..(167): Homolog of NCBI NO: 22268405 NR Description: putative glutathione peroxidase [Zea mays]
  misc_feature (1)..(168): Homolog of NCBI NO: 21360380 NR Description: glutathione peroxidase 1 [Oryza sativa]
  misc_feature (1)..(168): Homolog of NCBI NO: 6179600 NR Description: GPX12Hv, glutathione peroxidase-like protein
  misc_feature (1)..(165): Homolog of NCBI NO: 6179604 NR Description: glutathione peroxidase-like protein GPX54Hv
  misc_feature (1)..(168): Homolog of NCBI NO: 34334012 NR Description: cytosolic glutathione peroxidase [Triticum
MAAASSATSVHDFTVKDASGKDVDLSVYKGKVLLIVNVASQCGLTNSNYTELSQLYPKYKDQGFEILAFPCNQFGGQEPGTNDEIVQFACTRFKAEYPIFDKVDVNGNNVSPLYKFLKSSKGGLFGDSIKWNFSKFLVDKEGRVVDRYAPTTSPLSIEKDIKKLLGSS

SEQ ID NO: 51786 - DNA, 403 bp, Glycine max
  misc_feature (1)..(403): Ceres Seq. ID no. 13581929
aagctatgtgaaggccttctctaggcagtatgctgctgagatatggccccatgttgagaagttggatgcagaggtattgacagaagatgcacctcttctttttcggtcagctgtttattctggtcttcgaagaccaattcacgaggcttgatcaatttgatatttcacttctaagttgtgtttttttagaattaactaaaattcattctttagtctgtcagttaagcattttcttagtcaaccaaaagcgtaaagctgtatgcaattgtaatgtaagtgacaaggttggtatgacgagtctccgctgtttagattctaacgggaacttgaccactgctactgtacattatttcgattatagctactaatttattggaccttaaatacaaagaatgaagtttgt

SEQ ID NO: 51787 - protein, 93 aa, Glycine max
  peptide (1)..(93): Ceres Seq. ID no. 13581930
MHLFFFGQLFILVFEDQFTRLDQFDISLLSCVFLELTKIHSLVCQLSIFLVNQKRKAVCNCNVSDKVGMTSLRCLDSNGNLTTATVHYFDYSY

SEQ ID NO: 51788 - protein, 49 aa, Glycine max
  peptide (1)..(49): Ceres Seq. ID no. 13581931
  misc_feature (2)..(47): Homolog of NCBI NO: 18397263 NR Description: mRNA cap binding protein [Arabidopsis thaliana]
  misc_feature (2)..(47): Homolog of NCBI NO: 17473509 NR Description: At2g13540/T10F5.8 [Arabidopsis thaliana]
SYVKAFSRQYAAEIWPHVEKLDAEVLTEDAPLLFRSAVYSGLRRPIHEA

SEQ ID NO: 51789 - DNA, 937 bp, Glycine max
  misc_feature (1)..(937): Ceres Seq. ID no. 14301396
attccttcccagtctcgcactcgctctgcagtagcacctgcctctgtctcacactcgctatctcctacccacctatcccccgtccgtccgtccgtctaggtctggagaagcggcgatggcggcgcccgtgacggtctacgggccggcgatctcgccggcggtggcccgcgtggcggcgtgcctgctggagaaggacgtggccttccagctcgaggcggtggacatgtccaagggcgagcacaagtccccctccttcctcaagctccagcccttcggccaggtccccgccttcaaagaccacctcaccaccgtcttcgagtcaagggctatttgccgttacatctgtgaccagtactcggaccgtggcaaccggactctcctaggccggaaggaagacggcgcggtaggccgcgccgccatcgagcaatgggtagaatctgaaggccaggcatttaaccctccgagcttggccatcgcattccagctcaccttcgcgccgctcatgggtatggccaccgacatggccgtggtcgagcagaatgaggcgaagctcgccaaggtgcttgatgtatacgagcggcggctggcggagagccagtatttcgccggcgacgagttcacccttgccgaccttgtgcacatgcccaacactgatcttctcgtgagcaagaccggcaaggcgggtctgatcaccgagagaaagaacctgtccagatggtgggacgaggtctcggctcgtccgtcgtggaagaaggttgtcgagttgcagagtgtaccacgaccctctaaagcttgaggcccccttcatcttttagtcgagcagcttctggtggtaattagtcacattctgttatgtgttgccattgctgttaaagtgtgaattgtgaaagactcgggccgctttgtactactccttctatctatctctgctattatt

SEQ ID NO: 51790 - protein, 226 aa, Glycine max
  peptide (1)..(226): Ceres Seq. ID no. 14301397
  misc_feature (100)..(209): Pfam Name: Glutathione S-transferase, C-terminal domain Pfam Description: Glutathione S-transferase, C-terminal domain
  misc_feature (7)..(221): Homolog of NCBI NO: 21217741 NR Description: putative glutathione S-transferase [Phaseolus
  misc_feature (1)..(169): Homolog of NCBI NO: 11385471 NR Description: glutathione S-transferase GST 10 [Zea mays]
  misc_feature (1)..(224): Homolog of NCBI NO: 11177845 NR Description: putative glutathione S-transferase OsGSTF3
  misc_feature (1)..(224): Homolog of NCBI NO: 22758267 NR Description: Putative glutathione S-transferase
MAAPVTVYGPAISPAVARVAACLLEKDVAFQLEAVDMSKGEHKSPSFLKLQPFGQVPAFKDHLTTVFESRAICRYICDQYSDRGNRTLLGRKEDGAVGRAAIEQWVESEGQAFNPPSLAIAFQLTFAPLMGMATDMAVVEQNEAKLAKVLDVYERRLAESQYFAGDEFTLADLVHMPNTDLLVSKTGKAGLITERKNLSRWWDEVSARPSWKKVVELQSVPRPSKA

SEQ ID NO: 51791 - protein, 190 aa, Glycine max
  peptide (1)..(190): Ceres Seq. ID no. 14301398
  misc_feature (64)..(173): Pfam Name: Glutathione S-transferase, C-terminal domain Pfam Description: Glutathione S-transferase, C-terminal domain
  misc_feature (1)..(185): Homolog of NCBI NO: 21217741 NR Description: putative glutathione S-transferase [Phaseolus
  misc_feature (1)..(133): Homolog of NCBI NO: 11385471 NR Description: glutathione S-transferase GST 10 [Zea mays]
  misc_feature (1)..(188): Homolog of NCBI NO: 11177845 NR Description: putative glutathione S-transferase OsGSTF3
  misc_feature (1)..(188): Homolog of NCBI NO: 22758267 NR Description: Putative glutathione S-transferase
MSKGEHKSPSFLKLQPFGQVPAFKDHLTTVFESRAICRYICDQYSDRGNRTLLGRKEDGAVGRAAIEQWVESEGQAFNPPSLAIAFQLTFAPLMGMATDMAVVEQNEAKLAKVLDVYERRLAESQYFAGDEFTLADLVHMPNTDLLVSKTGKAGLITERKNLSRWWDEVSARPSWKKVVELQSVPRPSKA

SEQ ID NO: 51792 - DNA, 631 bp, Glycine max
  misc_feature (1)..(631): Ceres Seq. ID no. 12609890
aacgcactcggcaatcagcagtcaagcaatccccactcacatctctccacttcccgaatcctttgtccagctcgccatggacgcctcagccaccgtagccaccgggaaggggaagaagggcgtggccgggcgcaaggcgggcggccccaggaagaagtccgtgtcgcggtccgtcaaggccgggctccagttccccgtcagccgcatcgggcgcttcctcaagaagggccgctacgcgcagcgcgtcggctccggcgcccccgtctacctcgcggccgtcctcgagtacctcgccgccgagctgctggagctcgcgggcaacgccgccaaggacaacaagaagagccggatcatcccccgccacctgctgctcgccatcaggaacgacgaggagctcggcaagctgctcgccggcatcaccatcgcgcacggcggcgtgattcccaacatcaacccggtgctgctccccaagaagacggccgagaagtcccccaaggagcccaagtcgcccaagaagaccgccaagtcccccaagaaggcttaggttccttgcgtagttaggctgtagctggggtgtatggatgggtgtgcttgaggatacttcagttcgaagtagactgttcttgctttg

SEQ ID NO: 51793 - protein, 186 aa, Glycine max
  peptide (1)..(186): Ceres Seq. ID no. 12609891
  misc_feature (31)..(180): Pfam Name: HlyD family secretion protein Pfam Description: HlyD family secretion protein
NALGNQQSSNPHSHLSTSRILCPARHGRLSHRSHREGEEGRGRAQGGRPQEEVRVAVRQGRAPVPRQPHRALPQEGPLRAARRLRRPRLPRGRPRVPRRRAAGARGQRRQGQQEEPDHPPPPAARHQERRGARQAARRHHHRARRRDSQHQPGAAPQEDGREVPQGAQVAQEDRQVPQEGLGSLRS

SEQ ID NO: 51794 - protein, 180 aa, Glycine max
  peptide (1)..(180): Ceres Seq. ID no. 12609892
  misc_feature (36)..(158): Pfam Name: Core histone H2A/H2B/H3/H4 Pfam Description: Core histone H2A/H2B/H3/H4
  misc_feature (33)..(180): Homolog of NCBI NO: 27529852 NR Description: H2A histone [Nicotiana tabacum]
  misc_feature (36)..(180): Homolog of NCBI NO: 122003 NR Description: HISTONE H2A
  misc_feature (33)..(180): Homolog of NCBI NO: 729669 NR Description: Histone H2A
  misc_feature (33)..(180): Homolog of NCBI NO: 122006 NR Description: HISTONE H2A
  misc_feature (34)..(180): Homolog of NCBI NO: 7649159 NR Description: histone H2A [Euphorbia esula]
  misc_feature (39)..(180): Homolog of NCBI NO: 121982 NR Description: HISTONE H2A.2.2
  misc_feature (36)..(180): Homolog of NCBI NO: 121974 NR Description: HISTONE H2A.2.1
  misc_feature (35)..(180): Homolog of NCBI NO: 122007 NR Description: Histone H2A
  misc_feature (26)..(180): Homolog of NCBI NO: 34914498 NR Description: putative histone H2A [Oryza sativa (japonica
  misc_feature (26)..(180): Homolog of NCBI NO: 729671 NR Description: Histone H2A
THSAISSQAIPTHISPLPESFVQLAMDASATVATGKGKKGVAGRKAGGPRKKSVSRSVKAGLQFPVSRIGRFLKKGRYAQRVGSGAPVYLAAVLEYLAAELLELAGNAAKDNKKSRIIPRHLLLAIRNDEELGKLLAGITIAHGGVIPNINPVLLPKKTAEKSPKEPKSPKKTAKSPKKA

SEQ ID NO: 51795 - protein, 155 aa, Glycine max
  peptide (1)..(155): Ceres Seq. ID no. 12609893
  misc_feature (11)..(133): Pfam Name: Core histone H2A/H2B/H3/H4 Pfam Description: Core histone H2A/H2B/H3/H4
  misc_feature (8)..(155): Homolog of NCBI NO: 27529852 NR Description: H2A histone [Nicotiana tabacum]
  misc_feature (11)..(155): Homolog of NCBI NO: 122003 NR Description: HISTONE H2A
  misc_feature (8)..(155): Homolog of NCBI NO: 729669 NR Description: Histone H2A
  misc_feature (8)..(155): Homolog of NCBI NO: 122006 NR Description: HISTONE H2A
  misc_feature (9)..(155): Homolog of NCBI NO: 7649159 NR Description: histone H2A [Euphorbia esula]
  misc_feature (14)..(155): Homolog of NCBI NO: 121982 NR Description: HISTONE H2A.2.2
  misc_feature (11)..(155): Homolog of NCBI NO: 121974 NR Description: HISTONE H2A.2.1
  misc_feature (10)..(155): Homolog of NCBI NO: 122007 NR Description: Histone H2A
  misc_feature (1)..(155): Homolog of NCBI NO: 34914498 NR Description: putative histone H2A [Oryza sativa (japonica
  misc_feature (1)..(155): Homolog of NCBI NO: 729671 NR Description: Histone H2A
MDASATVATGKGKKGVAGRKAGGPRKKSVSRSVKAGLQFPVSRIGRFLKKGRYAQRVGSGAPVYLAAVLEYLAAELLELAGNAAKDNKKSRIIPRHLLLAIRNDEELGKLLAGITIAHGGVIPNINPVLLPKKTAEKSPKEPKSPKKTAKSPKKA

SEQ ID NO: 51796 - DNA, 1027 bp, Glycine max
  misc_feature (1)..(1027): Ceres Seq. ID no. 12609314
aggcggacaagaagaggaaagtgagaaagcttaaagcaatcgtcgtgagagactctcgagtcttccctgagtcactcccctctcttctctcggcggcgttctcgttcgattagggtttttgtatcaccttgcagattcttcaacacacaatgcataagttgagtagaagcaaccgggataaacttcagcagttcgtggctatcactggagctagtgataagaatgctcttcaggctctcaaagccagcgattggcagctggaagcagcttttgatatgttttacagccagccccagccaagaagcaatggtgatatgagacgcttggaggagctctacaatagatataaagacccatattctgatatgattctggccgaaggtatctcggttctgtgtagtgatcttcaggtggaaccccaagacattgtcacgctggttctgtcgtggcatatgaatgctgccacagcgtgtgaattttccaaggaagaattttttggtgggttacacgcattaggtgtagattccactggaaagttgcaagaaaagctgtcatttatgcgttctgagcttaaagatgaacaaaagttccatgaaatatacaactttgcttttgggtgggcgaaagagaagggacagaagtctcttgctttagatacagctattggtatatggcagctgctttttgcagaaagagagtggccgttggtaaaccactggtgtgatttcttacaggatcgtcacaacaaggccatatctaaagacacatgggcacagctcctggagtttgcaaggacggtggacccggcgctgtcgaactacgatgcagaaggagcatggccttacctcatcgatgagttcgttgagtacctgtatgacaagagcgttgttgagaagtaacatgccaattgggagaagtactcagctctatttttacagtggtccttgctcattatttatgaatagacttgtgtgttcttgtccgaatcttcatcttcttattttgatgatcaaataactaagatgtt

SEQ ID NO: 51797 - protein, 249 aa, Glycine max
  peptide (1)..(249): Ceres Seq. ID no. 12609315
  misc_feature (128)..(242): Pfam Name: Domain of unknown function (DUF298) Pfam Description: Domain of unknown function (DUF298)
  misc_feature (1)..(240): Homolog of NCBI NO: 15826860 NR Description: testis derived transcript 3 [Mus musculus]
  misc_feature (1)..(240): Homolog of NCBI NO: 6166507 NR Description: RP42 [Mus musculus]
  misc_feature (1)..(240): Homolog of NCBI NO: 32966900 NR Description: leucine zipper protein [Branchiostoma belcheri
  misc_feature (1)..(240): Homolog of NCBI NO: 24664675 NR Description: CG7427-PA [Drosophila melanogaster]
  misc_feature (2)..(240): Homolog of NCBI NO: 34857167 NR Description: similar to RP42 homolog [Rattus norvegicus]
  misc_feature (1)..(240): Homolog of NCBI NO: 34784818 NR Description: RP42 homolog [Homo sapiens]
  misc_feature (1)..(240): Homolog of NCBI NO: 34784120 NR Description: Unknown (protein for MGC:66414) [Danio rerio]
  misc_feature (1)..(240): Homolog of NCBI NO: 18700658 NR Description: leucine zipper protein [Homo sapiens]
  misc_feature (1)..(249): Homolog of NCBI NO: 15292985 NR Description: unknown protein [Arabidopsis thaliana]
  misc_feature (1)..(249): Homolog of NCBI NO: 18399737 NR Description: expressed protein
MHKLSRSNRDKLQQFVAITGASDKNALQALKASDWQLEAAFDMFYSQPQPRSNGDMRRLEELYNRYKDPYSDMILAEGISVLCSDLQVEPQDIVTLVLSWHMNAATACEFSKEEFFGGLHALGVDSTGKLQEKLSFMRSELKDEQKFHEIYNFAFGWAKEKGQKSLALDTAIGIWQLLFAEREWPLVNHWCDFLQDRHNKAISKDTWAQLLEFARTVDPALSNYDAEGAWPYLIDEFVEYLYDKSVVEK

SEQ ID NO: 51798 - protein, 207 aa, Glycine max
  peptide (1)..(207): Ceres Seq. ID no. 12609316
  misc_feature (86)..(200): Pfam Name: Domain of unknown function (DUF298) Pfam Description: Domain of unknown function (DUF298)
  misc_feature (1)..(198): Homolog of NCBI NO: 15826860 NR Description: testis derived transcript 3 [Mus musculus]
  misc_feature (1)..(198): Homolog of NCBI NO: 6166507 NR Description: RP42 [Mus musculus]
  misc_feature (1)..(198): Homolog of NCBI NO: 32966900 NR Description: leucine zipper protein [Branchiostoma belcheri
  misc_feature (1)..(198): Homolog of NCBI NO: 24664675 NR Description: CG7427-PA [Drosophila melanogaster]
  misc_feature (1)..(198): Homolog of NCBI NO: 34857167 NR Description: similar to RP42 homolog [Rattus norvegicus]
  misc_feature (1)..(198): Homolog of NCBI NO: 34784818 NR Description: RP42 homolog [Homo sapiens]
  misc_feature (1)..(198): Homolog of NCBI NO: 34784120 NR Description: Unknown (protein for MGC:66414) [Danio rerio]
  misc_feature (1)..(198): Homolog of NCBI NO: 18700658 NR Description: leucine zipper protein [Homo sapiens]
  misc_feature (1)..(207): Homolog of NCBI NO: 15292985 NR Description: unknown protein [Arabidopsis thaliana]
  misc_feature (1)..(207): Homolog of NCBI NO: 18399737 NR Description: expressed protein
MFYSQPQPRSNGDMRRLEELYNRYKDPYSDMILAEGISVLCSDLQVEPQDIVTLVLSWHMNAATACEFSKEEFFGGLHALGVDSTGKLQEKLSFMRSELKDEQKFHEIYNFAFGWAKEKGQKSLALDTAIGIWQLLFAEREWPLVNHWCDFLQDRHNKAISKDTWAQLLEFARTVDPALSNYDAEGAWPYLIDEFVEYLYDKSVVEK

SEQ ID NO: 51799 - protein, 194 aa, Glycine max
  peptide (1)..(194): Ceres Seq. ID no. 12609317
  misc_feature (73)..(187): Pfam Name: Domain of unknown function (DUF298) Pfam Description: Domain of unknown function (DUF298)
  misc_feature (1)..(185): Homolog of NCBI NO: 15826860 NR Description: testis derived transcript 3 [Mus musculus]
  misc_feature (1)..(185): Homolog of NCBI NO: 6166507 NR Description: RP42 [Mus musculus]
  misc_feature (1)..(185): Homolog of NCBI NO: 32966900 NR Description: leucine zipper protein [Branchiostoma belcheri
  misc_feature (1)..(185): Homolog of NCBI NO: 24664675 NR Description: CG7427-PA [Drosophila melanogaster]
  misc_feature (1)..(185): Homolog of NCBI NO: 34857167 NR Description: similar to RP42 homolog [Rattus norvegicus]
  misc_feature (1)..(185): Homolog of NCBI NO: 34784818 NR Description: RP42 homolog [Homo sapiens]
  misc_feature (1)..(185): Homolog of NCBI NO: 34784120 NR Description: Unknown (protein for MGC:66414) [Danio rerio]
  misc_feature (1)..(185): Homolog of NCBI NO: 18700658 NR Description: leucine zipper protein [Homo sapiens]
  misc_feature (1)..(194): Homolog of NCBI NO: 15292985 NR Description: unknown protein [Arabidopsis thaliana]
  misc_feature (1)..(194): Homolog of NCBI NO: 18399737 NR Description: expressed protein
MRRLEELYNRYKDPYSDMILAEGISVLCSDLQVEPQDIVTLVLSWHMNAATACEFSKEEFFGGLHALGVDSTGKLQEKLSFMRSELKDEQKFHEIYNFAFGWAKEKGQKSLALDTAIGIWQLLFAEREWPLVNHWCDFLQDRHNKAISKDTWAQLLEFARTVDPALSNYDAEGAWPYLIDEFVEYLYDKSVVEK

SEQ ID NO: 51800 - DNA, 1326 bp, Glycine max
  misc_feature (1)..(1326): Ceres Seq. ID no. 13594671
tttttcccgcgcatttgcccccgaatctcccgcgctcgccccctcttatccccgtctcctccgatcccgaccccgaccccgccagacgccaccacccgccgccgccgccgccagaagagatccgtccatccggccaagccgagagcagagcatagcaggggaaggagacgggagagaggacccgcagccatgatgttctccagccaggtcgacgccttctcgccgtcgcagttcaccccgtcgcagaacgcctccgccgactccacccccaacaagttccggggcgcgtcgggtacgatgccgctgacggtgaagcagatcgcggacgcgcagctggccggcaccggcgagaagggcgcgcccttcgtcgtcgacggcgtcgagacggccaacgtcaggctcgtggggatggtgagcggcaaggcggagcggaacacggacgtctccttcacgctcgacgacggcaccggccgcatcgacttcatcagatgggtgaatgatgctgcagattctgctgaaactgctgccattcagaatggtatgtacgtcgctgtcatcggtagcctcaagggagttcaggacaagaagcgtgctactgcttttgcagtcagacctataactgattacaacgaggtcacgctgcatttcattcagtgtgtacggatgcatatagagaacacaaaatcaaaggttggcagtcctgcacacaccaattcttctgtgggaaccccattctccaacagattgagcgaagcagccactccaccctctgtgaagtccaacccggcaccagtgaccagcggaacaaatggatccgagactgatttttacacgcaggtgctgaatgtcttccgcgaaccagcaaacattgagagtgaccatggtgtgcatgtggatgacattgccaagcggttcagactaccagcactcaagatcaaggaggctatcgactaccacgttgacgtcgggcacatctactcgaccattgatgatttccactacaagtcagcgttcgtcgactgagtctgtaaccgagtgccgtcgtcactcgctagcatctgtccttagatgtgctgtttaggtagcctcccaaaggaagcatcttctcgctggagtttgagagacatgactcactgttggcctgagaggatgctccaggggcatgtattactttaaattcctgttgatcagaggcgtatgagccttgatgcgatgagagtctcgtcttgtgaaattatggttagcgtctctcatgttctgctctgagtgtgatatggtgggatggatttacattttacagtcaaagtttgacagttacatcgctct

SEQ ID NO: 51801 - protein, 340 aa, Glycine max
  peptide (1)..(340): Ceres Seq. ID no. 13594672
  misc_feature (132)..(206): Pfam Name: OB-fold nucleic acid binding domain Pfam Description: OB-fold nucleic acid binding domain
  misc_feature (74)..(336): Homolog of NCBI NO: 4506585 NR Description: replication protein A2, 32kDa; replication
  misc_feature (78)..(336): Homolog of NCBI NO: 2498847 NR Description: REPLICATION PROTEIN A 32 KD SUBUNIT (RP-A) (RF-A)
  misc_feature (65)..(336): Homolog of NCBI NO: 34871794 NR Description: p32-subunit of replication protein A [Rattus
  misc_feature (73)..(336): Homolog of NCBI NO: 6728969 NR Description: putative replication factor A [Arabidopsis
  misc_feature (73)..(336): Homolog of NCBI NO: 18396383 NR Description: replication factor - related [Arabidopsis
  misc_feature (280)..(335): Homolog of NCBI NO: 25347925 NR Description: probable replication protein A1 [imported] -
  misc_feature (73)..(240): Homolog of NCBI NO: 25347925 NR Description: probable replication protein A1 [imported] -
  misc_feature (73)..(335): Homolog of NCBI NO: 18400560 NR Description: replication protein, putative [Arabidopsis
  misc_feature (64)..(338): Homolog of NCBI NO: 13516746 NR Description: replication protein A 30kDa
  misc_feature (64)..(338): Homolog of NCBI NO: 9801268 NR Description: replication protein A2 [Oryza sativa]
FFPRICPRISRARPLLSPSPPIPTPTPPDATTRRRRRQKRSVHPAKPRAEHSRGRRRERGPAAMMFSSQVDAFSPSQFTPSQNASADSTPNKFRGASGTMPLTVKQIADAQLAGTGEKGAPFVVDGVETANVRLVGMVSGKAERNTDVSFTLDDGTGRIDFIRWVNDAADSAETAAIQNGMYVAVIGSLKGVQDKKRATAFAVRPITDYNEVTLHFIQCVRMHIENTKSKVGSPAHTNSSVGTPFSNRLSEAATPPSVKSNPAPVTSGTNGSETDFYTQVLNVFREPANIESDHGVHVDDIAKRFRLPALKIKEAIDYHVDVGHIYSTIDDFHYKSAFVD

SEQ ID NO: 51802 - protein, 277 aa, Glycine max
  peptide (1)..(277): Ceres Seq. ID no. 13594673
  misc_feature (69)..(143): Pfam Name: OB-fold nucleic acid binding domain Pfam Description: OB-fold nucleic acid binding domain
  misc_feature (11)..(273): Homolog of NCBI NO: 4506585 NR Description: replication protein A2, 32kDa; replication
  misc_feature (15)..(273): Homolog of NCBI NO: 2498847 NR Description: REPLICATION PROTEIN A 32 KD SUBUNIT (RP-A) (RF-A)
  misc_feature (2)..(273): Homolog of NCBI NO: 34871794 NR Description: p32-subunit of replication protein A [Rattus
  misc_feature (10)..(273): Homolog of NCBI NO: 6728969 NR Description: putative replication factor A [Arabidopsis
  misc_feature (10)..(273): Homolog of NCBI NO: 18396383 NR Description: replication factor - related [Arabidopsis
  misc_feature (217)..(272): Homolog of NCBI NO: 25347925 NR Description: probable replication protein A1 [imported] -
  misc_feature (10)..(177): Homolog of NCBI NO: 25347925 NR Description: probable replication protein A1 [imported] -
  misc_feature (10)..(272): Homolog of NCBI NO: 18400560 NR Description: replication protein, putative [Arabidopsis
  misc_feature (1)..(275): Homolog of NCBI NO: 13516746 NR Description: replication protein A 30kDa
  misc_feature (1)..(275): Homolog of NCBI NO: 9801268 NR Description: replication protein A2 [Oryza sativa]
MMFSSQVDAFSPSQFTPSQNASADSTPNKFRGASGTMPLTVKQIADAQLAGTGEKGAPFVVDGVETANVRLVGMVSGKAERNTDVSFTLDDGTGRIDFIRWVNDAADSAETAAIQNGMYVAVIGSLKGVQDKKRATAFAVRPITDYNEVTLHFIQCVRMHIENTKSKVGSPAHTNSSVGTPFSNRLSEAATPPSVKSNPAPVTSGTNGSETDFYTQVLNVFREPANIESDHGVHVDDIAKRFRLPALKIKEAIDYHVDVGHIYSTIDDFHYKSAFVD

SEQ ID NO: 51803 - protein, 276 aa, Glycine max
  peptide (1)..(276): Ceres Seq. ID no. 13594674
  misc_feature (68)..(142): Pfam Name: OB-fold nucleic acid binding domain Pfam Description: OB-fold nucleic acid binding domain
  misc_feature (10)..(272): Homolog of NCBI NO: 4506585 NR Description: replication protein A2, 32kDa; replication
  misc_feature (14)..(272): Homolog of NCBI NO: 2498847 NR Description: REPLICATION PROTEIN A 32 KD SUBUNIT (RP-A) (RF-A)
  misc_feature (1)..(272): Homolog of NCBI NO: 34871794 NR Description: p32-subunit of replication protein A [Rattus
  misc_feature (9)..(272): Homolog of NCBI NO: 6728969 NR Description: putative replication factor A [Arabidopsis
  misc_feature (9)..(272): Homolog of NCBI NO: 18396383 NR Description: replication factor - related [Arabidopsis
  misc_feature (216)..(271): Homolog of NCBI NO: 25347925 NR Description: probable replication protein A1 [imported] -
  misc_feature (9)..(176): Homolog of NCBI NO: 25347925 NR Description: probable replication protein A1 [imported] -
  misc_feature (9)..(271): Homolog of NCBI NO: 18400560 NR Description: replication protein, putative [Arabidopsis
  misc_feature (1)..(274): Homolog of NCBI NO: 13516746 NR Description: replication protein A 30kDa
  misc_feature (1)..(274): Homolog of NCBI NO: 9801268 NR Description: replication protein A2 [Oryza sativa]
MFSSQVDAFSPSQFTPSQNASADSTPNKFRGASGTMPLTVKQIADAQLAGTGEKGAPFVVDGVETANVRLVGMVSGKAERNTDVSFTLDDGTGRIDFIRWVNDAADSAETAAIQNGMYVAVIGSLKGVQDKKRATAFAVRPITDYNEVTLHFIQCVRMHIENTKSKVGSPAHTNSSVGTPFSNRLSEAATPPSVKSNPAPVTSGTNGSETDFYTQVLNVFREPANIESDHGVHVDDIAKRFRLPALKIKEAIDYHVDVGHIYSTIDDFHYKSAFVD

SEQ ID NO: 51804 - DNA, 1219 bp, Glycine max
  misc_feature (1)..(1219): Ceres Seq. ID no. 13594910
gtcgttgttcttatcttatcccatcacccatttcttcctctctctctctctctctctctctctcttacacaagttgctgctgagttggtgttgtccttgttcctggacggacacatccgacatgtcgacggcggtggcgcggcccttcggcgggttccccggatcggggaggaccaagggggatgagctgctcggcaagaagatgagcgacgggttcttcatcgaggaggaggaggaagaggaggcggaggaggtgctgacggagagctcctccatcggcgccccgtcgccgtcgagctcctccatcggggaggactcctcgtcggaggttggcggggaaggggaggacgaggaggtggagagcaagctcaaggaggagcccgggctcggctgcctggacgccttggaggactccttgcccatcaagaacgggctgtcgagcttctacgccggaaagtcaaagtccttcaccagcctcgcggaggcggcggcgcgggacgccgtgaaggagctcgccaagccggagaaccccttcaacaagcgccgccgcatcctggccacctggtcccggcgcgcctcctgcagctcgctggcgacggccacctacctgcccccgttcctcgccccggaccacgccctccccgagggcgacgaaggcgaggaggacgacgactccgactccggctccgacgagcagcaccgcggcaagaacgggtgggaggcgccggcattgccgcccccgaggctcagcgtgaacacccagatgggcgcatcggcggcgaggaggggcggcagcttcaggtcgccgagatcgtattcactgtcagaccttcgaaacggcggtgatgctagttataatcagtagctgcgaattcgcagccattgatctgtcttgtgtcccgtagatctgttactactacttactccttaattatatataagtaagtaatcgcaagagcatgtgtaagtgtcttgagctaaattcgttgtgttcttgtatccatcagttggatcccgttgacctcgttcacctgatgtacgcagacatgtatgaactgctccggtgaactgaaccgaactgatccaacaccctggccatcattaactaatgatgaacgatcctcgagataagattagttagttaattaatggcatcgctcctgatcctttcgccctgtacaaacatatatatacaatttgttgatgcaatttgatttgc

SEQ ID NO: 51805 - protein, 287 aa, Glycine max
  peptide (1)..(287): Ceres Seq. ID no. 13594911
  misc_feature (96)..(234): Homolog of NCBI NO: 15229793 NR Description: hypothetical protein [Arabidopsis thaliana]
  misc_feature (89)..(185): Homolog of NCBI NO: 22326936 NR Description: expressed protein [Arabidopsis thaliana]
  misc_feature (41)..(202): Homolog of NCBI NO: 18400574 NR Description: expressed protein [Arabidopsis thaliana]
  misc_feature (64)..(279): Homolog of NCBI NO: 9294810 NR Description: MTD1 [Medicago truncatula]
  misc_feature (59)..(234): Homolog of NCBI NO: 25412223 NR Description: hypothetical protein At2g24550 [imported] -
  misc_feature (66)..(231): Homolog of NCBI NO: 28393161 NR Description: unknown protein [Arabidopsis thaliana]
  misc_feature (41)..(234): Homolog of NCBI NO: 15724184 NR Description: At2g24550/F25P17.15 [Arabidopsis thaliana]
  misc_feature (66)..(277): Homolog of NCBI NO: 15238642 NR Description: expressed protein [Arabidopsis thaliana]
  misc_feature (95)..(232): Homolog of NCBI NO: 15235970 NR Description: expressed protein [Arabidopsis thaliana]
  misc_feature (41)..(286): Homolog of NCBI NO: 34905120 NR Description: P0686C03.43 [Oryza sativa (japonica
SLFLSYPITHFFLSLSLSLSLLHKLLLSWCCPCSWTDTSDMSTAVARPFGGFPGSGRTKGDELLGKKMSDGFFIEEEEEEEAEEVLTESSSIGAPSPSSSSIGEDSSSEVGGEGEDEEVESKLKEEPGLGCLDALEDSLPIKNGLSSFYAGKSKSFTSLAEAAARDAVKELAKPENPFNKRRRILATWSRRASCSSLATATYLPPFLAPDHALPEGDEGEEDDDSDSGSDEQHRGKNGWEAPALPPPRLSVNTQMGASAARRGGSFRSPRSYSLSDLRNGGDASYNQ

SEQ ID NO: 51806 - protein, 247 aa, Glycine max
  peptide (1)..(247): Ceres Seq. ID no. 13594912
  misc_feature (56)..(194): Homolog of NCBI NO: 15229793 NR Description: hypothetical protein [Arabidopsis thaliana]
  misc_feature (49)..(145): Homolog of NCBI NO: 22326936 NR Description: expressed protein [Arabidopsis thaliana]
  misc_feature (1)..(162): Homolog of NCBI NO: 18400574 NR Description: expressed protein [Arabidopsis thaliana]
  misc_feature (24)..(239): Homolog of NCBI NO: 9294810 NR Description: MTD1 [Medicago truncatula]
  misc_feature (19)..(194): Homolog of NCBI NO: 25412223 NR Description: hypothetical protein At2g24550 [imported] -
  misc_feature (26)..(191): Homolog of NCBI NO: 28393161 NR Description: unknown protein [Arabidopsis thaliana]
  misc_feature (1)..(194): Homolog of NCBI NO: 15724184 NR Description: At2g24550/F25P17.15 [Arabidopsis thaliana]
  misc_feature (26)..(237): Homolog of NCBI NO: 15238642 NR Description: expressed protein [Arabidopsis thaliana]
  misc_feature (55)..(192): Homolog of NCBI NO: 15235970 NR Description: expressed protein [Arabidopsis thaliana]
  misc_feature (1)..(246): Homolog of NCBI NO: 34905120 NR Description: P0686C03.43 [Oryza sativa (japonica
MSTAVARPFGGFPGSGRTKGDELLGKKMSDGFFIEEEEEEEAEEVLTESSSIGAPSPSSSSIGEDSSSEVGGEGEDEEVESKLKEEPGLGCLDALEDSLPIKNGLSSFYAGKSKSFTSLAEAAARDAVKELAKPENPFNKRRRILATWSRRASCSSLATATYLPPFLAPDHALPEGDEGEEDDDSDSGSDEQHRGKNGWEAPALPPPRLSVNTQMGASAARRGGSFRSPRSYSLSDLRNGGDASYNQ

SEQ ID NO: 51807 - protein, 220 aa, Glycine max
  peptide (1)..(220): Ceres Seq. ID no. 13594913
  misc_feature (29)..(167): Homolog of NCBI NO: 15229793 NR Description: hypothetical protein [Arabidopsis thaliana]
  misc_feature (22)..(118): Homolog of NCBI NO: 22326936 NR Description: expressed protein [Arabidopsis thaliana]
  misc_feature (1)..(135): Homolog of NCBI NO: 18400574 NR Description: expressed protein [Arabidopsis thaliana]
  misc_feature (1)..(212): Homolog of NCBI NO: 9294810 NR Description: MTD1 [Medicago truncatula]
  misc_feature (1)..(167): Homolog of NCBI NO: 25412223 NR Description: hypothetical protein At2g24550 [imported] -
  misc_feature (1)..(164): Homolog of NCBI NO: 28393161 NR Description: unknown protein [Arabidopsis thaliana]
  misc_feature (1)..(167): Homolog of NCBI NO: 15724184 NR Description: At2g24550/F25P17.15 [Arabidopsis thaliana]
  misc_feature (1)..(210): Homolog of NCBI NO: 15238642 NR Description: expressed protein [Arabidopsis thaliana]
  misc_feature (28)..(165): Homolog of NCBI NO: 15235970 NR Description: expressed protein [Arabidopsis thaliana]
  misc_feature (1)..(219): Homolog of NCBI NO: 34905120 NR Description: P0686C03.43 [Oryza sativa (japonica
MSDGFFIEEEEEEEAEEVLTESSSIGAPSPSSSSIGEDSSSEVGGEGEDEEVESKLKEEPGLGCLDALEDSLPIKNGLSSFYAGKSKSFTSLAEAAARDAVKELAKPENPFNKRRRILATWSRRASCSSLATATYLPPFLAPDHALPEGDEGEEDDDSDSGSDEQHRGKNGWEAPALPPPRLSVNTQMGASAARRGGSFRSPRSYSLSDLRNGGDASYNQ

SEQ ID NO: 51808 - DNA, 695 bp, Glycine max
  misc_feature (1)..(695): Ceres Seq. ID no. 12609898
acatccacagccaattccgagctcttccgagtccctgaatccatctctcatctcctccatcgttccacagacgcacgagctctcgtcgagcaggccataccggactggctagccgagctccgatggtttcctcaatgaagcagtgcagagatgaggcccaggaggtgcccctgtccctctcgctctccctcggcgtcatggccgaccgcagcaagaagcagcgccgcggcggcgcagatggcgagttcgtctgcaagacgtgcagccgcgccttcccgtcgttccaggcgctgggcgggcaccggactagccacctccgcggccgccacgggctagcgctcggcctcacttcagggtccgatcagccggggaccaagaagacgacggaccagaagcaggcgcaccagtgccacgtctgcgggctggagttcgagatggggcaggcgatgggcggccacatgcgccgacaccgcgagcaggaggccgccaccacggcgcaggcgccgcccgttctgctccagctcttcgtctagcaccgcactgatttctctcaagttacatagctaggcatttctggttctagtagagatttacaggttggcctatgtgcgcggtttggtttgtacatttgctgcacactactgtagctcgttggtctgttcgctcttgttaggtatatatgcacatattttagg

SEQ ID NO: 51809 - protein, 136 aa, Glycine max
  peptide (1)..(136): Ceres Seq. ID no. 12609899
  misc_feature (42)..(64): Pfam Name: Zinc finger, C2H2 type Pfam Description: Zinc finger, C2H2 type
  misc_feature (42)..(120): Homolog of NCBI NO: 15231333 NR Description: zinc finger -like protein; protein id:
  misc_feature (12)..(117): Homolog of NCBI NO: 29124132 NR Description: putative Cys2/His2 zinc-finger protein
  misc_feature (2)..(123): Homolog of NCBI NO: 2346976 NR Description: ZPT2-13 [Petunia x hybrida]
  misc_feature (2)..(131): Homolog of NCBI NO: 2346974 NR Description: ZPT2-12 [Petunia x hybrida]
  misc_feature (35)..(124): Homolog of NCBI NO: 34908110 NR Description: P0031D11.12 [Oryza sativa (japonica
  misc_feature (11)..(124): Homolog of NCBI NO: 34908122 NR Description: P0031D11.19 [Oryza sativa (japonica
  misc_feature (35)..(124): Homolog of NCBI NO: 30420734 NR Description: zinc finger transcription factor ZFP19
  misc_feature (11)..(124): Homolog of NCBI NO: 18652814 NR Description: C2H2 zinc finger protein [Oryza sativa]
  misc_feature (18)..(122): Homolog of NCBI NO: 29124140 NR Description: putative Cys2/His2 zinc-finger protein
  misc_feature (6)..(136): Homolog of NCBI NO: 29124117 NR Description: putative Cys2/His2 zinc-finger protein
MVSSMKQCRDEAQEVPLSLSLSLGVMADRSKKQRRGGADGEFVCKTCSRAFPSFQALGGHRTSHLRGRHGLALGLTSGSDQPGTKKTTDQKQAHQCHVCGLEFEMGQAMGGHMRRHREQEAATTAQAPPVLLQLFV

SEQ ID NO: 51810 - protein, 132 aa, Glycine max
  peptide (1)..(132): Ceres Seq. ID no. 12609900
  misc_feature (38)..(60): Pfam Name: Zinc finger, C2H2 type Pfam Description: Zinc finger, C2H2 type
  misc_feature (38)..(116): Homolog of NCBI NO: 15231333 NR Description: zinc finger -like protein; protein id:
  misc_feature (8)..(113): Homolog of NCBI NO: 29124132 NR Description: putative Cys2/His2 zinc-finger protein
  misc_feature (1)..(119): Homolog of NCBI NO: 2346976 NR Description: ZPT2-13 [Petunia x hybrida]
  misc_feature (1)..(127): Homolog of NCBI NO: 2346974 NR Description: ZPT2-12 [Petunia x hybrida]
  misc_feature (31)..(120): Homolog of NCBI NO: 34908110 NR Description: P0031D11.12 [Oryza sativa (japonica
  misc_feature (7)..(120): Homolog of NCBI NO: 34908122 NR Description: P0031D11.19 [Oryza sativa (japonica
  misc_feature (31)..(120): Homolog of NCBI NO: 30420734 NR Description: zinc finger transcription factor ZFP19
  misc_feature (7)..(120): Homolog of NCBI NO: 18652814 NR Description: C2H2 zinc finger protein [Oryza sativa]
  misc_feature (14)..(118): Homolog of NCBI NO: 29124140 NR Description: putative Cys2/His2 zinc-finger protein
  misc_feature (2)..(132): Homolog of NCBI NO: 29124117 NR Description: putative Cys2/His2 zinc-finger protein
MKQCRDEAQEVPLSLSLSLGVMADRSKKQRRGGADGEFVCKTCSRAFPSFQALGGHRTSHLRGRHGLALGLTSGSDQPGTKKTTDQKQAHQCHVCGLEFEMGQAMGGHMRRHREQEAATTAQAPPVLLQLFV

SEQ ID NO: 51811 - protein, 111 aa, Glycine max
  peptide (1)..(111): Ceres Seq. ID no. 12609901
  misc_feature (17)..(39): Pfam Name: Zinc finger, C2H2 type Pfam Description: Zinc finger, C2H2 type
  misc_feature (17)..(95): Homolog of NCBI NO: 15231333 NR Description: zinc finger -like protein; protein id:
  misc_feature (1)..(92): Homolog of NCBI NO: 29124132 NR Description: putative Cys2/His2 zinc-finger protein
  misc_feature (1)..(98): Homolog of NCBI NO: 2346976 NR Description: ZPT2-13 [Petunia x hybrida]
  misc_feature (1)..(106): Homolog of NCBI NO: 2346974 NR Description: ZPT2-12 [Petunia x hybrida]
  misc_feature (10)..(99): Homolog of NCBI NO: 34908110 NR Description: P0031D11.12 [Oryza sativa (japonica
  misc_feature (1)..(99): Homolog of NCBI NO: 34908122 NR Description: P0031D11.19 [Oryza sativa (japonica
  misc_feature (10)..(99): Homolog of NCBI NO: 30420734 NR Description: zinc finger transcription factor ZFP19
  misc_feature (1)..(99): Homolog of NCBI NO: 18652814 NR Description: C2H2 zinc finger protein [Oryza sativa]
  misc_feature (1)..(97): Homolog of NCBI NO: 29124140 NR Description: putative Cys2/His2 zinc-finger protein
  misc_feature (1)..(111): Homolog of NCBI NO: 29124117 NR Description: putative Cys2/His2 zinc-finger protein
MADRSKKQRRGGADGEFVCKTCSRAFPSFQALGGHRTSHLRGRHGLALGLTSGSDQPGTKKTTDQKQAHQCHVCGLEFEMGQAMGGHMRRHREQEAATTAQAPPVLLQLFV

SEQ ID NO: 51812 - DNA, 1296 bp, Glycine max
  misc_feature (1)..(1296): Ceres Seq. ID no. 13581947
gacctttccaccacgcccccgtcctctttcccttcccgtcgctcgctccccccctacccgaaccttctcgactccctcttcgcatggccgacgccaaggccgaggcggcgaggcaggcgccgcagtcctcccaggaggaggaggaggactggaaggaggccgagggggacgtcgaggtcgcggacaggtccacgagcaatggcggcggcgccggcgaggggatcacggacaggccgatccgggtctacgccgacggcatctacgacctcttccacttcggccacgcgcgctcgctcgagcaggccaagaaatcgttccctaatgcatatcttcttgtcgggtgctgcaatgatgagctgacacatcaatacaaaggaagaactgtcatgacagaggacgagagatatgaatcacttcgccattgcaagtgggttgatgaagtcattcctgacgctccgtgggtagtaacagaagagttcttgaacaagcataacatcgattttgtcgcacatgattctctgccgtatcatgatgctagtggagctagtaatgatgtctatgaatttgtaaaaaagcttggtaaatttaaggagaccaagcgcacagaaggaatatcaacctcagacattataatgaggattgttaaagattataatgagtatgttatgcgcaatctggccagggggtacagcagaaatgatcttggtgtcagctatgtcaaggaaaaacgactaagagttaatatgggattgaaaaccctgcgtgacaaagtgaagcagcaccaagaaaaagtaggggagaagtggagtacggtggcaaaactccaagaagagtgggttgaaaacgcagatcgctgggttgttggttttctagagaaattcgaggaaggttgccattcaatgggaactgccattaaggaaagaatccaggaaaggctgaaggaggcgcagtctagggacttcagccttctacaatacgacagtgacgactttgacgactttgaagaagaagacgatgaagttgccaaagatgccaaatacgtgaaagaatagcgccactgtaaaattttacgtcaaaagtataatacaggcatgcaatgcatgttaacagtcttcgtcaaccacaatccttcaccatgtatctgtccctttgattgtgagcttcactgtcaaggtagatctgcgtgctgtgtttgtagctgtacttgatgtttttctaggcattagcgtacgctcatgtaaaagttctactgtgaggcataacactctttatttggaggatatcgatttcaattcc

SEQ ID NO: 51813 - protein, 349 aa, Glycine max
  peptide (1)..(349): Ceres Seq. ID no. 13581948
  misc_feature (69)..(343): Homolog of NCBI NO: 30683147 NR Description: cholinephosphate cytidylyltransferase
  misc_feature (74)..(318): Homolog of NCBI NO: 37537166 NR Description: putative cholinephosphate cytidylyltransferase
  misc_feature (75)..(343): Homolog of NCBI NO: 1236978 NR Description: CTP:phosphocholine cytidylyltransferase
  misc_feature (69)..(343): Homolog of NCBI NO: 21668498 NR Description: CTP:phosphorylcholine cytidylyltransferase
  misc_feature (66)..(336): Homolog of NCBI NO: 7488485 NR Description: probable choline-phosphate cytidylyltransferase
  misc_feature (76)..(343): Homolog of NCBI NO: 7488791 NR Description: choline-phosphate cytidylyltransferase (EC
  misc_feature (75)..(343): Homolog of NCBI NO: 15225218 NR Description: cholinephosphate cytidylyltransferase
  misc_feature (66)..(336): Homolog of NCBI NO: 7488446 NR Description: choline-phosphate cytidylyltransferase (EC
  misc_feature (75)..(343): Homolog of NCBI NO: 7488483 NR Description: probable choline-phosphate cytidylyltransferase
  misc_feature (75)..(343): Homolog of NCBI NO: 7488484 NR Description: probable choline-phosphate cytidylyltransferase
PFHHAPVLFPFPSLAPPLPEPSRLPLRMADAKAEAARQAPQSSQEEEEDWKEAEGDVEVADRSTSNGGGAGEGITDRPIRVYADGIYDLFHFGHARSLEQAKKSFPNAYLLVGCCNDELTHQYKGRTVMTEDERYESLRHCKWVDEVIPDAPWVVTEEFLNKHNIDFVAHDSLPYHDASGASNDVYEFVKKLGKFKETKRTEGISTSDIIMRIVKDYNEYVMRNLARGYSRNDLGVSYVKEKRLRVNMGLKTLRDKVKQHQEKVGEKWSTVAKLQEEWVENADRWVVGFLEKFEEGCHSMGTAIKERIQERLKEAQSRDFSLLQYDSDDFDDFEEEDDEVAKDAKYVKE

SEQ ID NO: 51814 - protein, 322 aa, Glycine max
  peptide (1)..(322): Ceres Seq. ID no. 13581949
  misc_feature (42)..(316): Homolog of NCBI NO: 30683147 NR Description: cholinephosphate cytidylyltransferase
  misc_feature (47)..(291): Homolog of NCBI NO: 37537166 NR Description: putative cholinephosphate cytidylyltransferase
  misc_feature (48)..(316): Homolog of NCBI NO: 1236978 NR Description: CTP:phosphocholine cytidylyltransferase
  misc_feature (42)..(316): Homolog of NCBI NO: 21668498 NR Description: CTP:phosphorylcholine cytidylyltransferase
  misc_feature (39)..(309): Homolog of NCBI NO: 7488485 NR Description: probable choline-phosphate cytidylyltransferase
  misc_feature (49)..(316): Homolog of NCBI NO: 7488791 NR Description: choline-phosphate cytidylyltransferase (EC
  misc_feature (48)..(316): Homolog of NCBI NO: 15225218 NR Description: cholinephosphate cytidylyltransferase
  misc_feature (39)..(309): Homolog of NCBI NO: 7488446 NR Description: choline-phosphate cytidylyltransferase (EC
  misc_feature (48)..(316): Homolog of NCBI NO: 7488483 NR Description: probable choline-phosphate cytidylyltransferase
  misc_feature (48)..(316): Homolog of NCBI NO: 7488484 NR Description: probable choline-phosphate cytidylyltransferase
MADAKAEAARQAPQSSQEEEEDWKEAEGDVEVADRSTSNGGGAGEGITDRPIRVYADGIYDLFHFGHARSLEQAKKSFPNAYLLVGCCNDELTHQYKGRTVMTEDERYESLRHCKWVDEVIPDAPWVVTEEFLNKHNIDFVAHDSLPYHDASGASNDVYEFVKKLGKFKETKRTEGISTSDIIMRIVKDYNEYVMRNLARGYSRNDLGVSYVKEKRLRVNMGLKTLRDKVKQHQEKVGEKWSTVAKLQEEWVENADRWVVGFLEKFEEGCHSMGTAIKERIQERLKEAQSRDFSLLQYDSDDFDDFEEEDDEVAKDAKYVKE

SEQ ID NO: 51815 - protein, 221 aa, Glycine max
  peptide (1)..(221): Ceres Seq. ID no. 13581950
  misc_feature (1)..(215): Homolog of NCBI NO: 30683147 NR Description: cholinephosphate cytidylyltransferase
  misc_feature (1)..(190): Homolog of NCBI NO: 37537166 NR Description: putative cholinephosphate cytidylyltransferase
  misc_feature (1)..(215): Homolog of NCBI NO: 1236978 NR Description: CTP:phosphocholine cytidylyltransferase
  misc_feature (1)..(215): Homolog of NCBI NO: 21668498 NR Description: CTP:phosphorylcholine cytidylyltransferase
  misc_feature (1)..(208): Homolog of NCBI NO: 7488485 NR Description: probable choline-phosphate cytidylyltransferase
  misc_feature (1)..(215): Homolog of NCBI NO: 7488791 NR Description: choline-phosphate cytidylyltransferase (EC
  misc_feature (1)..(215): Homolog of NCBI NO: 15225218 NR Description: cholinephosphate cytidylyltransferase
  misc_feature (1)..(208): Homolog of NCBI NO: 7488446 NR Description: choline-phosphate cytidylyltransferase (EC
  misc_feature (1)..(215): Homolog of NCBI NO: 7488483 NR Description: probable choline-phosphate cytidylyltransferase
  misc_feature (1)..(215): Homolog of NCBI NO: 7488484 NR Description: probable choline-phosphate cytidylyltransferase
MTEDERYESLRHCKWVDEVIPDAPWVVTEEFLNKHNIDFVAHDSLPYHDASGASNDVYEFVKKLGKFKETKRTEGISTSDIIMRIVKDYNEYVMRNLARGYSRNDLGVSYVKEKRLRVNMGLKTLRDKVKQHQEKVGEKWSTVAKLQEEWVENADRWVVGFLEKFEEGCHSMGTAIKERIQERLKEAQSRDFSLLQYDSDDFDDFEEEDDEVAKDAKYVKE

SEQ ID NO: 51816 - DNA, 1296 bp, Glycine max
  misc_feature (1)..(1296): Ceres Seq. ID no. 12609902
atcgcttttcgaatttttttatttattttctcttgaaattataaaatacaaaaagtcaaagacttttacttactttcgtcgcctctctctgaatcgatcttttcggacggagttttccatctcctcaactctcacagttaaacaactgtgtctctatgtgttcgatggccaccaccgtcgcagcaacaaaactcacctccttgaaagccaccgccgggaagctcggttaccgtgagatctgccaggtccgtcaatggtctccgcttcagtctgcgatgcctcatttcggtatgctgcgatgtagacagccatttgcaacctccactgttgtgaacgctcaagctcaagctcaagctcaagccacgggtgttgagcaaacaacgacagaagaagaagaagctgttccaaaagtggaatctccagttgtggttgtgactggtgcctctcgaggcattggtaaagctattgctctttccttgggcaaagctggctgtaaggtcttggtgaattatgctaggtctgcaaaggaggctgaagaagtttccaaacagattgaagaatatggtggccaggctattacttttggaggtgatgtctcgaaagaggctgatgtggatgccatgatgaaaaccgctgttgataaatggggaaccattgacgtcgtggttaacaatgcaggaattaccagggataccttgttgattcgaatgaagaaatctcaatgggatgaagtgatggatttgaatctcactggagtgtttctctgttcccaggcagcaacaaagatcatgatgaagaagagaaagggaaggatcatcaacatagcatcagttgttggtctcattggtaacattgggcaagcaaactacgctgcagctaaagctggagttattgggttttccaagactgccgccagagagggtgctagcaggaatataaatgtgaacgtggtttgccctggattcattgcatctgacatgactgccaagcttggagaagacatggaaaagaaaatcttgggaacaatcccattaggacgatatggacaaccagaagatgtggctggcttggtcgaattcttggctctcagtccggcagccagttacataactggacagacattcaccatcgatggaggtattgccatctaggcctttaagcaaaaaaaaaaaattggtaaaacagacaaagttgagttgtttctggcacttggtcggatttctgttttgcggtttctgtttggagagagagatctataactcatttgcttaaactcagttacataataatcttatt

SEQ ID NO: 51817 - protein, 331 aa, Glycine max
  peptide (1)..(331): Ceres Seq. ID no. 12609903
  misc_feature (4)..(331): Homolog of NCBI NO: 119791 NR Description: 3-oxoacyl-
  misc_feature (88)..(331): Homolog of NCBI NO: 13096234 NR Description: Chain A, The X-Ray Structure Of Beta-Keto Acyl
  misc_feature (75)..(331): Homolog of NCBI NO: 14422253 NR Description: 3-oxyacyl-[acyl carrier protein] reductase
  misc_feature (4)..(331): Homolog of NCBI NO: 25283414 NR Description: protein F21J9.2 [imported] - Arabidopsis thaliana
  misc_feature (4)..(331): Homolog of NCBI NO: 99753 NR Description: 3-oxoacyl-
  misc_feature (4)..(331): Homolog of NCBI NO: 18395461 NR Description: putative 3-oxoacyl (acyl-carrier protein)
  misc_feature (4)..(331): Homolog of NCBI NO: 14422251 NR Description: 3-oxyacyl-[acyl carrier protein] reductase
  misc_feature (4)..(331): Homolog of NCBI NO: 14422263 NR Description: beta-oxyacyl-[acyl-carrier protein] reductase
  misc_feature (4)..(331): Homolog of NCBI NO: 14422249 NR Description: 3-oxyacyl-[acyl carrier protein] reductase
  misc_feature (6)..(331): Homolog of NCBI NO: 14422247 NR Description: 3-oxyacyl-[acyl-carrier protein] reductase
MCSMATTVAATKLTSLKATAGKLGYREICQVRQWSPLQSAMPHFGMLRCRQPFATSTVVNAQAQAQAQATGVEQTTTEEEEAVPKVESPVVVVTGASRGIGKAIALSLGKAGCKVLVNYARSAKEAEEVSKQIEEYGGQAITFGGDVSKEADVDAMMKTAVDKWGTIDVVVNNAGITRDTLLIRMKKSQWDEVMDLNLTGVFLCSQAATKIMMKKRKGRIINIASVVGLIGNIGQANYAAAKAGVIGFSKTAAREGASRNINVNVVCPGFIASDMTAKLGEDMEKKILGTIPLGRYGQPEDVAGLVEFLALSPAASYITGQTFTIDGGIAI

SEQ ID NO: 51818 - protein, 328 aa, Glycine max
  peptide (1)..(328): Ceres Seq. ID no. 12609904
  misc_feature (1)..(328): Homolog of NCBI NO: 119791 NR Description: 3-oxoacyl-
  misc_feature (85)..(328): Homolog of NCBI NO: 13096234 NR Description: Chain A, The X-Ray Structure Of Beta-Keto Acyl
  misc_feature (72)..(328): Homolog of NCBI NO: 14422253 NR Description: 3-oxyacyl-[acyl carrier protein] reductase
  misc_feature (1)..(328): Homolog of NCBI NO: 25283414 NR Description: protein F21J9.2 [imported] - Arabidopsis thaliana
  misc_feature (1)..(328): Homolog of NCBI NO: 99753 NR Description: 3-oxoacyl-
  misc_feature (1)..(328): Homolog of NCBI NO: 18395461 NR Description: putative 3-oxoacyl (acyl-carrier protein)
  misc_feature (1)..(328): Homolog of NCBI NO: 14422251 NR Description: 3-oxyacyl-[acyl carrier protein] reductase
  misc_feature (1)..(328): Homolog of NCBI NO: 14422263 NR Description: beta-oxyacyl-[acyl-carrier protein] reductase
  misc_feature (1)..(328): Homolog of NCBI NO: 14422249 NR Description: 3-oxyacyl-[acyl carrier protein] reductase
  misc_feature (3)..(328): Homolog of NCBI NO: 14422247 NR Description: 3-oxyacyl-[acyl-carrier protein] reductase
MATTVAATKLTSLKATAGKLGYREICQVRQWSPLQSAMPHFGMLRCRQPFATSTVVNAQAQAQAQATGVEQTTTEEEEAVPKVESPVVVVTGASRGIGKAIALSLGKAGCKVLVNYARSAKEAEEVSKQIEEYGGQAITFGGDVSKEADVDAMMKTAVDKWGTIDVVVNNAGITRDTLLIRMKKSQWDEVMDLNLTGVFLCSQAATKIMMKKRKGRIINIASVVGLIGNIGQANYAAAKAGVIGFSKTAAREGASRNINVNVVCPGFIASDMTAKLGEDMEKKILGTIPLGRYGQPEDVAGLVEFLALSPAASYITGQTFTIDGGIAI

SEQ ID NO: 51819 - protein, 291 aa, Glycine max
  peptide (1)..(291): Ceres Seq. ID no. 12609905
  misc_feature (1)..(291): Homolog of NCBI NO: 119791 NR Description: 3-oxoacyl-
  misc_feature (48)..(291): Homolog of NCBI NO: 13096234 NR Description: Chain A, The X-Ray Structure Of Beta-Keto Acyl
  misc_feature (35)..(291): Homolog of NCBI NO: 14422253 NR Description: 3-oxyacyl-[acyl carrier protein] reductase
  misc_feature (1)..(291): Homolog of NCBI NO: 25283414 NR Description: protein F21J9.2 [imported] - Arabidopsis thaliana
  misc_feature (1)..(291): Homolog of NCBI NO: 99753 NR Description: 3-oxoacyl-
  misc_feature (1)..(291): Homolog of NCBI NO: 18395461 NR Description: putative 3-oxoacyl (acyl-carrier protein)
  misc_feature (1)..(291): Homolog of NCBI NO: 14422251 NR Description: 3-oxyacyl-[acyl carrier protein] reductase
  misc_feature (1)..(291): Homolog of NCBI NO: 14422263 NR Description: beta-oxyacyl-[acyl-carrier protein] reductase
  misc_feature (1)..(291): Homolog of NCBI NO: 14422249 NR Description: 3-oxyacyl-[acyl carrier protein] reductase
  misc_feature (1)..(291): Homolog of NCBI NO: 14422247 NR Description: 3-oxyacyl-[acyl-carrier protein] reductase
MPHFGMLRCRQPFATSTVVNAQAQAQAQATGVEQTTTEEEEAVPKVESPVVVVTGASRGIGKAIALSLGKAGCKVLVNYARSAKEAEEVSKQIEEYGGQAITFGGDVSKEADVDAMMKTAVDKWGTIDVVVNNAGITRDTLLIRMKKSQWDEVMDLNLTGVFLCSQAATKIMMKKRKGRIINIASVVGLIGNIGQANYAAAKAGVIGFSKTAAREGASRNINVNVVCPGFIASDMTAKLGEDMEKKILGTIPLGRYGQPEDVAGLVEFLALSPAASYITGQTFTIDGGIAI

SEQ ID NO: 51820 - DNA, 631 bp, Glycine max
  misc_feature (1)..(631): Ceres Seq. ID no. 12609907
atatcattatacacaatcgtaggatctctccctctctcttgctctctccatattctgagattgctatatatataggtatttcttttgcagacttcctatgaagcaaacaaatgctcatatggagaggcaaattatgaacaagagaaaacgagttttttctgtccaagaaaagaagaacccgaaggcagtctttgcgaaaagatacgtgagtcacttggttccagctctcaagaagatcaacatgaacaaaccctcttcgcaaatcaacagcaaaagtttcgagcaaaccgtgaaacatgaagtagacatggctttggctttgtctgctcaagaattcgcgtggagccgtttcttgcaacacaagctattatcttcccctcatgaagatcctagttactcttccaagattctagaaacatctagctgtaaacaagacggcaaagaaggagcagagataaagaagaaactgaaggaattgcaaaagcttgtgccaggaggagaagagctgaatatggaggagatattgagtgaggtcggaagctacattgtatgtcttgagttgcagatgattgttctaaaatcacttgttcaagataacatttcttgattattatataattaaatgtttcat

SEQ ID NO: 51821 - protein, 169 aa, Glycine max
  peptide (1)..(169): Ceres Seq. ID no. 12609908
  misc_feature (36)..(169): Homolog of NCBI NO: 15224208 NR Description: unknown protein
  misc_feature (8)..(167): Homolog of NCBI NO: 15234651 NR Description: hypothetical protein; protein id: At4g30180.1
MKQTNAHMERQIMNKRKRVFSVQEKKNPKAVFAKRYVSHLVPALKKINMNKPSSQINSKSFEQTVKHEVDMALALSAQEFAWSRFLQHKLLSSPHEDPSYSSKILETSSCKQDGKEGAEIKKKLKELQKLVPGGEELNMEEILSEVGSYIVCLELQMIVLKSLVQDNIS

SEQ ID NO: 51822 - protein, 162 aa, Glycine max
  peptide (1)..(162): Ceres Seq. ID no. 12609909
  misc_feature (29)..(162): Homolog of NCBI NO: 15224208 NR Description: unknown protein
  misc_feature (1)..(160): Homolog of NCBI NO: 15234651 NR Description: hypothetical protein; protein id: At4g30180.1
MERQIMNKRKRVFSVQEKKNPKAVFAKRYVSHLVPALKKINMNKPSSQINSKSFEQTVKHEVDMALALSAQEFAWSRFLQHKLLSSPHEDPSYSSKILETSSCKQDGKEGAEIKKKLKELQKLVPGGEELNMEEILSEVGSYIVCLELQMIVLKSLVQDNIS

SEQ ID NO: 51823 - protein, 157 aa, Glycine max
  peptide (1)..(157): Ceres Seq. ID no. 12609910
  misc_feature (24)..(157): Homolog of NCBI NO: 15224208 NR Description: unknown protein
  misc_feature (1)..(155): Homolog of NCBI NO: 15234651 NR Description: hypothetical protein; protein id: At4g30180.1
MNKRKRVFSVQEKKNPKAVFAKRYVSHLVPALKKINMNKPSSQINSKSFEQTVKHEVDMALALSAQEFAWSRFLQHKLLSSPHEDPSYSSKILETSSCKQDGKEGAEIKKKLKELQKLVPGGEELNMEEILSEVGSYIVCLELQMIVLKSLVQDNIS

SEQ ID NO: 51824 - DNA, 854 bp, Glycine max
  misc_feature (1)..(854): Ceres Seq. ID no. 15172913
gcgggcaccaacaaaccaaagctctccctcccgctgtcccgatcactctcccttccaggaagcttggaccgaaggaaggagctgagaggagcccatgggggaattctccaaggaatcttgcccttctgtgaagaacattttgctattggattctgaggggaagcgtgttgctgtgaagtacttctcggatgattggccaaataacgcatctaggttgacctttgaaaagtccatttttactaaaactctgaagacaaatgcacgctccgaagctgagataacattgcttgatggttttattgttgtttacaaatttgtacaagacctacactttttcgtcactgccggagatgatgagaatgagctcatcatagcaaatgtgctacagggttttgctgattcggttggtcttctactcaggggtgatgtcgagaagaggactgcacttgagaacttggacttgatacttctctgcattgatgagattattgatggcggcataattcttgaaacagatgcgaacaccattgcggggaaggttgcaaccaatgctgctgacggctctgttcccttctctgagcagacaatatctcaagctctggccacagccagggaacactttgcaagatctcttctgaaatgagaagccgccgtttcttctttcacccctgtgtgttcgaggttgggctactatgctaggcctggcagcggtcacttaaccaaaagcgcaactgtggcagacagatgtgtctggattattcttaaatgctatgtaataccattttcttgttaaatgcatgctgtgtatcttacattttctggaggtatagagaaataatttttgaagttgatcc

SEQ ID NO: 51825 - protein, 182 aa, Glycine max
  peptide (1)..(182): Ceres Seq. ID no. 15172914
  misc_feature (11)..(153): Pfam Name: Clathrin adaptor complex small chain Pfam Description: Clathrin adaptor complex small chain
  misc_feature (18)..(182): Homolog of NCBI NO: 7259350 NR Description: nonclathrin coat protein zeta2-COP [Oryza sativa]
  misc_feature (1)..(182): Homolog of NCBI NO: 7380908 NR Description: nonclathrin coat protein zeta2-COP [Zea mays]
MGEFSKESCPSVKNILLLDSEGKRVAVKYFSDDWPNNASRLTFEKSIFTKTLKTNARSEAEITLLDGFIVVYKFVQDLHFFVTAGDDENELIIANVLQGFADSVGLLLRGDVEKRTALENLDLILLCIDEIIDGGIILETDANTIAGKVATNAADGSVPFSEQTISQALATAREHFARSLLK

SEQ ID NO: 51826 - DNA, 721 bp, Glycine max
  misc_feature (1)..(721): Ceres Seq. ID no. 15178067
atttttcttcttagcatacaatgaatcacaaggcacctagtttttttctggggatggatgtgaagagaatcatgggtggtgatagagatgggaacaccaattgggtgattaaggaagatggtgaagaagatagcaatgattcatcatccattggactcaactcaatggactctatgtgctcgtcttcttcatcagagctgagcgaggacgcttcatcttcaacatcatcaacacattcaaatggacctttgtttgaattatcagacctcatgagccacctccctatgaagagagggctatctatgttctatcaagggaaggcccagtctttcacttctttagcaagggtggagagcatagaagatcttcccaagaaaggcataccttatagaaagagaacgaaatcatgcaagagttttgggggaggcttggatagtcagagaatattgtgctgtccaaaggctacaatatcaaagaaaacttcaagagtgtcttttgcatctgtactaagcaaaagaggaagtttcctaggagggtctagatcttccattgcagttcaacacaagaacttctgaaattcagactgttaaaagttattgcttatttcatgtacaaaatccggaaaattttgagtcctgcagcttcagtttattgagtcaaagccatatgatcaattagctacatatttgagattcattattcgtttgttttccatggtggt

SEQ ID NO: 51827 - protein, 184 aa, Glycine max
  peptide (1)..(184): Ceres Seq. ID no. 15178068
  misc_feature (38)..(158): Homolog of NCBI NO: 9294810 NR Description: MTD1 [Medicago truncatula]
  misc_feature (31)..(168): Homolog of NCBI NO: 20159729 NR Description: unknown cold induced protein [Deschampsia
  misc_feature (29)..(168): Homolog of NCBI NO: 34909358 NR Description: P0638D12.11 [Oryza sativa (japonica
  misc_feature (32)..(135): Homolog of NCBI NO: 38346806 NR Description: OSJNBa0088A01.13 [Oryza sativa (japonica
  misc_feature (36)..(164): Homolog of NCBI NO: 15241248 NR Description: expressed protein [Arabidopsis thaliana]
MNHKAPSFFLGMDVKRIMGGDRDGNTNWVIKEDGEEDSNDSSSIGLNSMDSMCSSSSSELSEDASSSTSSTHSNGPLFELSDLMSHLPMKRGLSMFYQGKAQSFTSLARVESIEDLPKKGIPYRKRTKSCKSFGGGLDSQRILCCPKATISKKTSRVSFASVLSKRGSFLGGSRSSIAVQHKNF

SEQ ID NO: 51828 - protein, 173 aa, Glycine max
  peptide (1)..(173): Ceres Seq. ID no. 15178069
  misc_feature (27)..(147): Homolog of NCBI NO: 9294810 NR Description: MTD1 [Medicago truncatula]
  misc_feature (20)..(157): Homolog of NCBI NO: 20159729 NR Description: unknown cold induced protein [Deschampsia
  misc_feature (18)..(157): Homolog of NCBI NO: 34909358 NR Description: P0638D12.11 [Oryza sativa (japonica
  misc_feature (21)..(124): Homolog of NCBI NO: 38346806 NR Description: OSJNBa0088A01.13 [Oryza sativa (japonica
  misc_feature (25)..(153): Homolog of NCBI NO: 15241248 NR Description: expressed protein [Arabidopsis thaliana]
MDVKRIMGGDRDGNTNWVIKEDGEEDSNDSSSIGLNSMDSMCSSSSSELSEDASSSTSSTHSNGPLFELSDLMSHLPMKRGLSMFYQGKAQSFTSLARVESIEDLPKKGIPYRKRTKSCKSFGGGLDSQRILCCPKATISKKTSRVSFASVLSKRGSFLGGSRSSIAVQHKNF

SEQ ID NO: 51829 - protein, 167 aa, Glycine max
  peptide (1)..(167): Ceres Seq. ID no. 15178070
  misc_feature (21)..(141): Homolog of NCBI NO: 9294810 NR Description: MTD1 [Medicago truncatula]
  misc_feature (14)..(151): Homolog of NCBI NO: 20159729 NR Description: unknown cold induced protein [Deschampsia
  misc_feature (12)..(151): Homolog of NCBI NO: 34909358 NR Description: P0638D12.11 [Oryza sativa (japonica
  misc_feature (15)..(118): Homolog of NCBI NO: 38346806 NR Description: OSJNBa0088A01.13 [Oryza sativa (japonica
  misc_feature (19)..(147): Homolog of NCBI NO: 15241248 NR Description: expressed protein [Arabidopsis thaliana]
MGGDRDGNTNWVIKEDGEEDSNDSSSIGLNSMDSMCSSSSSELSEDASSSTSSTHSNGPLFELSDLMSHLPMKRGLSMFYQGKAQSFTSLARVESIEDLPKKGIPYRKRTKSCKSFGGGLDSQRILCCPKATISKKTSRVSFASVLSKRGSFLGGSRSSIAVQHKNF

SEQ ID NO: 51830 - DNA, 1050 bp, Glycine max
  misc_feature (1)..(1050): Ceres Seq. ID no. 13638673
atctatctggagtctacctaatcccctccccggcactccccgcctgacaaccgcggccatggcgtgcgccttctccgcctccaccgtgtccacggcggccgcgctcgtcgcgtccccgaagccagccggggcgccgcagtgcctgtcgtttccccgcgccatcgcaggcgccgccgccaggccttcccgcctcgccgccgccagctcgaggacggccagggcccgcagcttcgtcgcccgcgcctcagcggagtacgacctgccgctggtggggaacaaagcaccggacttcgccgcggaggccgtgttcgaccaggagttcatcaacgtcaagctatctgattacattgggaagaagtatgtgattcttttcttctaccctctggacttcaccttcgtctgcccaactgagattacggctttcagcgacagacatgaggagttcgagaagataaacactgaaattcttggtgtttcagttgatagtgtgttttcccatcttgcatgggtgcagacagagaggaaatctggtggacttggtgatctgaaatatccgctggtttctgacgtcaccaaatcaatctcaaagtcttttggtgtattgatccctgatcagggaattgctctgagaggattattcatcattgacaaggagggtgtgattcagcattccactattaacaaccttggtattggccgtagtgtggatgagaccttgagaacccttcaggctctgcaatacgtccaagaaaacccagacgaggtctgcccggcgggatggaaacctggggaaaagtcgatgaagcctgaccccaagggcagcaaggagtacttcgctgctatctagatgtgtccttgtcctttgcactcgctgtcagttttgtcatggccgtttcttggttacatgtgtttttgtgacccgagttgtagttatcatgcgtacaattgactctgtaatttctgcaataagggtttgtctgtgtgtggattttccctgctccaatttggaaagaacaatacaagattggaaataaaatcttatcttatgtc

SEQ ID NO: 51831 - protein, 281 aa, Glycine max
  peptide (1)..(281): Ceres Seq. ID no. 13638674
  misc_feature (90)..(241): Pfam Name: AhpC/TSA family Pfam Description: AhpC/TSA family
  misc_feature (26)..(281): Homolog of NCBI NO: 15229806 NR Description: 2-cys peroxiredoxin BAS1 precursor
  misc_feature (18)..(281): Homolog of NCBI NO: 21553667 NR Description: 2-cys peroxiredoxin-like protein [Arabidopsis
  misc_feature (18)..(281): Homolog of NCBI NO: 13265490 NR Description: AT5g06290 [Arabidopsis thaliana]
  misc_feature (20)..(281): Homolog of NCBI NO: 21912927 NR Description: thioredoxin peroxidase [Nicotiana tabacum]
  misc_feature (18)..(281): Homolog of NCBI NO: 9758409 NR Description: 2-cys peroxiredoxin-like protein [Arabidopsis
  misc_feature (15)..(281): Homolog of NCBI NO: 18415155 NR Description: 2-cys peroxiredoxin-related protein [Arabidopsis
  misc_feature (72)..(281): Homolog of NCBI NO: 2829687 NR Description: 2-cys peroxiredoxin BAS1, chloroplast precursor
  misc_feature (72)..(281): Homolog of NCBI NO: 2499477 NR Description: 2-cys peroxiredoxin BAS1, chloroplast precursor
  misc_feature (72)..(281): Homolog of NCBI NO: 1076722 NR Description: hypothetical protein - barley (fragment)
  misc_feature (20)..(281): Homolog of NCBI NO: 3328221 NR Description: thioredoxin peroxidase [Secale cereale]
SIWSLPNPLPGTPRLTTAAMACAFSASTVSTAAALVASPKPAGAPQCLSFPRAIAGAAARPSRLAAASSRTARARSFVARASAEYDLPLVGNKAPDFAAEAVFDQEFINVKLSDYIGKKYVILFFYPLDFTFVCPTEITAFSDRHEEFEKINTEILGVSVDSVFSHLAWVQTERKSGGLGDLKYPLVSDVTKSISKSFGVLIPDQGIALRGLFIIDKEGVIQHSTINNLGIGRSVDETLRTLQALQYVQENPDEVCPAGWKPGEKSMKPDPKGSKEYFAAI

SEQ ID NO: 51832 - protein, 262 aa, Glycine max
  peptide (1)..(262): Ceres Seq. ID no. 13638675
  misc_feature (71)..(222): Pfam Name: AhpC/TSA family Pfam Description: AhpC/TSA family
  misc_feature (7)..(262): Homolog of NCBI NO: 15229806 NR Description: 2-cys peroxiredoxin BAS1 precursor
  misc_feature (1)..(262): Homolog of NCBI NO: 21553667 NR Description: 2-cys peroxiredoxin-like protein [Arabidopsis
  misc_feature (1)..(262): Homolog of NCBI NO: 13265490 NR Description: AT5g06290 [Arabidopsis thaliana]
  misc_feature (1)..(262): Homolog of NCBI NO: 21912927 NR Description: thioredoxin peroxidase [Nicotiana tabacum]
  misc_feature (1)..(262): Homolog of NCBI NO: 9758409 NR Description: 2-cys peroxiredoxin-like protein [Arabidopsis
  misc_feature (1)..(262): Homolog of NCBI NO: 18415155 NR Description: 2-cys peroxiredoxin-related protein [Arabidopsis
  misc_feature (53)..(262): Homolog of NCBI NO: 2829687 NR Description: 2-cys peroxiredoxin BAS1, chloroplast precursor
  misc_feature (53)..(262): Homolog of NCBI NO: 2499477 NR Description: 2-cys peroxiredoxin BAS1, chloroplast precursor
  misc_feature (53)..(262): Homolog of NCBI NO: 1076722 NR Description: hypothetical protein - barley (fragment)
  misc_feature (1)..(262): Homolog of NCBI NO: 3328221 NR Description: thioredoxin peroxidase [Secale cereale]
MACAFSASTVSTAAALVASPKPAGAPQCLSFPRAIAGAAARPSRLAAASSRTARARSFVARASAEYDLPLVGNKAPDFAAEAVFDQEFINVKLSDYIGKKYVILFFYPLDFTFVCPTEITAFSDRHEEFEKINTEILGVSVDSVFSHLAWVQTERKSGGLGDLKYPLVSDVTKSISKSFGVLIPDQGIALRGLFIIDKEGVIQHSTINNLGIGRSVDETLRTLQALQYVQENPDEVCPAGWKPGEKSMKPDPKGSKEYFAAI

SEQ ID NO: 51833 - DNA, 731 bp, Glycine max
  misc_feature (1)..(731): Ceres Seq. ID no. 12609333
gcgcaaccagttactagcgagagatattcatcgatagataagctccttggtctactccatacgttccattccctccctcgagctaggtccgagccttcacttcgaccatggcctcgtcctccgcgctgatagcgctccttgtggtccttggctgcgctgcggcggcctccgcggccacgttcaccgtcggagatgggcaaggctggacgaccggcgccaattacgccacctgggccagtggcaagaccttcgcggttggagacaagctcgtgttcaactacgccagccaggcccacacagtgaccgaagtcaccaagagcgagtacgacgcctgctccagcaacgccaacggtgacaacagcggcgccaccaccatgaccctcaaagccggcgcgaactactacatctgcaccatcggcacccactgcgccgccggcatgaagctcgccgtcaccgccggcgactccagttccggttccggtacccccgcggcggggacgccacctaccaccccgtccgggtccggcggccaccgcatggaggtcggccccgttctcgcggccaccgctggcgtcctcctcaagctcgccctcttctgatccgccgatgattcgatgttggaaagtttcgtcgatcgttctatgtttgattctgacggccacgcacacgctagtttgtaccggacagtggttgcctgtgcttcctgatgtgatatgattggttggtttcgt

SEQ ID NO: 51834 - protein, 163 aa, Glycine max
  peptide (1)..(163): Ceres Seq. ID no. 12609334
  misc_feature (33)..(111): Pfam Name: Plastocyanin-like domain Pfam Description: Plastocyanin-like domain
  misc_feature (1)..(162): Homolog of NCBI NO: 28269428 NR Description: putative blue copper-binding protein
  misc_feature (2)..(160): Homolog of NCBI NO: 38636764 NR Description: putative blue copper binding protein
  misc_feature (1)..(158): Homolog of NCBI NO: 34900010 NR Description: P0039H02.23 [Oryza sativa (japonica
  misc_feature (3)..(135): Homolog of NCBI NO: 14140127 NR Description: uclacyanin 3-like protein [Oryza sativa]
  misc_feature (1)..(152): Homolog of NCBI NO: 25453522 NR Description: blue copper-binding protein II [imported] -
  misc_feature (7)..(139): Homolog of NCBI NO: 38346158 NR Description: OSJNBa0079A21.5 [Oryza sativa (japonica
  misc_feature (7)..(161): Homolog of NCBI NO: 10798754 NR Description: elicitor inducible gene Nt-SA1-1 [Nicotiana
  misc_feature (1)..(151): Homolog of NCBI NO: 7670832 NR Description: dicyanin [Lycopersicon esculentum]
  misc_feature (1)..(103): Homolog of NCBI NO: 3747044 NR Description: blue copper protein [Zea mays]
  misc_feature (1)..(139): Homolog of NCBI NO: 2493318 NR Description: Blue copper protein precursor
MASSSALIALLVVLGCAAAASAATFTVGDGQGWTTGANYATWASGKTFAVGDKLVFNYASQAHTVTEVTKSEYDACSSNANGDNSGATTMTLKAGANYYICTIGTHCAAGMKLAVTAGDSSSGSGTPAAGTPPTTPSGSGGHRMEVGPVLAATAGVLLKLALF

SEQ ID NO: 51835 - DNA, 986 bp, Glycine max
  misc_feature (1)..(986): Ceres Seq. ID no. 12609335
gccgcaagaatccaaaatcatcacagcagagagagagggaaagaggagagagaaagaggagagagagaccatggcctccgccgtcgtttgcaagggcgagggtgccgcgccggccagcctcctcaagtccgctgctcccgtggccttctgcccgctccgctcccccgccgtcaccgccgcccgctgcccgtacaacacccaggtcaaggaggtcagccgctacgacgacgacaacgacgacgaccgcgacctcgtcatccccagcttcttctcgcaggacgtgctcgacccgctcggcgcgccgaccagcatggcccgtctgctgtctctgatggaggacgtcgcaactaagaccggcggcctctcctccactgctggtgctggggcgtcgcggctcggacggtgggtggccaaggaggacgacgacgcggtgtacctcaaggtgccgatgccggggctgaccaaggagcacgtgaaggtgcgcgcggacaagaacatcctggtgatcgagggcgagggcgagaagcagccctgggacggcgacgacgactccgcggtgccaaagtacaaccgccgcatcgagatgcccgctgctgacgcgtacaagatggacaagatcaaggccgagatgaagaatggcgtgctctgggtcaccctgctcaaggtcaaggaggaggagcgcacggacgtcttccacgtcaaggtcgagtaggcagtgccgtcgtggtagtgctcatggaggatggccgacgcgagagtgtgagagacgccttgttgatgtgggcatgtttggtgtctttctccttgttttgcttcgttgatcgtcttggatccagtaggtagtggtctgatggtgaagttggtcgcgaactctgtcaaatttgctctagtttcggcatatgatgaacttgctttggtggtgaaattggtcatgaaattctgttgatttcctcaagtttggcatatgatgaactgatttggtggcg

SEQ ID NO: 51836 - protein, 236 aa, Glycine max
  peptide (1)..(236): Ceres Seq. ID no. 12609336
  misc_feature (64)..(235): Homolog of NCBI NO: 2326361 NR Description: hypothetical protein [Arabidopsis thaliana]
  misc_feature (64)..(236): Homolog of NCBI NO: 123564 NR Description: Small heat shock protein, chloroplast precursor
  misc_feature (89)..(236): Homolog of NCBI NO: 21554988 NR Description: mitochondrial heat shock 22 kd protein-like
  misc_feature (40)..(235): Homolog of NCBI NO: 2326354 NR Description: LMW heat shock protein [Arabidopsis thaliana]
  misc_feature (40)..(235): Homolog of NCBI NO: 15234969 NR Description: Arabidopsis mitochondrion-localized small heat
  misc_feature (64)..(236): Homolog of NCBI NO: 7159338 NR Description: LMW heat shock protein [Euphorbia esula]
  misc_feature (36)..(236): Homolog of NCBI NO: 7441310 NR Description: heat shock protein MTSHP precursor, mitochondrial
  misc_feature (24)..(236): Homolog of NCBI NO: 4138869 NR Description: small heat shock protein Hsp23.5 [Triticum
  misc_feature (43)..(236): Homolog of NCBI NO: 7441311 NR Description: heat shock protein hsp22 precursor, mitochondrial
  misc_feature (24)..(236): Homolog of NCBI NO: 4138871 NR Description: small heat shock protein Hsp23.6 [Triticum
PQESKIITAEREGKRREKEERETMASAVVCKGEGAAPASLLKSAAPVAFCPLRSPAVTAARCPYNTQVKEVSRYDDDNDDDRDLVIPSFFSQDVLDPLGAPTSMARLLSLMEDVATKTGGLSSTAGAGASRLGRWVAKEDDDAVYLKVPMPGLTKEHVKVRADKNILVIEGEGEKQPWDGDDDSAVPKYNRRIEMPAADAYKMDKIKAEMKNGVLWVTLLKVKEEERTDVFHVKVE

SEQ ID NO: 51837 - protein, 213 aa, Glycine max
  peptide (1)..(213): Ceres Seq. ID no. 12609337
  misc_feature (41)..(212): Homolog of NCBI NO: 2326361 NR Description: hypothetical protein [Arabidopsis thaliana]
  misc_feature (41)..(213): Homolog of NCBI NO: 123564 NR Description: Small heat shock protein, chloroplast precursor
  misc_feature (66)..(213): Homolog of NCBI NO: 21554988 NR Description: mitochondrial heat shock 22 kd protein-like
  misc_feature (17)..(212): Homolog of NCBI NO: 2326354 NR Description: LMW heat shock protein [Arabidopsis thaliana]
  misc_feature (17)..(212): Homolog of NCBI NO: 15234969 NR Description: Arabidopsis mitochondrion-localized small heat
  misc_feature (41)..(213): Homolog of NCBI NO: 7159338 NR Description: LMW heat shock protein [Euphorbia esula]
  misc_feature (13)..(213): Homolog of NCBI NO: 7441310 NR Description: heat shock protein MTSHP precursor, mitochondrial
  misc_feature (1)..(213): Homolog of NCBI NO: 4138869 NR Description: small heat shock protein Hsp23.5 [Triticum
  misc_feature (20)..(213): Homolog of NCBI NO: 7441311 NR Description: heat shock protein hsp22 precursor, mitochondrial
  misc_feature (1)..(213): Homolog of NCBI NO: 4138871 NR Description: small heat shock protein Hsp23.6 [Triticum
MASAVVCKGEGAAPASLLKSAAPVAFCPLRSPAVTAARCPYNTQVKEVSRYDDDNDDDRDLVIPSFFSQDVLDPLGAPTSMARLLSLMEDVATKTGGLSSTAGAGASRLGRWVAKEDDDAVYLKVPMPGLTKEHVKVRADKNILVIEGEGEKQPWDGDDDSAVPKYNRRIEMPAADAYKMDKIKAEMKNGVLWVTLLKVKEEERTDVFHVKVE

SEQ ID NO: 51838 - protein, 133 aa, Glycine max
  peptide (1)..(133): Ceres Seq. ID no. 12609338
  misc_feature (1)..(132): Homolog of NCBI NO: 2326361 NR Description: hypothetical protein [Arabidopsis thaliana]
  misc_feature (1)..(133): Homolog of NCBI NO: 123564 NR Description: Small heat shock protein, chloroplast precursor
  misc_feature (1)..(133): Homolog of NCBI NO: 21554988 NR Description: mitochondrial heat shock 22 kd protein-like
  misc_feature (1)..(132): Homolog of NCBI NO: 2326354 NR Description: LMW heat shock protein [Arabidopsis thaliana]
  misc_feature (1)..(132): Homolog of NCBI NO: 15234969 NR Description: Arabidopsis mitochondrion-localized small heat
  misc_feature (1)..(133): Homolog of NCBI NO: 7159338 NR Description: LMW heat shock protein [Euphorbia esula]
  misc_feature (1)..(133): Homolog of NCBI NO: 7441310 NR Description: heat shock protein MTSHP precursor, mitochondrial
  misc_feature (1)..(133): Homolog of NCBI NO: 4138869 NR Description: small heat shock protein Hsp23.5 [Triticum
  misc_feature (1)..(133): Homolog of NCBI NO: 7441311 NR Description: heat shock protein hsp22 precursor, mitochondrial
  misc_feature (1)..(133): Homolog of NCBI NO: 4138871 NR Description: small heat shock protein Hsp23.6 [Triticum
MARLLSLMEDVATKTGGLSSTAGAGASRLGRWVAKEDDDAVYLKVPMPGLTKEHVKVRADKNILVIEGEGEKQPWDGDDDSAVPKYNRRIEMPAADAYKMDKIKAEMKNGVLWVTLLKVKEEERTDVFHVKVE

SEQ ID NO: 51839 - DNA, 1022 bp, Glycine max
  misc_feature (1)..(1022): Ceres Seq. ID no. 15172903
catccaccacagcttagcagcaaccaccagtgcctcaaagactcttgatcaacaaactctagctgaccagtgctagctaagcttgctgcatagcaagcaatggggtactctaaaaacctagcggctggcctgttcgccatgctgttcctagctccggccgtcctggcatccgaccccgatcctcttcaggacttctgtgttgccgacctcgatggcagggcagtctcggtgaacgggcatccatgcaagcccatgtcggaggctggtgacgacttcctcttctcgtccaagctggccaaggccggcaacacgtccaccccgaatggctcggccgtgacggagctcgacgtggccgagtggcccggtacgaacacgctgggtgtgtccatgaaccgtgtggacttcgcgccgggaggcaccaacccgccgcacgtccacccgcgtgggaccgagatcggcatggtgatgaaaggtgagctcctcgttggaatcctcggcagcctcgactccggaaacaagctctactccagggtggtgcgtgctggagagacgttcctcatcccgcgcgggctcatgcacttccagttcaacgttggtaagacggaagcctacatggttgtctccttcaacagccagaaccccggcatcgttttcgtgccgctcactctcttcggttccaacccgccaatccccacgccggtgctcaccaaggcgctaaggatagaggccggggtcgtcgaacttctcaagtccaagttcgctggtgggtcttaatccctgggagcttgccctggaatgatcagtatataatttgatatatgcataccagtgaaatttaataattgttcagcataagacacgtattcaagcttctagctaagctcgcatgcagttgtaataagattgaataagttagcctcgcggtttagccttcagagccaatacgaggaatcgaaatgtactgctttttattgttgtgtttgttcttttcattgaacggaatatataattatcattttcgc

SEQ ID NO: 51840 - protein, 224 aa, Glycine max
  peptide (1)..(224): Ceres Seq. ID no. 15172904
  misc_feature (63)..(214): Pfam Name: Cupin Pfam Description: Cupin
  misc_feature (1)..(223): Homolog of NCBI NO: 21912430 NR Description: oxalate oxidase 4 [Lolium perenne]
  misc_feature (1)..(223): Homolog of NCBI NO: 21912428 NR Description: oxalate oxidase 2 [Lolium perenne]
  misc_feature (1)..(223): Homolog of NCBI NO: 22138786 NR Description: oxalate oxidase [Lolium perenne]
  misc_feature (1)..(224): Homolog of NCBI NO: 121131 NR Description: Oxalate oxidase GF-3.8 precursor (Germin GF-3.8)
  misc_feature (1)..(223): Homolog of NCBI NO: 11967814 NR Description: oxalate oxidase [Lolium perenne]
  misc_feature (1)..(224): Homolog of NCBI NO: 7447343 NR Description: germin homolog Ger3 - wheat
  misc_feature (1)..(223): Homolog of NCBI NO: 121129 NR Description: Oxalate oxidase GF-2.8 precursor (Germin GF-2.8)
  misc_feature (1)..(223): Homolog of NCBI NO: 1171937 NR Description: Oxalate oxidase 2 precursor (Germin)
  misc_feature (1)..(224): Homolog of NCBI NO: 2266668 NR Description: oxalate oxidase [Hordeum vulgare]
  misc_feature (1)..(210): Homolog of NCBI NO: 7447342 NR Description: germin homolog Ger1 - wheat
MGYSKNLAAGLFAMLFLAPAVLASDPDPLQDFCVADLDGRAVSVNGHPCKPMSEAGDDFLFSSKLAKAGNTSTPNGSAVTELDVAEWPGTNTLGVSMNRVDFAPGGTNPPHVHPRGTEIGMVMKGELLVGILGSLDSGNKLYSRVVRAGETFLIPRGLMHFQFNVGKTEAYMVVSFNSQNPGIVFVPLTLFGSNPPIPTPVLTKALRIEAGVVELLKSKFAGGS

SEQ ID NO: 51841 - protein, 211 aa, Glycine max
  peptide (1)..(211): Ceres Seq. ID no. 15172905
  misc_feature (50)..(201): Pfam Name: Cupin Pfam Description: Cupin
  misc_feature (1)..(210): Homolog of NCBI NO: 21912430 NR Description: oxalate oxidase 4 [Lolium perenne]
  misc_feature (1)..(210): Homolog of NCBI NO: 21912428 NR Description: oxalate oxidase 2 [Lolium perenne]
  misc_feature (1)..(210): Homolog of NCBI NO: 22138786 NR Description: oxalate oxidase [Lolium perenne]
  misc_feature (1)..(211): Homolog of NCBI NO: 121131 NR Description: Oxalate oxidase GF-3.8 precursor (Germin GF-3.8)
  misc_feature (1)..(210): Homolog of NCBI NO: 11967814 NR Description: oxalate oxidase [Lolium perenne]
  misc_feature (1)..(211): Homolog of NCBI NO: 7447343 NR Description: germin homolog Ger3 - wheat
  misc_feature (1)..(210): Homolog of NCBI NO: 121129 NR Description: Oxalate oxidase GF-2.8 precursor (Germin GF-2.8)
  misc_feature (1)..(210): Homolog of NCBI NO: 1171937 NR Description: Oxalate oxidase 2 precursor (Germin)
  misc_feature (1)..(211): Homolog of NCBI NO: 2266668 NR Description: oxalate oxidase [Hordeum vulgare]
  misc_feature (1)..(197): Homolog of NCBI NO: 7447342 NR Description: germin homolog Ger1 - wheat
MLFLAPAVLASDPDPLQDFCVADLDGRAVSVNGHPCKPMSEAGDDFLFSSKLAKAGNTSTPNGSAVTELDVAEWPGTNTLGVSMNRVDFAPGGTNPPHVHPRGTEIGMVMKGELLVGILGSLDSGNKLYSRVVRAGETFLIPRGLMHFQFNVGKTEAYMVVSFNSQNPGIVFVPLTLFGSNPPIPTPVLTKALRIEAGVVELLKSKFAGGS

SEQ ID NO: 51842 - protein, 173 aa, Glycine max
  peptide (1)..(173): Ceres Seq. ID no. 15172906
  misc_feature (12)..(163): Pfam Name: Cupin Pfam Description: Cupin
  misc_feature (1)..(172): Homolog of NCBI NO: 21912430 NR Description: oxalate oxidase 4 [Lolium perenne]
  misc_feature (1)..(172): Homolog of NCBI NO: 21912428 NR Description: oxalate oxidase 2 [Lolium perenne]
  misc_feature (1)..(172): Homolog of NCBI NO: 22138786 NR Description: oxalate oxidase [Lolium perenne]
  misc_feature (1)..(173): Homolog of NCBI NO: 121131 NR Description: Oxalate oxidase GF-3.8 precursor (Germin GF-3.8)
  misc_feature (1)..(172): Homolog of NCBI NO: 11967814 NR Description: oxalate oxidase [Lolium perenne]
  misc_feature (1)..(173): Homolog of NCBI NO: 7447343 NR Description: germin homolog Ger3 - wheat
  misc_feature (1)..(172): Homolog of NCBI NO: 121129 NR Description: Oxalate oxidase GF-2.8 precursor (Germin GF-2.8)
  misc_feature (1)..(172): Homolog of NCBI NO: 1171937 NR Description: Oxalate oxidase 2 precursor (Germin)
  misc_feature (1)..(173): Homolog of NCBI NO: 2266668 NR Description: oxalate oxidase [Hordeum vulgare]
  misc_feature (1)..(159): Homolog of NCBI NO: 7447342 NR Description: germin homolog Ger1 - wheat
MSEAGDDFLFSSKLAKAGNTSTPNGSAVTELDVAEWPGTNTLGVSMNRVDFAPGGTNPPHVHPRGTEIGMVMKGELLVGILGSLDSGNKLYSRVVRAGETFLIPRGLMHFQFNVGKTEAYMVVSFNSQNPGIVFVPLTLFGSNPPIPTPVLTKALRIEAGVVELLKSKFAGGS

SEQ ID NO: 51843 - DNA, 1040 bp, Glycine max
  misc_feature (1)..(1040): Ceres Seq. ID no. 13594655
atcagaaactcattcagacgactcgagcaaccactgcctcttacacttgtcacgtccctaccacgtactcgcaatggccgcagctgcagcactagccagttccacgaaagaagtgctcccgcctgcactgggcgccgtctccgagccccctaccctcttcgatggcaccaccagactgtacatttgctacacctgcccgtttgctcagcgcgcctgggttacccggaactgcaagggtctgcaggaggagatcaagcttgtcgccatcaatctggaggacaaaccagcatggtacaaggagaatgtttacccacagggcacggtgccttccctggagcacgacggcaaggtcaccggagagagcttggatttgatcaagtacatcgacaccaatttccaaggcccggcactgcttcctcaagatccggctaagaggcagttcgccgatgagctgattgcttacgctgatgcctttaccaaagcactctactcgcccttgatctcccagtggccatttcagatgaagctgttgctgctctagacaagatcgaagctgtcctgtccaagttcagtgacggcccgttcttccttggccaatttagcttggtggatattgcgtacgtgaccatcttggagagggttcagatatactactctcacgtgaggaactacgagatcgccaaagacaggcccaaccttgagagatacgccgaggagatgaacaagatcgaagcctataagcaaaccaaaaatgtcccgctgaccttgcttgatgctgccaagaggcatctcaagattgcctgaagaagtggtgattcgccaagaattacggcggctgccagggaacggcggcatttgagtaggccaagactgaactctcgtcaccgggggttggggcttcttttactaccattattatcacaatgagttgtagtagtatatgttctcttcccaataaatgacaccatgttgtaacctgtaagggctatgctttttatgaaacaataatgtactccatctgttctatgtgcattacagtt

SEQ ID NO: 51844 - protein, 179 aa, Glycine max
  peptide (1)..(179): Ceres Seq. ID no. 13594656
  misc_feature (26)..(169): Homolog of NCBI NO: 24796806 NR Description: putative glutathione S-transferase
  misc_feature (25)..(169): Homolog of NCBI NO: 24796810 NR Description: putative glutathione S-transferase
  misc_feature (25)..(168): Homolog of NCBI NO: 1352460 NR Description: IN2-1 PROTEIN
  misc_feature (25)..(169): Homolog of NCBI NO: 7939638 NR Description: XIG [Oryza sativa]
  misc_feature (25)..(169): Homolog of NCBI NO: 7489703 NR Description: safener-induced In2.1-like protein - wheat
SETHSDDSSNHCLLHLSRPYHVLAMAAAAALASSTKEVLPPALGAVSEPPTLFDGTTRLYICYTCPFAQRAWVTRNCKGLQEEIKLVAINLEDKPAWYKENVYPQGTVPSLEHDGKVTGESLDLIKYIDTNFQGPALLPQDPAKRQFADELIAYADAFTKALYSPLISQWPFQMKLLLL

SEQ ID NO: 51845 - protein, 155 aa, Glycine max
  peptide (1)..(155): Ceres Seq. ID no. 13594657
  misc_feature (2)..(145): Homolog of NCBI NO: 24796806 NR Description: putative glutathione S-transferase
  misc_feature (1)..(145): Homolog of NCBI NO: 24796810 NR Description: putative glutathione S-transferase
  misc_feature (1)..(144): Homolog of NCBI NO: 1352460 NR Description: IN2-1 PROTEIN
  misc_feature (1)..(145): Homolog of NCBI NO: 7939638 NR Description: XIG [Oryza sativa]
  misc_feature (1)..(145): Homolog of NCBI NO: 7489703 NR Description: safener-induced In2.1-like protein - wheat
MAAAAALASSTKEVLPPALGAVSEPPTLFDGTTRLYICYTCPFAQRAWVTRNCKGLQEEIKLVAINLEDKPAWYKENVYPQGTVPSLEHDGKVTGESLDLIKYIDTNFQGPALLPQDPAKRQFADELIAYADAFTKALYSPLISQWPFQMKLLLL

SEQ ID NO: 51846 - protein, 143 aa, Glycine max
  peptide (1)..(143): Ceres Seq. ID no. 13594658
IRNSFRRLEQPLPLTLVTSLPRTRNGRSCSTSQFHERSAPACTGRRLRAPYPLRWHHQTVHLLHLPVCSARLGYPELQGSAGGDQACRHQSGGQTSMVQGECLPTGHGAFPGARRQGHRRELGFDQVHRHQFPRPGTASSRSG

SEQ ID NO: 51847 - DNA, 700 bp, Glycine max
  misc_feature (1)..(700): Ceres Seq. ID no. 13594809
ctctgcctctgcctctcagtttaccaaaaccctagtttcaaagctttactctccagaaatggctttctgcaaaaatctcggtggtctattgaggcaaggtgcggtttctcagacagggaatgtacccgttcagtctatgctcgggtctctccggtacatgtctaccaagctctttgtcggtggtctctcatggggaactgatgaccagtcattgagggaggctttctccaacttcggtgaagtgatcgattctaaggtcattgttgatagggaaaccggaaggtcaagggggtttggatttgtcaatttctctgatgagagtgctgctaatgctgcaatttcagagatggacggaaaggaactgaatggacgcaacatccgagtgaatgttgctaacgatagaccaagtgctccccgggcttatggaggtggtggcggctacggtggaggtggtggtggctatggaggaggtggtgatggaggcggttactaaacagaggagcttcttgtgataagaagaattgatctttctgtttgtttttttttattatttaaatcgagcttgtgctagtacaaaacctgaatgggatttgttgagactctagtagtcagtactcttatctaagacacggcttttcactcagtttgtgttagcttcaaatattgtccgttaataattctggaggaaagccgaattgag

SEQ ID NO: 51848 - protein, 163 aa, Glycine max
  peptide (1)..(163): Ceres Seq. ID no. 13594810
  misc_feature (57)..(128): Pfam Name: RNA recognition motif. (a.k.a. RRM, RBD, or RNP domain) Pfam Description: RNA recognition motif. (a.k.a. RRM, RBD, or RNP
  misc_feature (20)..(162): Homolog of NCBI NO: 15239505 NR Description: RNA-binding protein, putative [Arabidopsis
  misc_feature (20)..(145): Homolog of NCBI NO: 7489099 NR Description: RNA-binding protein RGP-3 - wood tobacco
  misc_feature (20)..(163): Homolog of NCBI NO: 7439995 NR Description: RNA binding protein 3 - wood tobacco
  misc_feature (20)..(163): Homolog of NCBI NO: 7439994 NR Description: glycine-rich RNA-binding protein - garden pea
  misc_feature (20)..(153): Homolog of NCBI NO: 21553972 NR Description: glycine-rich RNA binding protein, putative
  misc_feature (20)..(153): Homolog of NCBI NO: 15229525 NR Description: RNA-binding protein, putative [Arabidopsis
  misc_feature (40)..(162): Homolog of NCBI NO: 322514 NR Description: glycine-rich RNA-binding protein (clone A81) -
  misc_feature (20)..(162): Homolog of NCBI NO: 30682622 NR Description: glycine-rich RNA-binding protein (AtGRP2)
  misc_feature (20)..(162): Homolog of NCBI NO: 15236359 NR Description: glycine-rich RNA-binding protein (AtGRP2)
  misc_feature (20)..(163): Homolog of NCBI NO: 2826811 NR Description: AtGRP2 [Arabidopsis thaliana]
SASASQFTKTLVSKLYSPEMAFCKNLGGLLRQGAVSQTGNVPVQSMLGSLRYMSTKLFVGGLSWGTDDQSLREAFSNFGEVIDSKVIVDRETGRSRGFGFVNFSDESAANAAISEMDGKELNGRNIRVNVANDRPSAPRAYGGGGGYGGGGGGYGGGGDGGGY

SEQ ID NO: 51849 - protein, 144 aa, Glycine max
  peptide (1)..(144): Ceres Seq. ID no. 13594811
  misc_feature (38)..(109): Pfam Name: RNA recognition motif. (a.k.a. RRM, RBD, or RNP domain) Pfam Description: RNA recognition motif. (a.k.a. RRM, RBD, or RNP
  misc_feature (1)..(143): Homolog of NCBI NO: 15239505 NR Description: RNA-binding protein, putative [Arabidopsis
  misc_feature (1)..(126): Homolog of NCBI NO: 7489099 NR Description: RNA-binding protein RGP-3 - wood tobacco
  misc_feature (1)..(144): Homolog of NCBI NO: 7439995 NR Description: RNA binding protein 3 - wood tobacco
  misc_feature (1)..(144): Homolog of NCBI NO: 7439994 NR Description: glycine-rich RNA-binding protein - garden pea
  misc_feature (1)..(134): Homolog of NCBI NO: 21553972 NR Description: glycine-rich RNA binding protein, putative
  misc_feature (1)..(134): Homolog of NCBI NO: 15229525 NR Description: RNA-binding protein, putative [Arabidopsis
  misc_feature (21)..(143): Homolog of NCBI NO: 322514 NR Description: glycine-rich RNA-binding protein (clone A81) -
  misc_feature (1)..(143): Homolog of NCBI NO: 30682622 NR Description: glycine-rich RNA-binding protein (AtGRP2)
  misc_feature (1)..(143): Homolog of NCBI NO: 15236359 NR Description: glycine-rich RNA-binding protein (AtGRP2)
  misc_feature (1)..(144): Homolog of NCBI NO: 2826811 NR Description: AtGRP2 [Arabidopsis thaliana]
MAFCKNLGGLLRQGAVSQTGNVPVQSMLGSLRYMSTKLFVGGLSWGTDDQSLREAFSNFGEVIDSKVIVDRETGRSRGFGFVNFSDESAANAAISEMDGKELNGRNIRVNVANDRPSAPRAYGGGGGYGGGGGGYGGGGDGGGY

SEQ ID NO: 51850 - protein, 118 aa, Glycine max
  peptide (1)..(118): Ceres Seq. ID no. 13594812
  misc_feature (12)..(83): Pfam Name: RNA recognition motif. (a.k.a. RRM, RBD, or RNP domain) Pfam Description: RNA recognition motif. (a.k.a. RRM, RBD, or RNP
  misc_feature (1)..(117): Homolog of NCBI NO: 15239505 NR Description: RNA-binding protein, putative [Arabidopsis
  misc_feature (1)..(100): Homolog of NCBI NO: 7489099 NR Description: RNA-binding protein RGP-3 - wood tobacco
  misc_feature (1)..(118): Homolog of NCBI NO: 7439995 NR Description: RNA binding protein 3 - wood tobacco
  misc_feature (1)..(118): Homolog of NCBI NO: 7439994 NR Description: glycine-rich RNA-binding protein - garden pea
  misc_feature (1)..(108): Homolog of NCBI NO: 21553972 NR Description: glycine-rich RNA binding protein, putative
  misc_feature (1)..(108): Homolog of NCBI NO: 15229525 NR Description: RNA-binding protein, putative [Arabidopsis
  misc_feature (1)..(117): Homolog of NCBI NO: 322514 NR Description: glycine-rich RNA-binding protein (clone A81) -
  misc_feature (1)..(117): Homolog of NCBI NO: 30682622 NR Description: glycine-rich RNA-binding protein (AtGRP2)
  misc_feature (1)..(117): Homolog of NCBI NO: 15236359 NR Description: glycine-rich RNA-binding protein (AtGRP2)
  misc_feature (1)..(118): Homolog of NCBI NO: 2826811 NR Description: AtGRP2 [Arabidopsis thaliana]
MLGSLRYMSTKLFVGGLSWGTDDQSLREAFSNFGEVIDSKVIVDRETGRSRGFGFVNFSDESAANAAISEMDGKELNGRNIRVNVANDRPSAPRAYGGGGGYGGGGGGYGGGGDGGGY

SEQ ID NO: 51851 - DNA, 1470 bp, Glycine max
  misc_feature (1)..(1470): Ceres Seq. ID no. 15177854
cacagacataaagagcagagttcagaagcaagtaacagagcataccatcgtactgtacgtatttgcgctgcacaatctgcatccagtgcacacaagatagtagcgagcaagatggtggccaaggaggcgatcccgctgctgacgccgcacaagatgggccagttcgagctctcccaccgggtggtgctcgcgccgctcacgcgctgccgctcctacgccaacgtgccgcagccgcacgccgcggcgtactactcacagcgggccaccagaggcggcctcctcatcgccgaggccaccggcgtctccgccaccgcgcaggggtacccggagacacccggcatctggacgcagcagcaggtcgacgcctggaagcccatcgtcgatgccgtccaccgcaagggcgctctcttcttctgccagatttggcacgttgggagggtctccaccaacgattttcagccggacggacaggcgccgatctccagcactgacaagcaaataacgcctgatgccgagtctggtatggtctactccaagccccgacagcttcaaacggacgagataccgctgatcgttgatgacttcagacgcgctgccagaaacgcaatcgaggcggggttcgacggcgtggagatccacggggcacacgggtacctattggagcagttcatgaaagacagctctaacaaccgcaccgacgagtatggtggcagcctcgagaaccgatgccgctttgcagtagaggtaatcgatgctatcgtccatgagattggtgcggatcgtgtaggcatcaggttgtctccattcgtggattacatggactgcttcgactccgacccacatgcactcgggatgtacatggtacaacaacttaacaagcatcaaggatttgtctattgccatatggtagagccgcggatggccattgtggatggccgcaggcagataccccatgggctcctgcccttcaggaaagcattcaagggcactttcattgccgctggagggtatgatcgggaggaaggcaacaaagtggtggccgacggttatgctgatctcgttgcttacgggagaatctttctggctaatccagatttgcctaagagattcgagctcgactcaccattgaacaagtacgaccgcaacactttctacacgcaagatcctgtcattggctacacagattatcctttccttgaaggctcgaatgccgagtagttcacccactcgacttccatagtgatgtgcttgattttatacaatatgtaatggtttattcaatgtgtgtatgcacggggcatgcgcattgtatcatttccaccaataatttacttttattctcccatgaaatgccaatatgtcaagatattatttttcccatcaatagtgatatcactgtcttcaacaacctgtaagacaagttctatcccaacgatacccaaaatagtggtgcgtccttaccggttaaag

SEQ ID NO: 51852 - protein, 405 aa, Glycine max
  peptide (1)..(405): Ceres Seq. ID no. 15177855
  misc_feature (45)..(377): Pfam Name: NADH:flavin oxidoreductase / NADH oxidase family Pfam Description: NADH:flavin oxidoreductase / NADH oxidase family
  misc_feature (31)..(400): Homolog of NCBI NO: 4894182 NR Description: 12-oxophytodienoate reductase [Lycopersicon
  misc_feature (43)..(399): Homolog of NCBI NO: 13516922 NR Description: 12-oxophytodienoic acid 10, 11-reductase [Pisum
  misc_feature (40)..(402): Homolog of NCBI NO: 2765083 NR Description: 12-oxophytodienoate reductase [Arabidopsis
  misc_feature (29)..(403): Homolog of NCBI NO: 7449902 NR Description: probable 12-oxophytodienoate reductase (EC
  misc_feature (45)..(402): Homolog of NCBI NO: 7449901 NR Description: probable 12-oxophytodienoate reductase (EC
  misc_feature (40)..(402): Homolog of NCBI NO: 21593388 NR Description: 12-oxophytodienoate reductase (OPR1) [Arabidopsis
  misc_feature (40)..(402): Homolog of NCBI NO: 26450549 NR Description: putative 12-oxophytodienoate reductase OPR2
  misc_feature (40)..(402): Homolog of NCBI NO: 15223140 NR Description: 12-oxophytodienoate reductase (OPR2) [Arabidopsis
  misc_feature (40)..(402): Homolog of NCBI NO: 15223138 NR Description: 12-oxophytodienoate reductase (OPR1) [Arabidopsis
  misc_feature (36)..(405): Homolog of NCBI NO: 23495288 NR Description: 12-oxophytodienoic acid reductase [Oryza sativa]
HRHKEQSSEASNRAYHRTVRICAAQSASSAHKIVASKMVAKEAIPLLTPHKMGQFELSHRVVLAPLTRCRSYANVPQPHAAAYYSQRATRGGLLIAEATGVSATAQGYPETPGIWTQQQVDAWKPIVDAVHRKGALFFCQIWHVGRVSTNDFQPDGQAPISSTDKQITPDAESGMVYSKPRQLQTDEIPLIVDDFRRAARNAIEAGFDGVEIHGAHGYLLEQFMKDSSNNRTDEYGGSLENRCRFAVEVIDAIVHEIGADRVGIRLSPFVDYMDCFDSDPHALGMYMVQQLNKHQGFVYCHMVEPRMAIVDGRRQIPHGLLPFRKAFKGTFIAAGGYDREEGNKVVADGYADLVAYGRIFLANPDLPKRFELDSPLNKYDRNTFYTQDPVIGYTDYPFLEGSNAE

SEQ ID NO: 51853 - protein, 368 aa, Glycine max
  peptide (1)..(368): Ceres Seq. ID no. 15177856
  misc_feature (8)..(340): Pfam Name: NADH:flavin oxidoreductase / NADH oxidase family Pfam Description: NADH:flavin oxidoreductase / NADH oxidase family
  misc_feature (1)..(363): Homolog of NCBI NO: 4894182 NR Description: 12-oxophytodienoate reductase [Lycopersicon
  misc_feature (6)..(362): Homolog of NCBI NO: 13516922 NR Description: 12-oxophytodienoic acid 10, 11-reductase [Pisum
  misc_feature (3)..(365): Homolog of NCBI NO: 2765083 NR Description: 12-oxophytodienoate reductase [Arabidopsis
  misc_feature (1)..(366): Homolog of NCBI NO: 7449902 NR Description: probable 12-oxophytodienoate reductase (EC
  misc_feature (8)..(365): Homolog of NCBI NO: 7449901 NR Description: probable 12-oxophytodienoate reductase (EC
  misc_feature (3)..(365): Homolog of NCBI NO: 21593388 NR Description: 12-oxophytodienoate reductase (OPR1) [Arabidopsis
  misc_feature (3)..(365): Homolog of NCBI NO: 26450549 NR Description: putative 12-oxophytodienoate reductase OPR2
  misc_feature (3)..(365): Homolog of NCBI NO: 15223140 NR Description: 12-oxophytodienoate reductase (OPR2) [Arabidopsis
  misc_feature (3)..(365): Homolog of NCBI NO: 15223138 NR Description: 12-oxophytodienoate reductase (OPR1) [Arabidopsis
  misc_feature (1)..(368): Homolog of NCBI NO: 23495288 NR Description: 12-oxophytodienoic acid reductase [Oryza sativa]
MVAKEAIPLLTPHKMGQFELSHRVVLAPLTRCRSYANVPQPHAAAYYSQRATRGGLLIAEATGVSATAQGYPETPGIWTQQQVDAWKPIVDAVHRKGALFFCQIWHVGRVSTNDFQPDGQAPISSTDKQITPDAESGMVYSKPRQLQTDEIPLIVDDFRRAARNAIEAGFDGVEIHGAHGYLLEQFMKDSSNNRTDEYGGSLENRCRFAVEVIDAIVHEIGADRVGIRLSPFVDYMDCFDSDPHALGMYMVQQLNKHQGFVYCHMVEPRMAIVDGRRQIPHGLLPFRKAFKGTFIAAGGYDREEGNKVVADGYADLVAYGRIFLANPDLPKRFELDSPLNKYDRNTFYTQDPVIGYTDYPFLEGSNAE

SEQ ID NO: 51854 - protein, 354 aa, Glycine max
  peptide (1)..(354): Ceres Seq. ID no. 15177857
  misc_feature (1)..(326): Pfam Name: NADH:flavin oxidoreductase / NADH oxidase family Pfam Description: NADH:flavin oxidoreductase / NADH oxidase family
  misc_feature (1)..(349): Homolog of NCBI NO: 4894182 NR Description: 12-oxophytodienoate reductase [Lycopersicon
  misc_feature (1)..(348): Homolog of NCBI NO: 13516922 NR Description: 12-oxophytodienoic acid 10, 11-reductase [Pisum
  misc_feature (1)..(351): Homolog of NCBI NO: 2765083 NR Description: 12-oxophytodienoate reductase [Arabidopsis
  misc_feature (1)..(352): Homolog of NCBI NO: 7449902 NR Description: probable 12-oxophytodienoate reductase (EC
  misc_feature (1)..(351): Homolog of NCBI NO: 7449901 NR Description: probable 12-oxophytodienoate reductase (EC
  misc_feature (1)..(351): Homolog of NCBI NO: 21593388 NR Description: 12-oxophytodienoate reductase (OPR1) [Arabidopsis
  misc_feature (1)..(351): Homolog of NCBI NO: 26450549 NR Description: putative 12-oxophytodienoate reductase OPR2
  misc_feature (1)..(351): Homolog of NCBI NO: 15223140 NR Description: 12-oxophytodienoate reductase (OPR2) [Arabidopsis
  misc_feature (1)..(351): Homolog of NCBI NO: 15223138 NR Description: 12-oxophytodienoate reductase (OPR1) [Arabidopsis
  misc_feature (1)..(354): Homolog of NCBI NO: 23495288 NR Description: 12-oxophytodienoic acid reductase [Oryza sativa]
MGQFELSHRVVLAPLTRCRSYANVPQPHAAAYYSQRATRGGLLIAEATGVSATAQGYPETPGIWTQQQVDAWKPIVDAVHRKGALFFCQIWHVGRVSTNDFQPDGQAPISSTDKQITPDAESGMVYSKPRQLQTDEIPLIVDDFRRAARNAIEAGFDGVEIHGAHGYLLEQFMKDSSNNRTDEYGGSLENRCRFAVEVIDAIVHEIGADRVGIRLSPFVDYMDCFDSDPHALGMYMVQQLNKHQGFVYCHMVEPRMAIVDGRRQIPHGLLPFRKAFKGTFIAAGGYDREEGNKVVADGYADLVAYGRIFLANPDLPKRFELDSPLNKYDRNTFYTQDPVIGYTDYPFLEGSNAE

SEQ ID NO: 51855 - DNA, 712 bp, Glycine max
  misc_feature (1)..(712): Ceres Seq. ID no. 14302035
gattactcaacttgtttggtcaaataatggaagcggcgacgaagcagagcgttacaaaccgccttctcaccgtcaagtcagcctccggcaagacttacagtcaattagcggcggagacagggctcaccaacgtctacgtggctcagctgctccgtcgccaagcccagctcaaacccgaaacagtccccaagctccgtgaagccttacctgctctgaccgaagaactcatcgccgccatgatgtctccgccgtggagatcgtatgatccaaacctcatccaagaacccaccgtctacaggttgaatgaagcagtgatgcatttcggtgagagtataaaggagatcatcaatgaagatttcggcgatggcatcatgtcggcaatagacttctattgctctgtggacaaagttaaaggagttgacggtaataaccgcgttgtcgtgacacttgatgggaagtatctttctcattccgaacagaggactgagaatatggtctcaaggctaaacctcaagggaagtacaagcgaatgatatgaaaatgtaagaataaaacgattcatatgaatgtaagcagcaatccatgaaggcttttatgtctaaagctgtaaacattgtaatatttatggtgtttgtttattctgtactctatgcaactccagcctcgagctgtttcaagttgaataacagtgaataaaataaaataaacaatg

SEQ ID NO: 51856 - protein, 176 aa, Glycine max
  peptide (1)..(176): Ceres Seq. ID no. 14302036
  misc_feature (86)..(159): Pfam Name: Cyanate lyase C-terminal domain Pfam Description: Cyanate lyase C-terminal domain
  misc_feature (16)..(154): Homolog of NCBI NO: 37524138 NR Description: cyanate lyase (cyanate hydrolase) (cyanase)
  misc_feature (13)..(158): Homolog of NCBI NO: 33867020 NR Description: cyanate lyase [Synechococcus sp. WH 8102]
  misc_feature (16)..(158): Homolog of NCBI NO: 2498272 NR Description: Cyanate hydratase (Cyanase) (Cyanate lyase)
  misc_feature (12)..(156): Homolog of NCBI NO: 23471974 NR Description: hypothetical protein [Pseudomonas syringae pv.
  misc_feature (9)..(156): Homolog of NCBI NO: 28869134 NR Description: cyanate lyase [Pseudomonas syringae pv. tomato
  misc_feature (99)..(173): Homolog of NCBI NO: 37535282 NR Description: putative cyanase [Oryza sativa (japonica
  misc_feature (17)..(98): Homolog of NCBI NO: 37535282 NR Description: putative cyanase [Oryza sativa (japonica
  misc_feature (17)..(173): Homolog of NCBI NO: 20137963 NR Description: Cyanate hydratase (Cyanase) (Cyanate lyase)
  misc_feature (9)..(176): Homolog of NCBI NO: 21554171 NR Description: cyanate lyase (CYN) [Arabidopsis thaliana]
  misc_feature (9)..(176): Homolog of NCBI NO: 15229458 NR Description: cyanate lyase (CYN) [Arabidopsis thaliana]
LLNLFGQIMEAATKQSVTNRLLTVKSASGKTYSQLAAETGLTNVYVAQLLRRQAQLKPETVPKLREALPALTEELIAAMMSPPWRSYDPNLIQEPTVYRLNEAVMHFGESIKEIINEDFGDGIMSAIDFYCSVDKVKGVDGNNRVVVTLDGKYLSHSEQRTENMVSRLNLKGSTSE

SEQ ID NO: 51857 - protein, 168 aa, Glycine max
  peptide (1)..(168): Ceres Seq. ID no. 14302037
  misc_feature (78)..(151): Pfam Name: Cyanate lyase C-terminal domain Pfam Description: Cyanate lyase C-terminal domain
  misc_feature (8)..(146): Homolog of NCBI NO: 37524138 NR Description: cyanate lyase (cyanate hydrolase) (cyanase)
  misc_feature (5)..(150): Homolog of NCBI NO: 33867020 NR Description: cyanate lyase [Synechococcus sp. WH 8102]
  misc_feature (8)..(150): Homolog of NCBI NO: 2498272 NR Description: Cyanate hydratase (Cyanase) (Cyanate lyase)
  misc_feature (4)..(148): Homolog of NCBI NO: 23471974 NR Description: hypothetical protein [Pseudomonas syringae pv.
  misc_feature (1)..(148): Homolog of NCBI NO: 28869134 NR Description: cyanate lyase [Pseudomonas syringae pv. tomato
  misc_feature (91)..(165): Homolog of NCBI NO: 37535282 NR Description: putative cyanase [Oryza sativa (japonica
  misc_feature (9)..(90): Homolog of NCBI NO: 37535282 NR Description: putative cyanase [Oryza sativa (japonica
  misc_feature (9)..(165): Homolog of NCBI NO: 20137963 NR Description: Cyanate hydratase (Cyanase) (Cyanate lyase)
  misc_feature (1)..(168): Homolog of NCBI NO: 21554171 NR Description: cyanate lyase (CYN) [Arabidopsis thaliana]
  misc_feature (1)..(168): Homolog of NCBI NO: 15229458 NR Description: cyanate lyase (CYN) [Arabidopsis thaliana]
MEAATKQSVTNRLLTVKSASGKTYSQLAAETGLTNVYVAQLLRRQAQLKPETVPKLREALPALTEELIAAMMSPPWRSYDPNLIQEPTVYRLNEAVMHFGESIKEIINEDFGDGIMSAIDFYCSVDKVKGVDGNNRVVVTLDGKYLSHSEQRTENMVSRLNLKGSTSE

SEQ ID NO: 51858 - protein, 98 aa, Glycine max
  peptide (1)..(98): Ceres Seq. ID no. 14302038
  misc_feature (8)..(81): Pfam Name: Cyanate lyase C-terminal domain Pfam Description: Cyanate lyase C-terminal domain
  misc_feature (1)..(76): Homolog of NCBI NO: 37524138 NR Description: cyanate lyase (cyanate hydrolase) (cyanase)
  misc_feature (1)..(80): Homolog of NCBI NO: 33867020 NR Description: cyanate lyase [Synechococcus sp. WH 8102]
  misc_feature (1)..(80): Homolog of NCBI NO: 2498272 NR Description: Cyanate hydratase (Cyanase) (Cyanate lyase)
  misc_feature (1)..(78): Homolog of NCBI NO: 23471974 NR Description: hypothetical protein [Pseudomonas syringae pv.
  misc_feature (1)..(78): Homolog of NCBI NO: 28869134 NR Description: cyanate lyase [Pseudomonas syringae pv. tomato
  misc_feature (21)..(95): Homolog of NCBI NO: 37535282 NR Description: putative cyanase [Oryza sativa (japonica
  misc_feature (1)..(20): Homolog of NCBI NO: 37535282 NR Description: putative cyanase [Oryza sativa (japonica
  misc_feature (1)..(95): Homolog of NCBI NO: 20137963 NR Description: Cyanate hydratase (Cyanase) (Cyanate lyase)
  misc_feature (1)..(98): Homolog of NCBI NO: 21554171 NR Description: cyanate lyase (CYN) [Arabidopsis thaliana]
  misc_feature (1)..(98): Homolog of NCBI NO: 15229458 NR Description: cyanate lyase (CYN) [Arabidopsis thaliana]
MMSPPWRSYDPNLIQEPTVYRLNEAVMHFGESIKEIINEDFGDGIMSAIDFYCSVDKVKGVDGNNRVVVTLDGKYLSHSEQRTENMVSRLNLKGSTSE

SEQ ID NO: 51859 - DNA, 721 bp, Glycine max
  misc_feature (1)..(721): Ceres Seq. ID no. 15172900
atcgcttccctcaaaaacaaataaaaatctctaaaatcaaaaaagatgtcgacgaagaagattgtgttgaagagctccgacaacgagtctttcgaggttgacgaggccgtggctcgcgagtctcagaccctagctcacatggtcgaagacgactgcaccgacaacggcatccctcttcccaacgtcaccggcaagatcctcgccaaggtgatcgagtactgcaagaagcacgtcgacgccgctgctgccaagaccgaggcggccgccgatggtggcgcttcctccgacgatgacctcaaggcttgggatgccgagttcatgaagatcgatcaggctaccctcttcgaactcatcctggctgctaactatctgaacatcaagaaccttctcgacctcacgtgccagacggtggctgatatgatcaaaggcaagactccagatgagattcgcacgaccttcaacatcaagaacgacttctcgcctgaggaggaagaggaggtgcgcagggagaaccaatgggcttttgaatgatctcaccaaagagaagccttgttgaagctatagcagaacctgcaaagctttcttcctttatcttatttgcgtctttatgttcttaggaaaaattaatgacttatgttggttccgttcctcctagtgcttttctatttaccgattaagaaccaattgttggataatttgtggttataatcagtctttggtt

SEQ ID NO: 51860 - protein, 161 aa, Glycine max
  peptide (1)..(161): Ceres Seq. ID no. 15172901
  misc_feature (84)..(161): Pfam Name: Skp1 family, dimerisation domain Pfam Description: Skp1 family, dimerisation domain
  misc_feature (1)..(161): Homolog of NCBI NO: 7489299 NR Description: fimbriata-associated protein - garden snapdragon
  misc_feature (1)..(161): Homolog of NCBI NO: 3719211 NR Description: UIP2 [Arabidopsis thaliana]
  misc_feature (1)..(161): Homolog of NCBI NO: 7489300 NR Description: fimbriata-associated protein 2 - garden
  misc_feature (6)..(151): Homolog of NCBI NO: 18958251 NR Description: kinetochore protein [Brassica juncea]
  misc_feature (1)..(161): Homolog of NCBI NO: 18410982 NR Description: E3 ubiquitin ligase SCF complex subunit,
  misc_feature (1)..(161): Homolog of NCBI NO: 18958253 NR Description: kinetochore protein [Brassica juncea]
  misc_feature (1)..(161): Homolog of NCBI NO: 18958259 NR Description: kinetochore protein [Brassica juncea]
  misc_feature (1)..(161): Homolog of NCBI NO: 18958257 NR Description: kinetochore protein [Brassica juncea]
  misc_feature (1)..(161): Homolog of NCBI NO: 18958255 NR Description: kinetochore protein [Brassica juncea]
  misc_feature (1)..(161): Homolog of NCBI NO: 18958249 NR Description: kinetochore protein [Brassica juncea]
MSTKKIVLKSSDNESFEVDEAVARESQTLAHMVEDDCTDNGIPLPNVTGKILAKVIEYCKKHVDAAAAKTEAAADGGASSDDDLKAWDAEFMKIDQATLFELILAANYLNIKNLLDLTCQTVADMIKGKTPDEIRTTFNIKNDFSPEEEEEVRRENQWAFE

SEQ ID NO: 51861 - protein, 130 aa, Glycine max
  peptide (1)..(130): Ceres Seq. ID no. 15172902
  misc_feature (53)..(130): Pfam Name: Skp1 family, dimerisation domain Pfam Description: Skp1 family, dimerisation domain
  misc_feature (1)..(130): Homolog of NCBI NO: 7489299 NR Description: fimbriata-associated protein - garden snapdragon
  misc_feature (1)..(130): Homolog of NCBI NO: 3719211 NR Description: UIP2 [Arabidopsis thaliana]
  misc_feature (1)..(130): Homolog of NCBI NO: 7489300 NR Description: fimbriata-associated protein 2 - garden
  misc_feature (1)..(120): Homolog of NCBI NO: 18958251 NR Description: kinetochore protein [Brassica juncea]
  misc_feature (1)..(130): Homolog of NCBI NO: 18410982 NR Description: E3 ubiquitin ligase SCF complex subunit,
  misc_feature (1)..(130): Homolog of NCBI NO: 18958253 NR Description: kinetochore protein [Brassica juncea]
  misc_feature (1)..(130): Homolog of NCBI NO: 18958259 NR Description: kinetochore protein [Brassica juncea]
  misc_feature (1)..(130): Homolog of NCBI NO: 18958257 NR Description: kinetochore protein [Brassica juncea]
  misc_feature (1)..(130): Homolog of NCBI NO: 18958255 NR Description: kinetochore protein [Brassica juncea]
  misc_feature (1)..(130): Homolog of NCBI NO: 18958249 NR Description: kinetochore protein [Brassica juncea]
MVEDDCTDNGIPLPNVTGKILAKVIEYCKKHVDAAAAKTEAAADGGASSDDDLKAWDAEFMKIDQATLFELILAANYLNIKNLLDLTCQTVADMIKGKTPDEIRTTFNIKNDFSPEEEEEVRRENQWAFE

SEQ ID NO: 51862 - DNA, 608 bp, Glycine max
  misc_feature (1)..(608): Ceres Seq. ID no. 12609631
acaacggctcgccacaaagccaacaaacccagcagccccagccctttccgcctccccccgctcccaaaccaagccccgcccccgttctgtccctccgcaaaaccctagctccgtacacgcgcggcgacctccaccatgaagggcaaggccgacacctccaagaagggcgagggcaggctcaaggccgccggcggcgccagcaagaggaagaaggacgccgctgccgctggcaagcccaagcgcccaccctccgccttcttcgtcttcatgtctgagttcaggcagcagtacaacgcggagaaccccaacaacaagagtgtcgccaacgtgagcaaggcggcgggtgagaagtggagagctatgtctgatgaggacaaagcaccttatgtggaaaaggctgaacagaagaagaaggactatgagaagaccaaagccacctttgataacaaggagagtgcgagctccaagaaggccaagactcagaacgatgaggaggtcaaatctgaggtcgaagatgagggtagcgatgaggaaaacgaggacgatgatgagtaaatagtgtatcagagtatgaggtagcaaattgggtgttgggtccccgcttagtg

SEQ ID NO: 51863 - protein, 139 aa, Glycine max
  peptide (1)..(139): Ceres Seq. ID no. 12609632
  misc_feature (34)..(103): Pfam Name: HMG (high mobility group) box Pfam Description: HMG (high mobility group) box
  misc_feature (1)..(138): Homolog of NCBI NO: 11346367 NR Description: high mobility group protein HMG-gamma
  misc_feature (1)..(138): Homolog of NCBI NO: 13877775 NR Description: putative HMG protein [Arabidopsis thaliana]
  misc_feature (1)..(138): Homolog of NCBI NO: 21592453 NR Description: putative HMG protein [Arabidopsis thaliana]
  misc_feature (1)..(138): Homolog of NCBI NO: 15227862 NR Description: putative HMG protein
  misc_feature (1)..(138): Homolog of NCBI NO: 729737 NR Description: HMG1/2-LIKE PROTEIN
  misc_feature (2)..(139): Homolog of NCBI NO: 7446231 NR Description: probable high mobility group protein HMG1 - sword
  misc_feature (1)..(138): Homolog of NCBI NO: 7446227 NR Description: high mobility group protein HMGc2 - maize
  misc_feature (1)..(138): Homolog of NCBI NO: 17017394 NR Description: HMG-like nucleosome/chromatin assembly factor D
  misc_feature (1)..(138): Homolog of NCBI NO: 7446226 NR Description: high mobility group protein HMGc1 - maize
  misc_feature (1)..(139): Homolog of NCBI NO: 18700443 NR Description: high mobility group box protein 2
MKGKADTSKKGEGRLKAAGGASKRKKDAAAAGKPKRPPSAFFVFMSEFRQQYNAENPNNKSVANVSKAAGEKWRAMSDEDKAPYVEKAEQKKKDYEKTKATFDNKESASSKKAKTQNDEEVKSEVEDEGSDEENEDDDE

SEQ ID NO: 51864 - protein, 95 aa, Glycine max
  peptide (1)..(95): Ceres Seq. ID no. 12609633
  misc_feature (1)..(59): Pfam Name: HMG (high mobility group) box Pfam Description: HMG (high mobility group) box
  misc_feature (1)..(94): Homolog of NCBI NO: 11346367 NR Description: high mobility group protein HMG-gamma
  misc_feature (1)..(94): Homolog of NCBI NO: 13877775 NR Description: putative HMG protein [Arabidopsis thaliana]
  misc_feature (1)..(94): Homolog of NCBI NO: 21592453 NR Description: putative HMG protein [Arabidopsis thaliana]
  misc_feature (1)..(94): Homolog of NCBI NO: 15227862 NR Description: putative HMG protein
  misc_feature (1)..(94): Homolog of NCBI NO: 729737 NR Description: HMG1/2-LIKE PROTEIN
  misc_feature (1)..(95): Homolog of NCBI NO: 7446231 NR Description: probable high mobility group protein HMG1 - sword
  misc_feature (1)..(94): Homolog of NCBI NO: 7446227 NR Description: high mobility group protein HMGc2 - maize
  misc_feature (1)..(94): Homolog of NCBI NO: 17017394 NR Description: HMG-like nucleosome/chromatin assembly factor D
  misc_feature (1)..(94): Homolog of NCBI NO: 7446226 NR Description: high mobility group protein HMGc1 - maize
  misc_feature (1)..(95): Homolog of NCBI NO: 18700443 NR Description: high mobility group box protein 2
MSEFRQQYNAENPNNKSVANVSKAAGEKWRAMSDEDKAPYVEKAEQKKKDYEKTKATFDNKESASSKKAKTQNDEEVKSEVEDEGSDEENEDDDE

SEQ ID NO: 51865 - protein, 90 aa, Glycine max
  peptide (1)..(90): Ceres Seq. ID no. 12609634
NGSPQSQQTQQPQPFPPPPAPKPSPAPVLSLRKTLAPYTRGDLHHEGQGRHLQEGRGQAQGRRRRQQEEEGRRCRWQAQAPTLRLLRLHV

SEQ ID NO: 51866 - DNA, 1124 bp, Glycine max
  misc_feature (1)..(1124): Ceres Seq. ID no. 13638599
agggagtaaaaagataaaagataaatatactccagatccgccaccgccgcgtgctatttcttccatccgcctccgtgttgcagcgggacatcggcggccattatttgatccgcggcaggcgcgtcccagccctgcgccgtcttctagtctagaatggcgggcgtcgggtcggcggtgcggcggctctacctctccgtctacaactgggtcgtcttcgtcggatgggcgcaggtgctctactacgcggtgacggcgctgctggccggcggccatgagggcgtctacgccgccgtcgagcgcccgctgcagctcgcgcagaccgccgccgtcatggagattcttcatgggctcgtagggttggtgaggtctccggtcactgcaactcttccacaaataggatcgaggttgtttcttacatggggcatcctgtggagctttcctgagacacaatctcatattcttgtaacttctttggtcataagctggtccatcaccgagatcattagatattctttcttcggcttgaaggagatgcttggatttgcaccttcttggcttttatggcttaggtatagcacatttctgatattgtatcctatcggtatccttagcgaagttggtctaatctacattgctctgccttatatgaaggtatctgaaaaatactttgttaaaatgcctaacaaatggaatttctccttcgactacttctacacatgtgttatcgccattggtgtctatgttccaggtgggccgcacatgttcacgtacatgcttgcccagaggaagaaggccctgtcaaaggcaaagactgcatgaagttgatgtgagccttatagttggagcatgcaatgcaaaccctgcagtctcatgttgtacgaatagtcggtgtgagttgtcattgttagacatgaattacccggcatgtgttgtaacgatgatgattgttggatttctcatggttgaattaatcattgatcaacctctgcattgagacaatgattatgaccatcagataaaaacaatattcatctttggaagtgctcatccattatgagccaatgacaagatctcatcttaacaaggaaaactttgtggagcaaatggtacactggttattccag

SEQ ID NO: 51867 - protein, 221 aa, Glycine max
  peptide (1)..(221): Ceres Seq. ID no. 13638600
  misc_feature (59)..(219): Pfam Name: Protein tyrosine phosphatase-like protein, PTPLA Pfam Description: Protein tyrosine phosphatase-like protein, PTPLA
  misc_feature (8)..(216): Homolog of NCBI NO: 34869216 NR Description: similar to protein tyrosine phosphatase-like
  misc_feature (12)..(215): Homolog of NCBI NO: 27882121 NR Description: Similar to RIKEN cDNA 6330408J20 gene [Danio
  misc_feature (1)..(199): Homolog of NCBI NO: 11358666 NR Description: probable protein phosphatase - Arabidopsis
  misc_feature (1)..(219): Homolog of NCBI NO: 34895864 NR Description: P0009G03.12 [Oryza sativa (japonica
  misc_feature (59)..(221): Homolog of NCBI NO: 34895852 NR Description: P0009G03.5 [Oryza sativa (japonica
  misc_feature (1)..(194): Homolog of NCBI NO: 34895854 NR Description: P0009G03.6 [Oryza sativa (japonica
  misc_feature (1)..(202): Homolog of NCBI NO: 34895856 NR Description: P0009G03.7 [Oryza sativa (japonica
  misc_feature (4)..(220): Homolog of NCBI NO: 34895862 NR Description: P0009G03.11 [Oryza sativa (japonica
  misc_feature (1)..(219): Homolog of NCBI NO: 22326707 NR Description: protein phosphatase -related [Arabidopsis
  misc_feature (1)..(221): Homolog of NCBI NO: 38344078 NR Description: OSJNBb0056F09.1 [Oryza sativa (japonica
MAGVGSAVRRLYLSVYNWVVFVGWAQVLYYAVTALLAGGHEGVYAAVERPLQLAQTAAVMEILHGLVGLVRSPVTATLPQIGSRLFLTWGILWSFPETQSHILVTSLVISWSITEIIRYSFFGLKEMLGFAPSWLLWLRYSTFLILYPIGILSEVGLIYIALPYMKVSEKYFVKMPNKWNFSFDYFYTCVIAIGVYVPGGPHMFTYMLAQRKKALSKAKTA

SEQ ID NO: 51868 - protein, 162 aa, Glycine max
  peptide (1)..(162): Ceres Seq. ID no. 13638601
  misc_feature (1)..(160): Pfam Name: Protein tyrosine phosphatase-like protein, PTPLA Pfam Description: Protein tyrosine phosphatase-like protein, PTPLA
  misc_feature (1)..(157): Homolog of NCBI NO: 34869216 NR Description: similar to protein tyrosine phosphatase-like
  misc_feature (1)..(156): Homolog of NCBI NO: 27882121 NR Description: Similar to RIKEN cDNA 6330408J20 gene [Danio
  misc_feature (1)..(140): Homolog of NCBI NO: 11358666 NR Description: probable protein phosphatase - Arabidopsis
  misc_feature (1)..(160): Homolog of NCBI NO: 34895864 NR Description: P0009G03.12 [Oryza sativa (japonica
  misc_feature (1)..(162): Homolog of NCBI NO: 34895852 NR Description: P0009G03.5 [Oryza sativa (japonica
  misc_feature (1)..(135): Homolog of NCBI NO: 34895854 NR Description: P0009G03.6 [Oryza sativa (japonica
  misc_feature (1)..(143): Homolog of NCBI NO: 34895856 NR Description: P0009G03.7 [Oryza sativa (japonica
  misc_feature (1)..(161): Homolog of NCBI NO: 34895862 NR Description: P0009G03.11 [Oryza sativa (japonica
  misc_feature (1)..(160): Homolog of NCBI NO: 22326707 NR Description: protein phosphatase -related [Arabidopsis
  misc_feature (1)..(162): Homolog of NCBI NO: 38344078 NR Description: OSJNBb0056F09.1 [Oryza sativa (japonica
MEILHGLVGLVRSPVTATLPQIGSRLFLTWGILWSFPETQSHILVTSLVISWSITEIIRYSFFGLKEMLGFAPSWLLWLRYSTFLILYPIGILSEVGLIYIALPYMKVSEKYFVKMPNKWNFSFDYFYTCVIAIGVYVPGGPHMFTYMLAQRKKALSKAKTA

SEQ ID NO: 51869 - DNA, 878 bp, Glycine max
  misc_feature (1)..(878): Ceres Seq. ID no. 15172893
gattcccatccagcgtacagactaggcgacccccgcttcccgtcccctctctcctccacacgcctcgctccctctcccctcgtccgccgccgccgccgccaccatgggcaggggcaagttcaagggcaagccaaccggccgccgcaacttctccaccccggaggagatcgcttctggaacttcagggcgtccacgctcatttaagaagaatgtagctgaagcagaagaggaagaggaagaggtagaagaatctgaagaggaagaatccgaagacgacggtgaagagaagaaacataaaggaaccgaaggtgttattcaaattgaaaatccaaacctggtgaaagcaaagaatataaaagccaaagaagctgatcttggaaagacaactgaactctcgaggcgtgagagagaggagattgagaaacaaaaatctcatgagcgctatatgaagcttcaggagcaaggcaaaacagaacaggcgaagaaagatttggaacgtcttgctttaataaggcagcaaagagcagatgctgcaaagaaacgtgaagaggagaaagctgctaaagaacagaggaagactgaagcgcgcaaataactgcgaaggttgtggaggcatgagctaagctgagttgtgttgtctggatatttatttctatgcatcctagtatatttaaaccgggtctctgttccatcatctacatttccataaaaacagtgcattgacaagtgtaaagtagtcctgtcggcgtggcttgctgtaaacttgagcttggcagggtacacatttagtgagatcagcttatgtgagatttgctttcactcaaaaattggtatgaaaaataactattgaaatttaatgtgttggaggcccgagctgt

SEQ ID NO: 51870 - protein, 163 aa, Glycine max
  peptide (1)..(163): Ceres Seq. ID no. 15172894
  misc_feature (35)..(163): Pfam Name: Caldesmon Pfam Description: Caldesmon
  misc_feature (1)..(151): Homolog of NCBI NO: 31212553 NR Description: ENSANGP00000022311 [Anopheles gambiae]
  misc_feature (3)..(155): Homolog of NCBI NO: 1518855 NR Description: HASPP28
  misc_feature (1)..(163): Homolog of NCBI NO: 1136586 NR Description: PDGF associated protein
  misc_feature (1)..(163): Homolog of NCBI NO: 30584165 NR Description: Homo sapiens PDGFA associated protein 1
  misc_feature (1)..(163): Homolog of NCBI NO: 7657441 NR Description: PDGFA associated protein 1; PDGF associated
  misc_feature (1)..(163): Homolog of NCBI NO: 12018258 NR Description: kinase substrate HASPP28 [Rattus norvegicus]
  misc_feature (1)..(161): Homolog of NCBI NO: 28278503 NR Description: Similar to PDGFA associated protein 1 [Danio
  misc_feature (1)..(163): Homolog of NCBI NO: 31418215 NR Description: Unknown (protein for MGC:56344) [Danio rerio]
  misc_feature (1)..(163): Homolog of NCBI NO: 18422620 NR Description: expressed protein [Arabidopsis thaliana]
  misc_feature (1)..(152): Homolog of NCBI NO: 34909600 NR Description: P0435B05.20 [Oryza sativa (japonica
MGRGKFKGKPTGRRNFSTPEEIASGTSGRPRSFKKNVAEAEEEEEEVEESEEEESEDDGEEKKHKGTEGVIQIENPNLVKAKNIKAKEADLGKTTELSRREREEIEKQKSHERYMKLQEQGKTEQAKKDLERLALIRQQRADAAKKREEEKAAKEQRKTEARK

SEQ ID NO: 51871 - DNA, 917 bp, Glycine max
  misc_feature (1)..(917): Ceres Seq. ID no. 13638685
gcagttcccaaggcagagagagacgaaacagttagagagaagttgagagagagagagagagagtgcttccatggaatccgaacccacggttggtgtctctgcatcagcaccaccaccaccagccaccgatgatctccaatcgagcaacgcatcgtctccagccgacgccgccgcgcgtttgatccacgccgtggagcagcgccaacagcatcttctcgacaagacggtgcctcacgttctctaccgatggatcgcctgcctcgtcgtcgtgttgatctacttcgttcgcgtctacttggtggaaggcttctacatcatcacctacgcaatcggaatctaccttctcaacctcatcatcgctttcctctcccctcaagaagatcccgaggcttcgctcagcggcgggacgcttcctactcgtagatccgatgagtatcgaccgttcgttcgccgtctccccgagttcaaattctggttatcgatcattagggcatttgtcatcggttttatgatgacgttctttgaggtctttgacgtacctgttttctggccaatacttcttttctactgggtgatgctttttatcctcaccatgaggaaacagatacaacatatgatcaaatacagatatgttcctttctctttcggcaaacagaaatatggaaagaaacctgctccagcagagagcagtgaatgatcaaatcaaccgttctgttcagcaggtcttttcttttcttttgattgcctgaaactttgttagggatgaaatagaagaaacaatcaagcaggtagactctcgtagcctgtctcagacaagttttttttactcttttatcatcctgactatgtactggtttcacccgaagacaatgtatcttattattccagttttttgtcagtgagaataatgttttttt

SEQ ID NO: 51872 - protein, 208 aa, Glycine max
  peptide (1)..(208): Ceres Seq. ID no. 13638686
  misc_feature (20)..(200): Pfam Name: Rer1 family Pfam Description: Rer1 family
  misc_feature (1)..(136): Homolog of NCBI NO: 27817215 NR Description: putative endoplasmic reticulum retrieval protein
  misc_feature (15)..(196): Homolog of NCBI NO: 34894094 NR Description: putative Rer1A protein (AtRer1A)
  misc_feature (137)..(195): Homolog of NCBI NO: 35210534 NR Description: putative endoplasmatic reticulum retrieval
  misc_feature (10)..(140): Homolog of NCBI NO: 35210534 NR Description: putative endoplasmatic reticulum retrieval
  misc_feature (26)..(206): Homolog of NCBI NO: 15226596 NR Description: AtRer1B [Arabidopsis thaliana]
  misc_feature (26)..(206): Homolog of NCBI NO: 11281669 NR Description: endoplasmatic reticulum retrieval protein Rer1B
  misc_feature (21)..(208): Homolog of NCBI NO: 15234975 NR Description: AtRer1A [Arabidopsis thaliana]
  misc_feature (1)..(195): Homolog of NCBI NO: 7488292 NR Description: probable integral membrane protein At2g23310
  misc_feature (1)..(208): Homolog of NCBI NO: 30682033 NR Description: integral membrane protein -related [Arabidopsis
  misc_feature (1)..(208): Homolog of NCBI NO: 18400234 NR Description: integral membrane protein -related [Arabidopsis
MESEPTVGVSASAPPPPATDDLQSSNASSPADAAARLIHAVEQRQQHLLDKTVPHVLYRWIACLVVVLIYFVRVYLVEGFYIITYAIGIYLLNLIIAFLSPQEDPEASLSGGTLPTRRSDEYRPFVRRLPEFKFWLSIIRAFVIGFMMTFFEVFDVPVFWPILLFYWVMLFILTMRKQIQHMIKYRYVPFSFGKQKYGKKPAPAESSE

SEQ ID NO: 51873 - DNA, 649 bp, Glycine max
  misc_feature (1)..(649): Ceres Seq. ID no. 13638602
cacacttctagcaccccaatacaatgactttgcacctacctctctccctatttaaaacttcaatacacttcattgtgagtgtattttaatcttctttatcttcattcattggttctctctaaccaaccctctcttttcctaaatcctaattaaacacccctcaaccaaaaaaagcatgaagaagctcaatctaatactcagtaagtgcaagaacttgtcaaagcatctaggaagatcttcatcatttaatagcctaaggtccaagtttgctaaggaagacttatgggaaggaaatggcatgcaagaaggtgaacattgtgaaactgtatttgttggcagcacaaggaaacggtacgtgataagctccaagtatttgaaccatcctctcctcaaagctctcatcaacaattccaagcaaaagggcagtgatgaaagtgttttggtggtcaactgtgaggtggttctctttgatcatctactgtggatgctagaaaatgcagatcctaagtttggttctgactctttggaggaattggctgaactctatgtgttttaagagctttcaaagtgctaattgcatgcagatgcctaatgtatgaaaatatgtatgttgggttgtgcttgcatttttcagaatgttattgttaag

SEQ ID NO: 51874 - protein, 126 aa, Glycine max
  peptide (1)..(126): Ceres Seq. ID no. 13638603
  misc_feature (4)..(106): Pfam Name: Auxin responsive protein Pfam Description: Auxin responsive protein
  misc_feature (1)..(102): Homolog of NCBI NO: 15230601 NR Description: auxin-induced (indole-3-acetic acid induced)
  misc_feature (42)..(126): Homolog of NCBI NO: 18410081 NR Description: auxin-induced (indole-3-acetic acid induced)
  misc_feature (46)..(126): Homolog of NCBI NO: 30685273 NR Description: auxin-induced (indole-3-acetic acid induced)
  misc_feature (9)..(124): Homolog of NCBI NO: 21554070 NR Description: unknown [Arabidopsis thaliana]
  misc_feature (1)..(124): Homolog of NCBI NO: 15242071 NR Description: auxin-induced (indole-3-acetic acid induced)
  misc_feature (3)..(125): Homolog of NCBI NO: 21536952 NR Description: unknown [Arabidopsis thaliana]
  misc_feature (1)..(125): Homolog of NCBI NO: 18399805 NR Description: auxin-induced (indole-3-acetic acid induced)
MKKLNLILSKCKNLSKHLGRSSSFNSLRSKFAKEDLWEGNGMQEGEHCETVFVGSTRKRYVISSKYLNHPLLKALINNSKQKGSDESVLVVNCEVVLFDHLLWMLENADPKFGSDSLEELAELYVF

SEQ ID NO: 51875 - protein, 85 aa, Glycine max
  peptide (1)..(85): Ceres Seq. ID no. 13638604
  misc_feature (1)..(65): Pfam Name: Auxin responsive protein Pfam Description: Auxin responsive protein
  misc_feature (1)..(61): Homolog of NCBI NO: 15230601 NR Description: auxin-induced (indole-3-acetic acid induced)
  misc_feature (1)..(85): Homolog of NCBI NO: 18410081 NR Description: auxin-induced (indole-3-acetic acid induced)
  misc_feature (5)..(85): Homolog of NCBI NO: 30685273 NR Description: auxin-induced (indole-3-acetic acid induced)
  misc_feature (1)..(83): Homolog of NCBI NO: 21554070 NR Description: unknown [Arabidopsis thaliana]
  misc_feature (1)..(83): Homolog of NCBI NO: 15242071 NR Description: auxin-induced (indole-3-acetic acid induced)
  misc_feature (1)..(84): Homolog of NCBI NO: 21536952 NR Description: unknown [Arabidopsis thaliana]
  misc_feature (1)..(84): Homolog of NCBI NO: 18399805 NR Description: auxin-induced (indole-3-acetic acid induced)
MQEGEHCETVFVGSTRKRYVISSKYLNHPLLKALINNSKQKGSDESVLVVNCEVVLFDHLLWMLENADPKFGSDSLEELAELYVF

SEQ ID NO: 51876 - DNA, 761 bp, Glycine max
  misc_feature (1)..(761): Ceres Seq. ID no. 13594814
aaaaacgactgtatccgcgtcctttactttccaaaaaataaatatttttcttcttgaagagattacaccttatccaattattggttgcattaggagaagccaaattttctttgtgtctctgagctgcgtatcgagctacaactccttcaatggcttccctatcaaccagttctctaagcttcaaagctccctccatacaatctaccagaacttctcaggtgttaagaaaacccttgagtttccagcctatctcctttggacgttttcagtcttcaaagaaccttcgtcttcagatcagttgtgcagcaaaaccagagacggtgcagaaagtgagtgacattgtcagggaacaattagctttgtctgccgacactgctctcactgccgagtccaagttctctgctcttggcgcagattctctcgacaccgtggagatagtgatggctttggaggaaaagtttaacataagtgtggaggaagctgatgctcaaaacattacgacgattcaggaggcagctgatttgattgaggatcttgctcagaagaaacctgcggcttaagcttcctaaactatcccggtttaacacaaaccggctgtccttttttttttctcctcctttctgagctttcttgttttcagatcattttattgtggtttattagaccatgtgttattattttttgttttcttcttttggaagttaagattggatgttgatgatgagaaaactttggtacgttgagattgattctttgtggtg

SEQ ID NO: 51877 - protein, 136 aa, Glycine max
  peptide (1)..(136): Ceres Seq. ID no. 13594815
  misc_feature (59)..(126): Pfam Name: Phosphopantetheine attachment site Pfam Description: Phosphopantetheine attachment site
  misc_feature (1)..(133): Homolog of NCBI NO: 113173 NR Description: Acyl carrier protein, chloroplast precursor (ACP)
  misc_feature (1)..(133): Homolog of NCBI NO: 1703085 NR Description: Acyl carrier protein 1, chloroplast precursor
  misc_feature (1)..(133): Homolog of NCBI NO: 4457219 NR Description: acyl carrier protein [Capsicum chinense]
  misc_feature (1)..(135): Homolog of NCBI NO: 3293271 NR Description: acyl carrier protein [Fragaria x ananassa]
  misc_feature (1)..(133): Homolog of NCBI NO: 20137323 NR Description: Acyl carrier protein 1, chloroplast precursor
  misc_feature (1)..(133): Homolog of NCBI NO: 113170 NR Description: Acyl carrier protein II, chloroplast precursor
  misc_feature (1)..(133): Homolog of NCBI NO: 5669599 NR Description: acyl carrier protein [Coriandrum sativum]
  misc_feature (5)..(135): Homolog of NCBI NO: 2465010 NR Description: acyl carrier protein [Fragaria vesca]
  misc_feature (1)..(133): Homolog of NCBI NO: 16518983 NR Description: acyl carrier protein [Olea europaea]
  misc_feature (1)..(136): Homolog of NCBI NO: 15234875 NR Description: acyl carrier protein family [Arabidopsis
MASLSTSSLSFKAPSIQSTRTSQVLRKPLSFQPISFGRFQSSKNLRLQISCAAKPETVQKVSDIVREQLALSADTALTAESKFSALGADSLDTVEIVMALEEKFNISVEEADAQNITTIQEAADLIEDLAQKKPAA

SEQ ID NO: 51878 - protein, 111 aa, Glycine max
  peptide (1)..(111): Ceres Seq. ID no. 13594816
KTTVSASFTFQKINIFLLEEITPYPIIGCIRRSQIFFVSLSCVSSYNSFNGFPINQFSKLQSSLHTIYQNFSGVKKTLEFPAYLLWTFSVFKEPSSSDQLCSKTRDGAESE

SEQ ID NO: 51879 - DNA, 557 bp, Glycine max
  misc_feature (1)..(557): Ceres Seq. ID no. 12609643
accttgcgttggccctccaccaccaccaaatcaccataagcgactagatctgattcgcaacacctccgaccatggcgaatgtggcgattcttgagctcaatggaaactgtggtaatacagtggaagagatagtgaaaatggagagagagatctttcccgagcatgaatcactgacttcattctttcacgatgaacttagaaagaagaacagtggattgctttatcttcacgtggatggcgaacttgtaggctatgtcatgtattcttggccttcttcctcgtatgccactatcaccgagctcgcagttaaggagcaatggaggggacaaggccacggagaggctttgttgaaagcagcaattcagaaatgcagtacaaggaaagttttgcgcataatgcttcatgtggatcccttgaggactcctgcagtgaatctttacaagaaacatggtttccaagttgacactttggttgaagtgtactactcctcagatagaaatgcttatagaatgtacttggacttcgattcaagttgaaggagaaaatgaataacattt

SEQ ID NO: 51880 - protein, 154 aa, Glycine max
  peptide (1)..(154): Ceres Seq. ID no. 12609644
  misc_feature (50)..(129): Pfam Name: Acetyltransferase (GNAT) family Pfam Description: Acetyltransferase (GNAT) family
  misc_feature (17)..(149): Homolog of NCBI NO: 18313208 NR Description: N-acetyltransferase [Pyrobaculum aerophilum]
  misc_feature (17)..(148): Homolog of NCBI NO: 14324228 NR Description: N-terminal acetyltransferase complex subunit
  misc_feature (17)..(148): Homolog of NCBI NO: 13540845 NR Description: N-terminal acetyltransferase complex, Ard1
  misc_feature (17)..(148): Homolog of NCBI NO: 16081233 NR Description: N-terminal acetyltransferase complex ard1 subunit
  misc_feature (17)..(147): Homolog of NCBI NO: 15920446 NR Description: 167aa long hypothetical N-terminal
  misc_feature (17)..(141): Homolog of NCBI NO: 16077660 NR Description: similar to ribosomal-protein-alanine
  misc_feature (17)..(149): Homolog of NCBI NO: 15606021 NR Description: ribosomal-protein-alanine acetyltransferase
  misc_feature (14)..(147): Homolog of NCBI NO: 37535760 NR Description: putative N-acetyltransferase
  misc_feature (4)..(154): Homolog of NCBI NO: 25305832 NR Description: protein F21B7.25 [imported] - Arabidopsis
  misc_feature (4)..(154): Homolog of NCBI NO: 15218861 NR Description: hypothetical protein; protein id: At1g03650.1
MANVAILELNGNCGNTVEEIVKMEREIFPEHESLTSFFHDELRKKNSGLLYLHVDGELVGYVMYSWPSSSYATITELAVKEQWRGQGHGEALLKAAIQKCSTRKVLRIMLHVDPLRTPAVNLYKKHGFQVDTLVEVYYSSDRNAYRMYLDFDSS

SEQ ID NO: 51881 - protein, 132 aa, Glycine max
  peptide (1)..(132): Ceres Seq. ID no. 12609645
  misc_feature (28)..(107): Pfam Name: Acetyltransferase (GNAT) family Pfam Description: Acetyltransferase (GNAT) family
  misc_feature (1)..(127): Homolog of NCBI NO: 18313208 NR Description: N-acetyltransferase [Pyrobaculum aerophilum]
  misc_feature (1)..(126): Homolog of NCBI NO: 14324228 NR Description: N-terminal acetyltransferase complex subunit
  misc_feature (1)..(126): Homolog of NCBI NO: 13540845 NR Description: N-terminal acetyltransferase complex, Ard1
  misc_feature (1)..(126): Homolog of NCBI NO: 16081233 NR Description: N-terminal acetyltransferase complex ard1 subunit
  misc_feature (1)..(125): Homolog of NCBI NO: 15920446 NR Description: 167aa long hypothetical N-terminal
  misc_feature (1)..(119): Homolog of NCBI NO: 16077660 NR Description: similar to ribosomal-protein-alanine
  misc_feature (1)..(127): Homolog of NCBI NO: 15606021 NR Description: ribosomal-protein-alanine acetyltransferase
  misc_feature (1)..(125): Homolog of NCBI NO: 37535760 NR Description: putative N-acetyltransferase
  misc_feature (1)..(132): Homolog of NCBI NO: 25305832 NR Description: protein F21B7.25 [imported] - Arabidopsis
  misc_feature (1)..(132): Homolog of NCBI NO: 15218861 NR Description: hypothetical protein; protein id: At1g03650.1
MEREIFPEHESLTSFFHDELRKKNSGLLYLHVDGELVGYVMYSWPSSSYATITELAVKEQWRGQGHGEALLKAAIQKCSTRKVLRIMLHVDPLRTPAVNLYKKHGFQVDTLVEVYYSSDRNAYRMYLDFDSS

SEQ ID NO: 51882 - protein, 92 aa, Glycine max
  peptide (1)..(92): Ceres Seq. ID no. 12609646
  misc_feature (1)..(67): Pfam Name: Acetyltransferase (GNAT) family Pfam Description: Acetyltransferase (GNAT) family
  misc_feature (1)..(87): Homolog of NCBI NO: 18313208 NR Description: N-acetyltransferase [Pyrobaculum aerophilum]
  misc_feature (1)..(86): Homolog of NCBI NO: 14324228 NR Description: N-terminal acetyltransferase complex subunit
  misc_feature (1)..(86): Homolog of NCBI NO: 13540845 NR Description: N-terminal acetyltransferase complex, Ard1
  misc_feature (1)..(86): Homolog of NCBI NO: 16081233 NR Description: N-terminal acetyltransferase complex ard1 subunit
  misc_feature (1)..(85): Homolog of NCBI NO: 15920446 NR Description: 167aa long hypothetical N-terminal
  misc_feature (1)..(79): Homolog of NCBI NO: 16077660 NR Description: similar to ribosomal-protein-alanine
  misc_feature (1)..(87): Homolog of NCBI NO: 15606021 NR Description: ribosomal-protein-alanine acetyltransferase
  misc_feature (1)..(85): Homolog of NCBI NO: 37535760 NR Description: putative N-acetyltransferase
  misc_feature (1)..(92): Homolog of NCBI NO: 25305832 NR Description: protein F21B7.25 [imported] - Arabidopsis
  misc_feature (1)..(92): Homolog of NCBI NO: 15218861 NR Description: hypothetical protein; protein id: At1g03650.1
MYSWPSSSYATITELAVKEQWRGQGHGEALLKAAIQKCSTRKVLRIMLHVDPLRTPAVNLYKKHGFQVDTLVEVYYSSDRNAYRMYLDFDSS

SEQ ID NO: 51883 - DNA, 625 bp, Glycine max
  misc_feature (1)..(625): Ceres Seq. ID no. 15172885
atttttcccactttcctttgagaaaacagagcaaaatggcactgagaatgtgggcttcctctacagcaaacgctcttaagctctcttcttctacctccaaatctcatctccttcctgctttctccatctccagatgcttctcctcagtgttggaaggactcaagtatgcaaattcacacgagtgggtgaaacatgatggctcagtggctaccattggcatcactgaccatgcccaggaccatttaggagaagttgtgtttgtggaactgccagaagagaaaagctcagtgagcaaagaaaagaactttggagctgtggagagtgtgaaggccacaagtgagattctatctccaatctctggtgaagtcattgaggttaacacaaagctaaccgattcacctggtttgatcaactcaagcccctatgaagatggttggatgataaaggtgaaaccaagcaaccctgcagagttggaaaccttgatgggtccaaaggaatacaccaagttctgcgaagaggaagatgctgctcactagagggtttcacctgtctatgtttcgtaccctatctctctcagctttgtatctctgtaatactaatttggttgaaagatgatcattcaaat

SEQ ID NO: 51884 - protein, 177 aa, Glycine max
  peptide (1)..(177): Ceres Seq. ID no. 15172886
  misc_feature (53)..(173): Pfam Name: Glycine cleavage H-protein Pfam Description: Glycine cleavage H-protein
  misc_feature (12)..(176): Homolog of NCBI NO: 1362140 NR Description: H-protein precursor - Flaveria trinervia
  misc_feature (13)..(177): Homolog of NCBI NO: 2119600 NR Description: glycine cleavage system protein H precursor
  misc_feature (12)..(177): Homolog of NCBI NO: 3688309 NR Description: H-Protein precursor [Flaveria pringlei]
  misc_feature (12)..(177): Homolog of NCBI NO: 1346118 NR Description: Glycine cleavage system H protein, mitochondrial
  misc_feature (12)..(177): Homolog of NCBI NO: 2887286 NR Description: H protein [Flaveria anomala]
  misc_feature (12)..(177): Homolog of NCBI NO: 2499417 NR Description: Glycine cleavage system H protein, mitochondrial
  misc_feature (12)..(177): Homolog of NCBI NO: 2147453 NR Description: glycine cleavage system protein H precursor
  misc_feature (12)..(177): Homolog of NCBI NO: 121080 NR Description: Glycine cleavage system H protein, mitochondrial
  misc_feature (12)..(177): Homolog of NCBI NO: 15226973 NR Description: glycine decarboxylase complex H-protein
  misc_feature (12)..(177): Homolog of NCBI NO: 15223217 NR Description: glycine cleavage system H protein precursor
FSHFPLRKQSKMALRMWASSTANALKLSSSTSKSHLLPAFSISRCFSSVLEGLKYANSHEWVKHDGSVATIGITDHAQDHLGEVVFVELPEEKSSVSKEKNFGAVESVKATSEILSPISGEVIEVNTKLTDSPGLINSSPYEDGWMIKVKPSNPAELETLMGPKEYTKFCEEEDAAH

SEQ ID NO: 51885 - protein, 166 aa, Glycine max
  peptide (1)..(166): Ceres Seq. ID no. 15172887
  misc_feature (42)..(162): Pfam Name: Glycine cleavage H-protein Pfam Description: Glycine cleavage H-protein
  misc_feature (1)..(165): Homolog of NCBI NO: 1362140 NR Description: H-protein precursor - Flaveria trinervia
  misc_feature (2)..(166): Homolog of NCBI NO: 2119600 NR Description: glycine cleavage system protein H precursor
  misc_feature (1)..(166): Homolog of NCBI NO: 3688309 NR Description: H-Protein precursor [Flaveria pringlei]
  misc_feature (1)..(166): Homolog of NCBI NO: 1346118 NR Description: Glycine cleavage system H protein, mitochondrial
  misc_feature (1)..(166): Homolog of NCBI NO: 2887286 NR Description: H protein [Flaveria anomala]
  misc_feature (1)..(166): Homolog of NCBI NO: 2499417 NR Description: Glycine cleavage system H protein, mitochondrial
  misc_feature (1)..(166): Homolog of NCBI NO: 2147453 NR Description: glycine cleavage system protein H precursor
  misc_feature (1)..(166): Homolog of NCBI NO: 121080 NR Description: Glycine cleavage system H protein, mitochondrial
  misc_feature (1)..(166): Homolog of NCBI NO: 15226973 NR Description: glycine decarboxylase complex H-protein
  misc_feature (1)..(166): Homolog of NCBI NO: 15223217 NR Description: glycine cleavage system H protein precursor
MALRMWASSTANALKLSSSTSKSHLLPAFSISRCFSSVLEGLKYANSHEWVKHDGSVATIGITDHAQDHLGEVVFVELPEEKSSVSKEKNFGAVESVKATSEILSPISGEVIEVNTKLTDSPGLINSSPYEDGWMIKVKPSNPAELETLMGPKEYTKFCEEEDAAH

SEQ ID NO: 51886 - protein, 162 aa, Glycine max
  peptide (1)..(162): Ceres Seq. ID no. 15172888
  misc_feature (38)..(158): Pfam Name: Glycine cleavage H-protein Pfam Description: Glycine cleavage H-protein
  misc_feature (1)..(161): Homolog of NCBI NO: 1362140 NR Description: H-protein precursor - Flaveria trinervia
  misc_feature (1)..(162): Homolog of NCBI NO: 2119600 NR Description: glycine cleavage system protein H precursor
  misc_feature (1)..(162): Homolog of NCBI NO: 3688309 NR Description: H-Protein precursor [Flaveria pringlei]
  misc_feature (1)..(162): Homolog of NCBI NO: 1346118 NR Description: Glycine cleavage system H protein, mitochondrial
  misc_feature (1)..(162): Homolog of NCBI NO: 2887286 NR Description: H protein [Flaveria anomala]
  misc_feature (1)..(162): Homolog of NCBI NO: 2499417 NR Description: Glycine cleavage system H protein, mitochondrial
  misc_feature (1)..(162): Homolog of NCBI NO: 2147453 NR Description: glycine cleavage system protein H precursor
  misc_feature (1)..(162): Homolog of NCBI NO: 121080 NR Description: Glycine cleavage system H protein, mitochondrial
  misc_feature (1)..(162): Homolog of NCBI NO: 15226973 NR Description: glycine decarboxylase complex H-protein
  misc_feature (1)..(162): Homolog of NCBI NO: 15223217 NR Description: glycine cleavage system H protein precursor
MWASSTANALKLSSSTSKSHLLPAFSISRCFSSVLEGLKYANSHEWVKHDGSVATIGITDHAQDHLGEVVFVELPEEKSSVSKEKNFGAVESVKATSEILSPISGEVIEVNTKLTDSPGLINSSPYEDGWMIKVKPSNPAELETLMGPKEYTKFCEEEDAAH

SEQ ID NO: 51887 - DNA, 1111 bp, Glycine max
  misc_feature (1)..(1111): Ceres Seq. ID no. 12609518
atcctcaggagtcaggacagggcttcagctaacctcgtggagcttttactccccgagctgccctcccccgttccaagagcaaatcagacgcagaggggagcggccgcagagcgagtcaaccaggcatggcgatggcgagctcgacgaggaggctggcgtttgtgctgctcgggctggccttttcggccgcgctcgcagagagcagagatgcatatatgaggagcgcagatcgatatgcctgcatactgacccaggagagcttccctgttgcaagcaaagggtcaggattaacttcggcaaacggaaagctgtgtgtactatgtgagcaatactcaaccgaagctctgatctacctgcgacaaaacgaaacacaggccgagattctcagtgccctccaccacacgtgtgcaagccttggtcctctaagacagcagtgcatcacgctggtcgactactacattcccgtgttcttcttggaggtttctgtagttaaacctgaggagttatgtgaatcagcgcacctctgcccaaagggggcggcgactcggtcgtccacacgaggggatgcctgtggtctatgccatcatgttcttgttgaagttcttatgatgcttaaggatcccaacaccaagctggagatagtcgggcttcttttcaaaacatgcagcaaggcgaagaactacgaaccgcagtgcaagaggcttgtccttgactacatcccactgattctggtgaagacccaggagttccttgagacgacggacgtctgctttgcgacacatgcctgtaaaacaggcatgcaagcaaccattcctctctccgccgctttgtgaagaacaaatatgtagggatcatacaggggcaaagaagcctgtaaatgttcctcctgtattttgctcaagcactgccaagctatgaaacttggttgtgcgagggtttgtctgtacaatttgagctctgctctctgaagtttatgcagcaagccagcagctgtactatcattcatttgctcagcacataatcttctcggagcagcatactgagcaattgtgaaagttacatcacattgtatctactggctatatatccagtcatgatggtactattatcc

SEQ ID NO: 51888 - protein, 235 aa, Glycine max
  peptide (1)..(235): Ceres Seq. ID no. 12609519
  misc_feature (60)..(98): Pfam Name: Saposin-like type B, region 1 Pfam Description: Saposin-like type B, region 1
  misc_feature (60)..(235): Homolog of NCBI NO: 34878577 NR Description: similar to prosaposin (variant Gaucher disease
  misc_feature (60)..(235): Homolog of NCBI NO: 26324414 NR Description: unnamed protein product [Mus musculus]
  misc_feature (60)..(235): Homolog of NCBI NO: 26364659 NR Description: unnamed protein product [Mus musculus]
  misc_feature (59)..(221): Homolog of NCBI NO: 15241065 NR Description: putative protein
  misc_feature (65)..(234): Homolog of NCBI NO: 6942199 NR Description: putative protein [Vitis riparia]
  misc_feature (45)..(221): Homolog of NCBI NO: 15231028 NR Description: putative protein
  misc_feature (18)..(234): Homolog of NCBI NO: 34896130 NR Description: P0701D05.19 [Oryza sativa (japonica
MAMASSTRRLAFVLLGLAFSAALAESRDAYMRSADRYACILTQESFPVASKGSGLTSANGKLCVLCEQYSTEALIYLRQNETQAEILSALHHTCASLGPLRQQCITLVDYYIPVFFLEVSVVKPEELCESAHLCPKGAATRSSTRGDACGLCHHVLVEVLMMLKDPNTKLEIVGLLFKTCSKAKNYEPQCKRLVLDYIPLILVKTQEFLETTDVCFATHACKTGMQATIPLSAAL

SEQ ID NO: 51889 - protein, 233 aa, Glycine max
  peptide (1)..(233): Ceres Seq. ID no. 12609520
  misc_feature (58)..(96): Pfam Name: Saposin-like type B, region 1 Pfam Description: Saposin-like type B, region 1
  misc_feature (58)..(233): Homolog of NCBI NO: 34878577 NR Description: similar to prosaposin (variant Gaucher disease
  misc_feature (58)..(233): Homolog of NCBI NO: 26324414 NR Description: unnamed protein product [Mus musculus]
  misc_feature (58)..(233): Homolog of NCBI NO: 26364659 NR Description: unnamed protein product [Mus musculus]
  misc_feature (57)..(219): Homolog of NCBI NO: 15241065 NR Description: putative protein
  misc_feature (63)..(232): Homolog of NCBI NO: 6942199 NR Description: putative protein [Vitis riparia]
  misc_feature (43)..(219): Homolog of NCBI NO: 15231028 NR Description: putative protein
  misc_feature (16)..(232): Homolog of NCBI NO: 34896130 NR Description: P0701D05.19 [Oryza sativa (japonica
MASSTRRLAFVLLGLAFSAALAESRDAYMRSADRYACILTQESFPVASKGSGLTSANGKLCVLCEQYSTEALIYLRQNETQAEILSALHHTCASLGPLRQQCITLVDYYIPVFFLEVSVVKPEELCESAHLCPKGAATRSSTRGDACGLCHHVLVEVLMMLKDPNTKLEIVGLLFKTCSKAKNYEPQCKRLVLDYIPLILVKTQEFLETTDVCFATHACKTGMQATIPLSAAL

SEQ ID NO: 51890 - protein, 205 aa, Glycine max
  peptide (1)..(205): Ceres Seq. ID no. 12609521
  misc_feature (30)..(68): Pfam Name: Saposin-like type B, region 1 Pfam Description: Saposin-like type B, region 1
  misc_feature (30)..(205): Homolog of NCBI NO: 34878577 NR Description: similar to prosaposin (variant Gaucher disease
  misc_feature (30)..(205): Homolog of NCBI NO: 26324414 NR Description: unnamed protein product [Mus musculus]
  misc_feature (30)..(205): Homolog of NCBI NO: 26364659 NR Description: unnamed protein product [Mus musculus]
  misc_feature (29)..(191): Homolog of NCBI NO: 15241065 NR Description: putative protein
  misc_feature (35)..(204): Homolog of NCBI NO: 6942199 NR Description: putative protein [Vitis riparia]
  misc_feature (15)..(191): Homolog of NCBI NO: 15231028 NR Description: putative protein
  misc_feature (1)..(204): Homolog of NCBI NO: 34896130 NR Description: P0701D05.19 [Oryza sativa (japonica
MRSADRYACILTQESFPVASKGSGLTSANGKLCVLCEQYSTEALIYLRQNETQAEILSALHHTCASLGPLRQQCITLVDYYIPVFFLEVSVVKPEELCESAHLCPKGAATRSSTRGDACGLCHHVLVEVLMMLKDPNTKLEIVGLLFKTCSKAKNYEPQCKRLVLDYIPLILVKTQEFLETTDVCFATHACKTGMQATIPLSAAL

SEQ ID NO: 51891 - DNA, 727 bp, Glycine max
  misc_feature (1)..(727): Ceres Seq. ID no. 12609656
gaccgatacaaaaaagctctccgaccgcaaaacgaaatcgaaaagcggagaaatcaaataaaaaatgtctcgtctcccgattctcatcgctgcttgtctcttcctctaccatctaccttctccactcgccgctgaaacagattcgccgatggcgtattctctcctccagagctacaacttccctgtcggaatccttccaaaaggagtcgtcgcttatgatttagatacatcgacaggcaaattccacgcctatttcaaagactcctgcagcttctcgctcgtgggttcttaccagctgaactacaaatcgacgatcagcggttacatctccgagaacaagctcacgaagctgactggtatcaaggtgaaagttctgttcttgtggctcaacatcgtcgaggtcatcaggaacggagacgagatggagttttccgttgggatcacgtcggcgaatttcgggatcaatgagttcttggcgtcgcctcagtgtggctgtggctttgagtgcaaggaatcgaagaaagagacgtatgacacaagcttaccttttgtttcttcttcttgaaaaggtacttttgatgagtgcccttttgaaaagatcgtgtctttatatatatatgtttcactctcttgtccaataagatcatagtttctgaatgtatatctcttattgccattggtcgaggaatcaaaacttatatatatgttcctggatggagtttgctct

SEQ ID NO: 51892 - protein, 166 aa, Glycine max
  peptide (1)..(166): Ceres Seq. ID no. 12609657
  misc_feature (10)..(148): Pfam Name: Protein of unknown function, DUF538 Pfam Description: Protein of unknown function, DUF538
  misc_feature (31)..(153): Homolog of NCBI NO: 18420052 NR Description: unknown protein; protein id: At5g19860.1
  misc_feature (21)..(142): Homolog of NCBI NO: 34906900 NR Description: P0470A12.30 [Oryza sativa (japonica
  misc_feature (30)..(149): Homolog of NCBI NO: 28273408 NR Description: unknown protein [Oryza sativa (japonica
  misc_feature (7)..(142): Homolog of NCBI NO: 34912320 NR Description: P0451D05.23 [Oryza sativa (japonica
  misc_feature (12)..(148): Homolog of NCBI NO: 21553750 NR Description: unknown [Arabidopsis thaliana]
  misc_feature (12)..(148): Homolog of NCBI NO: 18379012 NR Description: Expressed protein
  misc_feature (13)..(148): Homolog of NCBI NO: 15235335 NR Description: putative protein; protein id: At4g02360.1
  misc_feature (1)..(165): Homolog of NCBI NO: 18379014 NR Description: Expressed protein
  misc_feature (1)..(166): Homolog of NCBI NO: 18411923 NR Description: coded for by A. thaliana cDNA R64991
  misc_feature (1)..(166): Homolog of NCBI NO: 21554037 NR Description: unknown [Arabidopsis thaliana]
MSRLPILIAACLFLYHLPSPLAAETDSPMAYSLLQSYNFPVGILPKGVVAYDLDTSTGKFHAYFKDSCSFSLVGSYQLNYKSTISGYISENKLTKLTGIKVKVLFLWLNIVEVIRNGDEMEFSVGITSANFGINEFLASPQCGCGFECKESKKETYDTSLPFVSSS

SEQ ID NO: 51893 - protein, 138 aa, Glycine max
  peptide (1)..(138): Ceres Seq. ID no. 12609658
  misc_feature (1)..(120): Pfam Name: Protein of unknown function, DUF538 Pfam Description: Protein of unknown function, DUF538
  misc_feature (3)..(125): Homolog of NCBI NO: 18420052 NR Description: unknown protein; protein id: At5g19860.1
  misc_feature (1)..(114): Homolog of NCBI NO: 34906900 NR Description: P0470A12.30 [Oryza sativa (japonica
  misc_feature (2)..(121): Homolog of NCBI NO: 28273408 NR Description: unknown protein [Oryza sativa (japonica
  misc_feature (1)..(114): Homolog of NCBI NO: 34912320 NR Description: P0451D05.23 [Oryza sativa (japonica
  misc_feature (1)..(120): Homolog of NCBI NO: 21553750 NR Description: unknown [Arabidopsis thaliana]
  misc_feature (1)..(120): Homolog of NCBI NO: 18379012 NR Description: Expressed protein
  misc_feature (1)..(120): Homolog of NCBI NO: 15235335 NR Description: putative protein; protein id: At4g02360.1
  misc_feature (1)..(137): Homolog of NCBI NO: 18379014 NR Description: Expressed protein
  misc_feature (1)..(138): Homolog of NCBI NO: 18411923 NR Description: coded for by A. thaliana cDNA R64991
  misc_feature (1)..(138): Homolog of NCBI NO: 21554037 NR Description: unknown [Arabidopsis thaliana]
MAYSLLQSYNFPVGILPKGVVAYDLDTSTGKFHAYFKDSCSFSLVGSYQLNYKSTISGYISENKLTKLTGIKVKVLFLWLNIVEVIRNGDEMEFSVGITSANFGINEFLASPQCGCGFECKESKKETYDTSLPFVSSS

SEQ ID NO: 51894 - DNA, 744 bp, Glycine max
  misc_feature (1)..(744): Ceres Seq. ID no. 13594663
aagagctctctttaccatcttcccacttccctttgagaaagaaaacagaacaaagaaaaagaaagaaagcaaacagaaacaaatggcactgagaatgtgggcttcctctacagcaaacgctctcaagctctcttcttctgcatccagatctcatctccttccagctttctccatctccagatgcttctcctcagtgttggaaggacttaagtatgcaaattcacatgagtgggtgaaacatgaaggctcagtggctactattggcatcagtgaccatgcccaggatcatttaggagaagttgtgtttgtggagctgcctgaagaaaaaagttcagtgaccaaagaaaaaaactttggagcagtggagagtgtgaaggcaacaagtgagattatatctccaatctctggtgaagtcatcgaggttaacacaaagctcgctgattcacctggcttgattaactcaagcccttacgaagatggttggatgataaaggtgaaaccaagcaaccccgcagagctggaatccttgatgggtccaaaggaatacaccaagttctgcgaagaggaagatgctgctcactagggtttcttcgtctttcccagtatgtcctaaacaaaaagcaaaacaagagagaacccatgctaaatgtttcaatcttttcactacttctcaatgtttcctacctctgtatcaaatttgtatctctgtaatactgttttggttaaaaatcattcgatgagtcc

SEQ ID NO: 51895 - protein, 193 aa, Glycine max
  peptide (1)..(193): Ceres Seq. ID no. 13594664
  misc_feature (69)..(189): Pfam Name: Glycine cleavage H-protein Pfam Description: Glycine cleavage H-protein
  misc_feature (28)..(192): Homolog of NCBI NO: 1362140 NR Description: H-protein precursor - Flaveria trinervia
  misc_feature (29)..(193): Homolog of NCBI NO: 2119600 NR Description: glycine cleavage system protein H precursor
  misc_feature (28)..(193): Homolog of NCBI NO: 3688309 NR Description: H-Protein precursor [Flaveria pringlei]
  misc_feature (28)..(193): Homolog of NCBI NO: 1346118 NR Description: Glycine cleavage system H protein, mitochondrial
  misc_feature (28)..(193): Homolog of NCBI NO: 2887286 NR Description: H protein [Flaveria anomala]
  misc_feature (28)..(193): Homolog of NCBI NO: 2499417 NR Description: Glycine cleavage system H protein, mitochondrial
  misc_feature (28)..(193): Homolog of NCBI NO: 2147453 NR Description: glycine cleavage system protein H precursor
  misc_feature (28)..(193): Homolog of NCBI NO: 121080 NR Description: Glycine cleavage system H protein, mitochondrial
  misc_feature (28)..(193): Homolog of NCBI NO: 15226973 NR Description: glycine decarboxylase complex H-protein
  misc_feature (28)..(193): Homolog of NCBI NO: 15223217 NR Description: glycine cleavage system H protein precursor
RALFTIFPLPFEKENRTKKKKESKQKQMALRMWASSTANALKLSSSASRSHLLPAFSISRCFSSVLEGLKYANSHEWVKHEGSVATIGISDHAQDHLGEVVFVELPEEKSSVTKEKNFGAVESVKATSEIISPISGEVIEVNTKLADSPGLINSSPYEDGWMIKVKPSNPAELESLMGPKEYTKFCEEEDAAH

SEQ ID NO: 51896 - protein, 166 aa, Glycine max
  peptide (1)..(166): Ceres Seq. ID no. 13594665
  misc_feature (42)..(162): Pfam Name: Glycine cleavage H-protein Pfam Description: Glycine cleavage H-protein
  misc_feature (1)..(165): Homolog of NCBI NO: 1362140 NR Description: H-protein precursor - Flaveria trinervia
  misc_feature (2)..(166): Homolog of NCBI NO: 2119600 NR Description: glycine cleavage system protein H precursor
  misc_feature (1)..(166): Homolog of NCBI NO: 3688309 NR Description: H-Protein precursor [Flaveria pringlei]
  misc_feature (1)..(166): Homolog of NCBI NO: 1346118 NR Description: Glycine cleavage system H protein, mitochondrial
  misc_feature (1)..(166): Homolog of NCBI NO: 2887286 NR Description: H protein [Flaveria anomala]
  misc_feature (1)..(166): Homolog of NCBI NO: 2499417 NR Description: Glycine cleavage system H protein, mitochondrial
  misc_feature (1)..(166): Homolog of NCBI NO: 2147453 NR Description: glycine cleavage system protein H precursor
  misc_feature (1)..(166): Homolog of NCBI NO: 121080 NR Description: Glycine cleavage system H protein, mitochondrial
  misc_feature (1)..(166): Homolog of NCBI NO: 15226973 NR Description: glycine decarboxylase complex H-protein
  misc_feature (1)..(166): Homolog of NCBI NO: 15223217 NR Description: glycine cleavage system H protein precursor
MALRMWASSTANALKLSSSASRSHLLPAFSISRCFSSVLEGLKYANSHEWVKHEGSVATIGISDHAQDHLGEVVFVELPEEKSSVTKEKNFGAVESVKATSEIISPISGEVIEVNTKLADSPGLINSSPYEDGWMIKVKPSNPAELESLMGPKEYTKFCEEEDAAH

SEQ ID NO: 51897 - protein, 162 aa, Glycine max
  peptide (1)..(162): Ceres Seq. ID no. 13594666
  misc_feature (38)..(158): Pfam Name: Glycine cleavage H-protein Pfam Description: Glycine cleavage H-protein
  misc_feature (1)..(161): Homolog of NCBI NO: 1362140 NR Description: H-protein precursor - Flaveria trinervia
  misc_feature (1)..(162): Homolog of NCBI NO: 2119600 NR Description: glycine cleavage system protein H precursor
  misc_feature (1)..(162): Homolog of NCBI NO: 3688309 NR Description: H-Protein precursor [Flaveria pringlei]
  misc_feature (1)..(162): Homolog of NCBI NO: 1346118 NR Description: Glycine cleavage system H protein, mitochondrial
  misc_feature (1)..(162): Homolog of NCBI NO: 2887286 NR Description: H protein [Flaveria anomala]
  misc_feature (1)..(162): Homolog of NCBI NO: 2499417 NR Description: Glycine cleavage system H protein, mitochondrial
  misc_feature (1)..(162): Homolog of NCBI NO: 2147453 NR Description: glycine cleavage system protein H precursor
  misc_feature (1)..(162): Homolog of NCBI NO: 121080 NR Description: Glycine cleavage system H protein, mitochondrial
  misc_feature (1)..(162): Homolog of NCBI NO: 15226973 NR Description: glycine decarboxylase complex H-protein
  misc_feature (1)..(162): Homolog of NCBI NO: 15223217 NR Description: glycine cleavage system H protein precursor
MWASSTANALKLSSSASRSHLLPAFSISRCFSSVLEGLKYANSHEWVKHEGSVATIGISDHAQDHLGEVVFVELPEEKSSVTKEKNFGAVESVKATSEIISPISGEVIEVNTKLADSPGLINSSPYEDGWMIKVKPSNPAELESLMGPKEYTKFCEEEDAAH

SEQ ID NO: 51898 - DNA, 1213 bp, Glycine max
  misc_feature (1)..(1213): Ceres Seq. ID no. 13594758
acccaatacccacgagaacctctagctaccgtagcttagctgagcttcctagctgtagccatggccaagtatttccagagtgctcctgttagcaatgaagcattgaagcacaaggagattctgttggacggcctgtacatgcaccaggaccttgacggatcaccaaatcagaaccagaaaactatagtgaatcctaacctccctctgcagtttggctgcacagtggctaatgactggaccatatatgatggccttggccccgataagaagcttgttgcgcgtgcacaagggccacatatgggggcaggagtagccaaaggaagctggttcatatgtttcaacatggtgttcgtcgatgacaggtttgcgggttccagccttaaggtgctcggacattttgaagagccggtagaaggtgagtgggcaatccttggcgggacaggagagtttgcctatgcacaaggtgtggtcaccttcaagaaactccaggacggaagcactagggtcagacagcttcagatacgtgccatctgcctcagctttccatcgtcactttcaatgcctacgaagatggggccatggggtgaaaatggaggctccattcaagacatcaccacaggaaccccgatgcgcctgcaaagtgtgacactcagcagcgagagcagctggattgtctctcttgcatttacttatattgacaaacttggaaagaggcgcaacgaaggcccctggggtcctgacaaagggaacagtcaaaccatcgagttcggacctaaagaatatgtgacggaaatatcagggacaattgacaatgtcatatcgtcacttgttatcacgacaaacatcaaaaagtatggaccgtttgggcatgagaagggcaaccgtttcagcgccgccgtgccagaaaacacatgtgttgtgggattctttgccaggaccgggaatgctcttgatgccattggcgtttaccacggacccatagtggtttgaactggatttaatgctgctttgctttagtttatggcaatctcatgcgagttcattttaagggaaagtgtgtttgttccacatttgttttccagcaataacatggcaagggtcatgcttacgtctgtgatccatgtctctctagtgcaagagtactttctttagtttgtcagctgctatattctagctatgatttaataaagtgatgcaaggttgttttctagtg

SEQ ID NO: 51899 - protein, 309 aa, Glycine max
  peptide (1)..(309): Ceres Seq. ID no. 13594759
  misc_feature (182)..(306): Pfam Name: Jacalin-like lectin domain Pfam Description: Jacalin-like lectin domain
  misc_feature (158)..(306): Homolog of NCBI NO: 7489661 NR Description: benzothiadiazole-induced protein (clone WCI-1) -
  misc_feature (4)..(156): Homolog of NCBI NO: 37532940 NR Description: putative disease resistance protein
  misc_feature (86)..(235): Homolog of NCBI NO: 29893221 NR Description: unknown [Triticum aestivum]
  misc_feature (1)..(303): Homolog of NCBI NO: 16151819 NR Description: VER2 [Triticum aestivum]
  misc_feature (19)..(303): Homolog of NCBI NO: 9313027 NR Description: beta-glucosidase aggregating factor precursor
  misc_feature (5)..(297): Homolog of NCBI NO: 7489384 NR Description: jacalin homolog - barley
  misc_feature (5)..(307): Homolog of NCBI NO: 7489383 NR Description: jacalin homolog - barley
  misc_feature (5)..(307): Homolog of NCBI NO: 7489385 NR Description: jakalin homolog - barley
  misc_feature (4)..(249): Homolog of NCBI NO: 7489661 NR Description: benzothiadiazole-induced protein (clone WCI-1) -
  misc_feature (4)..(303): Homolog of NCBI NO: 21311647 NR Description: hessian fly response gene 1 protein [Triticum
MAKYFQSAPVSNEALKHKEILLDGLYMHQDLDGSPNQNQKTIVNPNLPLQFGCTVANDWTIYDGLGPDKKLVARAQGPHMGAGVAKGSWFICFNMVFVDDRFAGSSLKVLGHFEEPVEGEWAILGGTGEFAYAQGVVTFKKLQDGSTRVRQLQIRAICLSFPSSLSMPTKMGPWGENGGSIQDITTGTPMRLQSVTLSSESSWIVSLAFTYIDKLGKRRNEGPWGPDKGNSQTIEFGPKEYVTEISGTIDNVISSLVITTNIKKYGPFGHEKGNRFSAAVPENTCVVGFFARTGNALDAIGVYHGPIVV

SEQ ID NO: 51900 - protein, 283 aa, Glycine max
  peptide (1)..(283): Ceres Seq. ID no. 13594760
  misc_feature (156)..(280): Pfam Name: Jacalin-like lectin domain Pfam Description: Jacalin-like lectin domain
  misc_feature (132)..(280): Homolog of NCBI NO: 7489661 NR Description: benzothiadiazole-induced protein (clone WCI-1) -
  misc_feature (1)..(130): Homolog of NCBI NO: 37532940 NR Description: putative disease resistance protein
  misc_feature (60)..(209): Homolog of NCBI NO: 29893221 NR Description: unknown [Triticum aestivum]
  misc_feature (1)..(277): Homolog of NCBI NO: 16151819 NR Description: VER2 [Triticum aestivum]
  misc_feature (1)..(277): Homolog of NCBI NO: 9313027 NR Description: beta-glucosidase aggregating factor precursor
  misc_feature (1)..(271): Homolog of NCBI NO: 7489384 NR Description: jacalin homolog - barley
  misc_feature (1)..(281): Homolog of NCBI NO: 7489383 NR Description: jacalin homolog - barley
  misc_feature (1)..(281): Homolog of NCBI NO: 7489385 NR Description: jakalin homolog - barley
  misc_feature (1)..(223): Homolog of NCBI NO: 7489661 NR Description: benzothiadiazole-induced protein (clone WCI-1) -
  misc_feature (1)..(277): Homolog of NCBI NO: 21311647 NR Description: hessian fly response gene 1 protein [Triticum
MHQDLDGSPNQNQKTIVNPNLPLQFGCTVANDWTIYDGLGPDKKLVARAQGPHMGAGVAKGSWFICFNMVFVDDRFAGSSLKVLGHFEEPVEGEWAILGGTGEFAYAQGVVTFKKLQDGSTRVRQLQIRAICLSFPSSLSMPTKMGPWGENGGSIQDITTGTPMRLQSVTLSSESSWIVSLAFTYIDKLGKRRNEGPWGPDKGNSQTIEFGPKEYVTEISGTIDNVISSLVITTNIKKYGPFGHEKGNRFSAAVPENTCVVGFFARTGNALDAIGVYHGPIVV

SEQ ID NO: 51901 - protein, 230 aa, Glycine max
  peptide (1)..(230): Ceres Seq. ID no. 13594761
  misc_feature (103)..(227): Pfam Name: Jacalin-like lectin domain Pfam Description: Jacalin-like lectin domain
  misc_feature (79)..(227): Homolog of NCBI NO: 7489661 NR Description: benzothiadiazole-induced protein (clone WCI-1) -
  misc_feature (1)..(77): Homolog of NCBI NO: 37532940 NR Description: putative disease resistance protein
  misc_feature (7)..(156): Homolog of NCBI NO: 29893221 NR Description: unknown [Triticum aestivum]
  misc_feature (1)..(224): Homolog of NCBI NO: 16151819 NR Description: VER2 [Triticum aestivum]
  misc_feature (1)..(224): Homolog of NCBI NO: 9313027 NR Description: beta-glucosidase aggregating factor precursor
  misc_feature (1)..(218): Homolog of NCBI NO: 7489384 NR Description: jacalin homolog - barley
  misc_feature (1)..(228): Homolog of NCBI NO: 7489383 NR Description: jacalin homolog - barley
  misc_feature (1)..(228): Homolog of NCBI NO: 7489385 NR Description: jakalin homolog - barley
  misc_feature (1)..(170): Homolog of NCBI NO: 7489661 NR Description: benzothiadiazole-induced protein (clone WCI-1) -
  misc_feature (1)..(224): Homolog of NCBI NO: 21311647 NR Description: hessian fly response gene 1 protein [Triticum
MGAGVAKGSWFICFNMVFVDDRFAGSSLKVLGHFEEPVEGEWAILGGTGEFAYAQGVVTFKKLQDGSTRVRQLQIRAICLSFPSSLSMPTKMGPWGENGGSIQDITTGTPMRLQSVTLSSESSWIVSLAFTYIDKLGKRRNEGPWGPDKGNSQTIEFGPKEYVTEISGTIDNVISSLVITTNIKKYGPFGHEKGNRFSAAVPENTCVVGFFARTGNALDAIGVYHGPIVV

SEQ ID NO: 51902 - DNA, 1245 bp, Glycine max
  misc_feature (1)..(1245): Ceres Seq. ID no. 12609528
atcagttagattagggtttctggtcggctagttcatacggcgaggagcacgggaagggaggcggaactcgggagaggagatgggtgcgccgaagcagaagtggacgtcggaggaggaggaggcgctgcggcgcggcgtgctcaagcacggcgctggcaagtggcgcaccatccagaaggatcccgagttcagccccgtcctctcctctcgctccaacatcgacctcaaggacaaatggaggaatttgagttttagtgcaagtggactgggttcaagggataaacaaagggttccaaggccgaaagcaccttcgtcctccccatcacctagcccgcagcttctgcttctctcagccccgaataatgttgccgaggcttctccaccagaagattgtgaaaaaagcccacaggatgacaagactccgagtccaaagttgtacagttccatgatcctggaagctctcggcgaactgaaagagccaaatggttcagaagttgctacaatttgcaatttcatagagcaaaggcatgaggtgcaaccaaattttagaaggttgctttgtgccaaattacgaaggcttataggcgtgaacaaagttgagaagattgataagtcctataagctgacggattcatatgcaaaaagggctctggctccaatgaaagatccatctctaaagaagaaggattcagccaagtcatccaaggcagcaaagggtctaggccagtcgagtcctgcactggacgcagctgaagctgcagcgatgaaagtagcggacgcggaggccaaatcgcacctcgcaaacgagcacatgatggaggttgaaaggatcggcaagatggccgaggagaccgagtctctcctcgagctcgcctcagagctctacgagcgatgttcaagaggagaggcgctcacaatactgcaagtggcgcacagggagttttgatggtgttgtcgaccccgtcagctgcgcgccgacatctgctctcttgtacatggatggatggaagcgttggcccagcctgttgtcttcttgtccgcgtgttgtctctgttgtatcataactcgaatcaattcgttggttgtacctgagagggcatgcctttcattgcctaggaatgattttgagttggtgcattttggatactgtcctgtgttgaagtcagggaataatgtgtatctcgtcctgccgccttttcctgtatgtactctaatgcaagtttggtcatatgctccctccttggc

SEQ ID NO: 51903 - protein, 288 aa, Glycine max
  peptide (1)..(288): Ceres Seq. ID no. 12609529
  misc_feature (5)..(57): Pfam Name: Myb-like DNA-binding domain Pfam Description: Myb-like DNA-binding domain
  misc_feature (1)..(274): Homolog of NCBI NO: 21593573 NR Description: DNA-binding protein PcMYB1, putative [Arabidopsis
  misc_feature (1)..(274): Homolog of NCBI NO: 18481420 NR Description: telomere repeat binding factor 1 [Arabidopsis
  misc_feature (1)..(274): Homolog of NCBI NO: 15218592 NR Description: putative DNA-binding protein; protein id:
  misc_feature (1)..(278): Homolog of NCBI NO: 30685367 NR Description: myb-related DNA-binding protein -related
  misc_feature (1)..(278): Homolog of NCBI NO: 26452093 NR Description: putative myb-related DNA-binding protein
  misc_feature (1)..(288): Homolog of NCBI NO: 34105717 NR Description: Single myb histone 3 [Zea mays subsp. mays]
  misc_feature (1)..(287): Homolog of NCBI NO: 34105721 NR Description: Single myb histone 4 [Zea mays subsp. mays]
  misc_feature (1)..(287): Homolog of NCBI NO: 18463961 NR Description: histone H1-like protein [Zea mays]
  misc_feature (1)..(288): Homolog of NCBI NO: 27125811 NR Description: MYB28 protein [Oryza sativa (japonica
  misc_feature (1)..(288): Homolog of NCBI NO: 34910440 NR Description: histone H1-like protein [Oryza sativa (japonica
MGAPKQKWTSEEEEALRRGVLKHGAGKWRTIQKDPEFSPVLSSRSNIDLKDKWRNLSFSASGLGSRDKQRVPRPKAPSSSPSPSPQLLLLSAPNNVAEASPPEDCEKSPQDDKTPSPKLYSSMILEALGELKEPNGSEVATICNFIEQRHEVQPNFRRLLCAKLRRLIGVNKVEKIDKSYKLTDSYAKRALAPMKDPSLKKKDSAKSSKAAKGLGQSSPALDAAEAAAMKVADAEAKSHLANEHMMEVERIGKMAEETESLLELASELYERCSRGEALTILQVAHREF

SEQ ID NO: 51904 - protein, 166 aa, Glycine max
  peptide (1)..(166): Ceres Seq. ID no. 12609530
  misc_feature (1)..(62): Pfam Name: linker histone H1 and H5 family Pfam Description: linker histone H1 and H5 family
  misc_feature (1)..(152): Homolog of NCBI NO: 21593573 NR Description: DNA-binding protein PcMYB1, putative [Arabidopsis
  misc_feature (1)..(152): Homolog of NCBI NO: 18481420 NR Description: telomere repeat binding factor 1 [Arabidopsis
  misc_feature (1)..(152): Homolog of NCBI NO: 15218592 NR Description: putative DNA-binding protein; protein id:
  misc_feature (1)..(156): Homolog of NCBI NO: 30685367 NR Description: myb-related DNA-binding protein -related
  misc_feature (1)..(156): Homolog of NCBI NO: 26452093 NR Description: putative myb-related DNA-binding protein
  misc_feature (1)..(166): Homolog of NCBI NO: 34105717 NR Description: Single myb histone 3 [Zea mays subsp. mays]
  misc_feature (1)..(165): Homolog of NCBI NO: 34105721 NR Description: Single myb histone 4 [Zea mays subsp. mays]
  misc_feature (1)..(165): Homolog of NCBI NO: 18463961 NR Description: histone H1-like protein [Zea mays]
  misc_feature (1)..(166): Homolog of NCBI NO: 27125811 NR Description: MYB28 protein [Oryza sativa (japonica
  misc_feature (1)..(166): Homolog of NCBI NO: 34910440 NR Description: histone H1-like protein [Oryza sativa (japonica
MILEALGELKEPNGSEVATICNFIEQRHEVQPNFRRLLCAKLRRLIGVNKVEKIDKSYKLTDSYAKRALAPMKDPSLKKKDSAKSSKAAKGLGQSSPALDAAEAAAMKVADAEAKSHLANEHMMEVERIGKMAEETESLLELASELYERCSRGEALTILQVAHREF

SEQ ID NO: 51905 - DNA, 892 bp, Glycine max
  misc_feature (1)..(892): Ceres Seq. ID no. 12582856
aaaaaatcaatcaccgacctctcacgcacgcaagccttttcccccattctccggcggcggcagctatggcggcggtggcggcaaggtccgggctccgacggatgttctccatcgccgacttcgcgacgccgaacacgcgcatgttctccatctcggccttcgcgccgccgagcccgcccacgcctcccccgaaggccgacccctcccccaacctcttcgtctccgggctaagcaagcgtacaacaactgatggacttagagaagcttttgcaaagtttggggaagttgaacacgctcgagttgtcacagatcgtgtcactggtttttctaaggggtttggctttgtaaggtatgtttcggttgaagatgcaactaaaggaatagaaggaatggatggaaaatttctggatggatgggttatttttgccgaatatgctagacccagaccaccgccgcagatgggaggggcaactccgcagccacaacaatcatggggcactccttctggttcctggggctcacagtagatgaagggacaatcattctacctggctgtgcgtctgacagcgtatcagtcagccatcgcagtctacatttagatcatagctaccatggtgttgtcccaggtgtgaacacccttgcctgatccaatattcttgtcgtgttggactggtcgtttacggcctccacatggagaagcactaggggaaccttatatggaccgagcaggtattactgtcagcatgcaacagcttcggaccattgctaataatgtcttcttgtcccttttatttgaattgtcgtaagccttatcagctgctgatggcatgtgctgctcttgtactactggataatgactcgtagctcggaataagaacacgtttgcaagcgg

SEQ ID NO: 51906 - protein, 174 aa, Glycine max
  peptide (1)..(174): Ceres Seq. ID no. 12582857
  misc_feature (71)..(142): Pfam Name: RNA recognition motif. (a.k.a. RRM, RBD, or RNP domain) Pfam Description: RNA recognition motif. (a.k.a. RRM, RBD, or RNP
  misc_feature (6)..(150): Homolog of NCBI NO: 16198525 NR Description: Similar to cytotoxic granule-associated
  misc_feature (71)..(158): Homolog of NCBI NO: 15239958 NR Description: RRM-containing protein
  misc_feature (71)..(172): Homolog of NCBI NO: 21388662 NR Description: glycine-rich RNA-binding protein [Physcomitrella
  misc_feature (51)..(155): Homolog of NCBI NO: 7439994 NR Description: glycine-rich RNA-binding protein - garden pea
  misc_feature (51)..(174): Homolog of NCBI NO: 34906972 NR Description: putative glycine-rich RNA-binding protein 2
  misc_feature (51)..(159): Homolog of NCBI NO: 15219486 NR Description: RRM-containing RNA-binding protein, putative
  misc_feature (68)..(150): Homolog of NCBI NO: 15224298 NR Description: RRM-containing protein
  misc_feature (17)..(167): Homolog of NCBI NO: 15239676 NR Description: RRM-containing protein
  misc_feature (22)..(152): Homolog of NCBI NO: 34898598 NR Description: P0534A03.25 [Oryza sativa (japonica
  misc_feature (46)..(174): Homolog of NCBI NO: 38636774 NR Description: putative RNA recognition motif (RRM)-containing
KINHRPLTHASLFPHSPAAAAMAAVAARSGLRRMFSIADFATPNTRMFSISAFAPPSPPTPPPKADPSPNLFVSGLSKRTTTDGLREAFAKFGEVEHARVVTDRVTGFSKGFGFVRYVSVEDATKGIEGMDGKFLDGWVIFAEYARPRPPPQMGGATPQPQQSWGTPSGSWGSQ

SEQ ID NO: 51907 - protein, 153 aa, Glycine max
  peptide (1)..(153): Ceres Seq. ID no. 12582858
  misc_feature (50)..(121): Pfam Name: RNA recognition motif. (a.k.a. RRM, RBD, or RNP domain) Pfam Description: RNA recognition motif. (a.k.a. RRM, RBD, or RNP
  misc_feature (1)..(129): Homolog of NCBI NO: 16198525 NR Description: Similar to cytotoxic granule-associated
  misc_feature (50)..(137): Homolog of NCBI NO: 15239958 NR Description: RRM-containing protein
  misc_feature (50)..(151): Homolog of NCBI NO: 21388662 NR Description: glycine-rich RNA-binding protein [Physcomitrella
  misc_feature (30)..(134): Homolog of NCBI NO: 7439994 NR Description: glycine-rich RNA-binding protein - garden pea
  misc_feature (30)..(153): Homolog of NCBI NO: 34906972 NR Description: putative glycine-rich RNA-binding protein 2
  misc_feature (30)..(138): Homolog of NCBI NO: 15219486 NR Description: RRM-containing RNA-binding protein, putative
  misc_feature (47)..(129): Homolog of NCBI NO: 15224298 NR Description: RRM-containing protein
  misc_feature (1)..(146): Homolog of NCBI NO: 15239676 NR Description: RRM-containing protein
  misc_feature (1)..(131): Homolog of NCBI NO: 34898598 NR Description: P0534A03.25 [Oryza sativa (japonica
  misc_feature (25)..(153): Homolog of NCBI NO: 38636774 NR Description: putative RNA recognition motif (RRM)-containing
MAAVAARSGLRRMFSIADFATPNTRMFSISAFAPPSPPTPPPKADPSPNLFVSGLSKRTTTDGLREAFAKFGEVEHARVVTDRVTGFSKGFGFVRYVSVEDATKGIEGMDGKFLDGWVIFAEYARPRPPPQMGGATPQPQQSWGTPSGSWGSQ

SEQ ID NO: 51908 - protein, 141 aa, Glycine max
  peptide (1)..(141): Ceres Seq. ID no. 12582859
  misc_feature (38)..(109): Pfam Name: RNA recognition motif. (a.k.a. RRM, RBD, or RNP domain) Pfam Description: RNA recognition motif. (a.k.a. RRM, RBD, or RNP
  misc_feature (1)..(117): Homolog of NCBI NO: 16198525 NR Description: Similar to cytotoxic granule-associated
  misc_feature (38)..(125): Homolog of NCBI NO: 15239958 NR Description: RRM-containing protein
  misc_feature (38)..(139): Homolog of NCBI NO: 21388662 NR Description: glycine-rich RNA-binding protein [Physcomitrella
  misc_feature (18)..(122): Homolog of NCBI NO: 7439994 NR Description: glycine-rich RNA-binding protein - garden pea
  misc_feature (18)..(141): Homolog of NCBI NO: 34906972 NR Description: putative glycine-rich RNA-binding protein 2
  misc_feature (18)..(126): Homolog of NCBI NO: 15219486 NR Description: RRM-containing RNA-binding protein, putative
  misc_feature (35)..(117): Homolog of NCBI NO: 15224298 NR Description: RRM-containing protein
  misc_feature (1)..(134): Homolog of NCBI NO: 15239676 NR Description: RRM-containing protein
  misc_feature (1)..(119): Homolog of NCBI NO: 34898598 NR Description: P0534A03.25 [Oryza sativa (japonica
  misc_feature (13)..(141): Homolog of NCBI NO: 38636774 NR Description: putative RNA recognition motif (RRM)-containing
MFSIADFATPNTRMFSISAFAPPSPPTPPPKADPSPNLFVSGLSKRTTTDGLREAFAKFGEVEHARVVTDRVTGFSKGFGFVRYVSVEDATKGIEGMDGKFLDGWVIFAEYARPRPPPQMGGATPQPQQSWGTPSGSWGSQ

SEQ ID NO: 51909 - DNA, 805 bp, Glycine max
  misc_feature (1)..(805): Ceres Seq. ID no. 13594762
gctagcttctcaagagggataagagagaaacacagagcaagaagataagagagaagcaaagcttgagatggcgcaaaccatggcgtccatgaccggcctgtcgcagggcgtgcgtctcccaggcccggccggcaggcgcgccagcaggttcaccgtgagggcgtcgtcggcggaggccgaggccgccggccgccgcgcggtccttggcctcatggccagcggagtcgtcgggagcgcgttcgctcaggtggtgcacgccggcaccgtcgcggccatcaaggttggccccccgccgccgctctccggtggactccccggaacggacaactcggacgaggcaagggacttcgacctgcccctgaagaaccggttctacctgcagccgctgccaccggcggaggcggcggtgcgggccaaggagtcggcccaggacatcctcaacctcaagccgctcatcgacaagaagcaatggccgtacgtcatgaacgacctccgcctcagggcctcctacctgcgctacgacctcaagaccgtcatctcctccaagaccaccaaggaggagaagaaggacctcaaggacctcaccggcaagctcttcgccaccctcgacgggcttgaccatgcagccaagatcaagagccccaccgaggccgagaagtactacggcgagaccaagactgttctcggcgatgtcctcgccaagctaggctagatggatcggcataatggccgtgttgctttcaggccttttatgtttgttcatatttggaagccggcaatgtaacttccctgttgataatatgtc

SEQ ID NO: 51910 - protein, 214 aa, Glycine max
  peptide (1)..(214): Ceres Seq. ID no. 13594763
  misc_feature (24)..(214): Pfam Name: Oxygen evolving enhancer protein 3 (PsbQ) Pfam Description: Oxygen evolving enhancer protein 3 (PsbQ)
  misc_feature (3)..(214): Homolog of NCBI NO: 11133850 NR Description: Oxygen-evolving enhancer protein 3, chloroplast (OEE3) (16 kDa subunit of oxygen evolving system of photosystem
  misc_feature (70)..(214): Homolog of NCBI NO: 34810268 NR Description: Chain A, Crystal Structure Of Psbq Polypeptide Of
  misc_feature (26)..(213): Homolog of NCBI NO: 31096349 NR Description: oxygen-evolving enhancer protein 3 precursor
  misc_feature (22)..(214): Homolog of NCBI NO: 15234637 NR Description: oxygen-evolving complex protein 16, chloroplast
  misc_feature (16)..(214): Homolog of NCBI NO: 4583542 NR Description: 16 kDa polypeptide of oxygen-evolving complex
  misc_feature (11)..(214): Homolog of NCBI NO: 131397 NR Description: Oxygen-evolving enhancer protein 3, chloroplast (OEE3) (16 kDa subunit of oxygen evolving system of photosystem
  misc_feature (16)..(214): Homolog of NCBI NO: 15233587 NR Description: oxygen-evolving complex protein 16, chloroplast
  misc_feature (1)..(214): Homolog of NCBI NO: 11134066 NR Description: Oxygen-evolving enhancer protein 3-2, chloroplast (OEE3) (16 kDa subunit of oxygen evolving system of photosystem (OEC 16 kDa subunit) (Ferredoxin-NADP reductase binding protein)
  misc_feature (1)..(214): Homolog of NCBI NO: 11134057 NR Description: Oxygen-evolving enhancer protein 3-1, chloroplast (OEE3) (16 kDa subunit of oxygen evolving system of photosystem
  misc_feature (5)..(214): Homolog of NCBI NO: 34393258 NR Description: putative Oxygen-evolving enhancer protein 3-1,
MAQTMASMTGLSQGVRLPGPAGRRASRFTVRASSAEAEAAGRRAVLGLMASGVVGSAFAQVVHAGTVAAIKVGPPPPLSGGLPGTDNSDEARDFDLPLKNRFYLQPLPPAEAAVRAKESAQDILNLKPLIDKKQWPYVMNDLRLRASYLRYDLKTVISSKTTKEEKKDLKDLTGKLFATLDGLDHAAKIKSPTEAEKYYGETKTVLGDVLAKLG

SEQ ID NO: 51911 - protein, 210 aa, Glycine max
  peptide (1)..(210): Ceres Seq. ID no. 13594764
  misc_feature (20)..(210): Pfam Name: Oxygen evolving enhancer protein 3 (PsbQ) Pfam Description: Oxygen evolving enhancer protein 3 (PsbQ)
  misc_feature (1)..(210): Homolog of NCBI NO: 11133850 NR Description: Oxygen-evolving enhancer protein 3, chloroplast (OEE3) (16 kDa subunit of oxygen evolving system of photosystem
  misc_feature (66)..(210): Homolog of NCBI NO: 34810268 NR Description: Chain A, Crystal Structure Of Psbq Polypeptide Of
  misc_feature (22)..(209): Homolog of NCBI NO: 31096349 NR Description: oxygen-evolving enhancer protein 3 precursor
  misc_feature (18)..(210): Homolog of NCBI NO: 15234637 NR Description: oxygen-evolving complex protein 16, chloroplast
  misc_feature (12)..(210): Homolog of NCBI NO: 4583542 NR Description: 16 kDa polypeptide of oxygen-evolving complex
  misc_feature (7)..(210): Homolog of NCBI NO: 131397 NR Description: Oxygen-evolving enhancer protein 3, chloroplast (OEE3) (16 kDa subunit of oxygen evolving system of photosystem
  misc_feature (12)..(210): Homolog of NCBI NO: 15233587 NR Description: oxygen-evolving complex protein 16, chloroplast
  misc_feature (1)..(210): Homolog of NCBI NO: 11134066 NR Description: Oxygen-evolving enhancer protein 3-2, chloroplast (OEE3) (16 kDa subunit of oxygen evolving system of photosystem (OEC 16 kDa subunit) (Ferredoxin-NADP reductase binding protein)
  misc_feature (1)..(210): Homolog of NCBI NO: 11134057 NR Description: Oxygen-evolving enhancer protein 3-1, chloroplast (OEE3) (16 kDa subunit of oxygen evolving system of photosystem
  misc_feature (1)..(210): Homolog of NCBI NO: 34393258 NR Description: putative Oxygen-evolving enhancer protein 3-1,
MASMTGLSQGVRLPGPAGRRASRFTVRASSAEAEAAGRRAVLGLMASGVVGSAFAQVVHAGTVAAIKVGPPPPLSGGLPGTDNSDEARDFDLPLKNRFYLQPLPPAEAAVRAKESAQDILNLKPLIDKKQWPYVMNDLRLRASYLRYDLKTVISSKTTKEEKKDLKDLTGKLFATLDGLDHAAKIKSPTEAEKYYGETKTVLGDVLAKLG

SEQ ID NO: 51912 - protein, 207 aa, Glycine max
  peptide (1)..(207): Ceres Seq. ID no. 13594765
  misc_feature (17)..(207): Pfam Name: Oxygen evolving enhancer protein 3 (PsbQ) Pfam Description: Oxygen evolving enhancer protein 3 (PsbQ)
  misc_feature (1)..(207): Homolog of NCBI NO: 11133850 NR Description: Oxygen-evolving enhancer protein 3, chloroplast (OEE3) (16 kDa subunit of oxygen evolving system of photosystem
  misc_feature (63)..(207): Homolog of NCBI NO: 34810268 NR Description: Chain A, Crystal Structure Of Psbq Polypeptide Of
  misc_feature (19)..(206): Homolog of NCBI NO: 31096349 NR Description: oxygen-evolving enhancer protein 3 precursor
  misc_feature (15)..(207): Homolog of NCBI NO: 15234637 NR Description: oxygen-evolving complex protein 16, chloroplast
  misc_feature (9)..(207): Homolog of NCBI NO: 4583542 NR Description: 16 kDa polypeptide of oxygen-evolving complex
  misc_feature (4)..(207): Homolog of NCBI NO: 131397 NR Description: Oxygen-evolving enhancer protein 3, chloroplast (OEE3) (16 kDa subunit of oxygen evolving system of photosystem
  misc_feature (9)..(207): Homolog of NCBI NO: 15233587 NR Description: oxygen-evolving complex protein 16, chloroplast
  misc_feature (1)..(207): Homolog of NCBI NO: 11134066 NR Description: Oxygen-evolving enhancer protein 3-2, chloroplast (OEE3) (16 kDa subunit of oxygen evolving system of photosystem (OEC 16 kDa subunit) (Ferredoxin-NADP reductase binding protein)
  misc_feature (1)..(207): Homolog of NCBI NO: 11134057 NR Description: Oxygen-evolving enhancer protein 3-1, chloroplast (OEE3) (16 kDa subunit of oxygen evolving system of photosystem
  misc_feature (1)..(207): Homolog of NCBI NO: 34393258 NR Description: putative Oxygen-evolving enhancer protein 3-1,
MTGLSQGVRLPGPAGRRASRFTVRASSAEAEAAGRRAVLGLMASGVVGSAFAQVVHAGTVAAIKVGPPPPLSGGLPGTDNSDEARDFDLPLKNRFYLQPLPPAEAAVRAKESAQDILNLKPLIDKKQWPYVMNDLRLRASYLRYDLKTVISSKTTKEEKKDLKDLTGKLFATLDGLDHAAKIKSPTEAEKYYGETKTVLGDVLAKLG

SEQ ID NO: 51913 - DNA, 796 bp, Glycine max
  misc_feature (1)..(796): Ceres Seq. ID no. 13594766
atcaagctagcagcacggcattaaactaatttgacagcgatcccgatccgtcatcacatctcacacgagacagtcgttcgatccgtccgtggagcagccatggcgcagctgatggacaaggccaaggggttcgtggccgagaagatatcgggggtgcagaagccggaggcggacctgtcggacatgtcggtgcagcacgttggccgcgacggcgccaccctgtccggccgcctcgacgtgcgcaacccctactcgcacaccatccccatctgcgagatcagctactccctcaagagcgccggccgcgacgtggcctccgggaccatgccggacccggggtcgctggtggccagcgacaccaccagcctcgacataccggtgaaggtgccgtacgacttcctgatgagcctggtgaaggacgccggcaaggactgggacctcgactacgagatgcgcgtcggcctcaccgtcgacctccccatcgtcggcaacttcacgctgccgctcaccaaggccggcgagctcaagctccccacgctctccgacctgttctaaacttaccgccgcacccagctaagtaggttcgaccgtgccgtactagctgctgcgctctccatcgcctgtacgggtgatgggtagtactgggctgggcgagcgggacgatcgatcgctgcctagctctgtttttacttcggatcgcggtgtgggtgtgcacgacgtaataatgatgtattgcgtgttgtatttctagacttttatacgtgaataaaataaacagacgggtttactgtactcc

SEQ ID NO: 51914 - protein, 151 aa, Glycine max
  peptide (1)..(151): Ceres Seq. ID no. 13594767
  misc_feature (2)..(151): Pfam Name: Late embryogenesis abundant protein Pfam Description: Late embryogenesis abundant protein
  misc_feature (5)..(151): Homolog of NCBI NO: 7595792 NR Description: late-embryogenesis abundant protein [Euphorbia
  misc_feature (1)..(151): Homolog of NCBI NO: 1170746 NR Description: Desiccation protectant protein Lea14 homolog
  misc_feature (1)..(151): Homolog of NCBI NO: 1170745 NR Description: Late embryogenesis abundant protein Lea14-A
  misc_feature (1)..(151): Homolog of NCBI NO: 34904186 NR Description: putative late embryogenesis abundant protein
MAQLMDKAKGFVAEKISGVQKPEADLSDMSVQHVGRDGATLSGRLDVRNPYSHTIPICEISYSLKSAGRDVASGTMPDPGSLVASDTTSLDIPVKVPYDFLMSLVKDAGKDWDLDYEMRVGLTVDLPIVGNFTLPLTKAGELKLPTLSDLF

SEQ ID NO: 51915 - protein, 147 aa, Glycine max
  peptide (1)..(147): Ceres Seq. ID no. 13594768
  misc_feature (1)..(147): Pfam Name: Late embryogenesis abundant protein Pfam Description: Late embryogenesis abundant protein
  misc_feature (1)..(147): Homolog of NCBI NO: 7595792 NR Description: late-embryogenesis abundant protein [Euphorbia
  misc_feature (1)..(147): Homolog of NCBI NO: 1170746 NR Description: Desiccation protectant protein Lea14 homolog
  misc_feature (1)..(147): Homolog of NCBI NO: 1170745 NR Description: Late embryogenesis abundant protein Lea14-A
  misc_feature (1)..(147): Homolog of NCBI NO: 34904186 NR Description: putative late embryogenesis abundant protein
MDKAKGFVAEKISGVQKPEADLSDMSVQHVGRDGATLSGRLDVRNPYSHTIPICEISYSLKSAGRDVASGTMPDPGSLVASDTTSLDIPVKVPYDFLMSLVKDAGKDWDLDYEMRVGLTVDLPIVGNFTLPLTKAGELKLPTLSDLF

SEQ ID NO: 51916 - protein, 123 aa, Glycine max
  peptide (1)..(123): Ceres Seq. ID no. 13594769
  misc_feature (1)..(123): Pfam Name: Late embryogenesis abundant protein Pfam Description: Late embryogenesis abundant protein
  misc_feature (1)..(123): Homolog of NCBI NO: 7595792 NR Description: late-embryogenesis abundant protein [Euphorbia
  misc_feature (1)..(123): Homolog of NCBI NO: 1170746 NR Description: Desiccation protectant protein Lea14 homolog
  misc_feature (1)..(123): Homolog of NCBI NO: 1170745 NR Description: Late embryogenesis abundant protein Lea14-A
  misc_feature (1)..(123): Homolog of NCBI NO: 34904186 NR Description: putative late embryogenesis abundant protein
MSVQHVGRDGATLSGRLDVRNPYSHTIPICEISYSLKSAGRDVASGTMPDPGSLVASDTTSLDIPVKVPYDFLMSLVKDAGKDWDLDYEMRVGLTVDLPIVGNFTLPLTKAGELKLPTLSDLF

SEQ ID NO: 51917 - DNA, 1173 bp, Glycine max
  misc_feature (1)..(1173): Ceres Seq. ID no. 15177083
aaaccaatgcaaagcaatccatttgagcttcacaaaactaccactccaacgtgtgctcctctctcaagtgtgtgtccgtgtgctagtagcctacagcaccgtttctctcgggaggtactccatatacacgttgattaacacgtatacacatccttcaacgacaatcatggtcggcgctcaagagcaagggctgaagctgctggtgccgcggagcggcgtgagcatatatgccatccgcgtccagatgccgcttgccatgaagggtctggcctacgactacctccccaaggaccccgggtgcaagagcgacctactcctcgcgtccaaccccgtgcacaagacgctgcccgtcctcatccacggcggcaggcccgtctgcgagtcgctcatcatcatggagtacctcgacaacgcattccccggcaacggcgcctccatcctccccgccgacccctaccgccgcgccgtcgctcgcttctgggccgcctacatcgacaacaaggtttgttcccttccctctcgtctagctagctagtttgagcttgaagaattggagttgcatcccagaggggctgttttgttgccacagatgttcccttcgtgcatcggcattctcagtacggcgaagcagcaggagaaagccgacaaggtggaggagaccttggcggcgttcgggctcctagaagccgccctggcagagtgctccaaagaaggggaggcggaggcagaggcgccgtttttcggtggtggctccatcgggttcctggacattgcgctcgggtgctatattccctggttcgaagcgataggccgccttgctggcatgccgccgttcctagacgcaacgaggacaccaaagcttgctgcgtgggcggggcggttcagggccgccgagccggtcattgccctgctgactgcggtggacaaggtggaggagtacatcactaaggtgctttatccaaagtggaacgtcgcggtcacagttggtaactaattaaagatggtgtctttccattgccggcgggggattgtgtcgatccaataattactctgccattgccggagcaggcgtgcactctcttcgatctgagttgttgacatgctgttgcgtgaatacattgaagcttcgtcatcttgcatctctctgtcaagaacgtttccaaatgcaatctt

SEQ ID NO: 51918 - protein, 177 aa, Glycine max
  peptide (1)..(177): Ceres Seq. ID no. 15177084
  misc_feature (64)..(136): Pfam Name: Glutathione S-transferase, N-terminal domain Pfam Description: Glutathione S-transferase, N-terminal domain
  misc_feature (56)..(177): Homolog of NCBI NO: 4127348 NR Description: glutathione transferase [Alopecurus myosuroides]
  misc_feature (56)..(177): Homolog of NCBI NO: 4127346 NR Description: glutathione transferase [Alopecurus myosuroides]
  misc_feature (56)..(168): Homolog of NCBI NO: 37536334 NR Description: putative glutathione S-transferase
  misc_feature (35)..(167): Homolog of NCBI NO: 6856103 NR Description: glutathione S-transferase [Gossypium hirsutum]
  misc_feature (59)..(168): Homolog of NCBI NO: 22022398 NR Description: glutathione-S-transferase Cla47 [Triticum
  misc_feature (56)..(168): Homolog of NCBI NO: 37536308 NR Description: putative glutathione S-transferase
  misc_feature (56)..(177): Homolog of NCBI NO: 37536330 NR Description: putative glutathione S-transferase
  misc_feature (58)..(168): Homolog of NCBI NO: 11385503 NR Description: glutathione S-transferase GST 26 [Zea mays]
  misc_feature (64)..(168): Homolog of NCBI NO: 37536356 NR Description: putative glutathione S-transferase
  misc_feature (56)..(168): Homolog of NCBI NO: 20067423 NR Description: glutathione transferase [Triticum aestivum]
NQCKAIHLSFTKLPLQRVLLSQVCVRVLVAYSTVSLGRYSIYTLINTYTHPSTTIMVGAQEQGLKLLVPRSGVSIYAIRVQMPLAMKGLAYDYLPKDPGCKSDLLLASNPVHKTLPVLIHGGRPVCESLIIMEYLDNAFPGNGASILPADPYRRAVARFWAAYIDNKVCSLPSRLAS

SEQ ID NO: 51919 - protein, 134 aa, Glycine max
  peptide (1)..(134): Ceres Seq. ID no. 15177085
  misc_feature (1)..(102): Pfam Name: Glutathione S-transferase, C-terminal domain Pfam Description: Glutathione S-transferase, C-terminal domain
  misc_feature (16)..(121): Homolog of NCBI NO: 8052535 NR Description: F3F9.13 [Arabidopsis thaliana]
  misc_feature (1)..(122): Homolog of NCBI NO: 6856103 NR Description: glutathione S-transferase [Gossypium hirsutum]
  misc_feature (1)..(121): Homolog of NCBI NO: 22022398 NR Description: glutathione-S-transferase Cla47 [Triticum
  misc_feature (14)..(120): Homolog of NCBI NO: 37536308 NR Description: putative glutathione S-transferase
  misc_feature (14)..(120): Homolog of NCBI NO: 37536330 NR Description: putative glutathione S-transferase
  misc_feature (1)..(121): Homolog of NCBI NO: 11385503 NR Description: glutathione S-transferase GST 26 [Zea mays]
  misc_feature (1)..(134): Homolog of NCBI NO: 37536356 NR Description: putative glutathione S-transferase
  misc_feature (1)..(134): Homolog of NCBI NO: 20067423 NR Description: glutathione transferase [Triticum aestivum]
MFPSCIGILSTAKQQEKADKVEETLAAFGLLEAALAECSKEGEAEAEAPFFGGGSIGFLDIALGCYIPWFEAIGRLAGMPPFLDATRTPKLAAWAGRFRAAEPVIALLTAVDKVEEYITKVLYPKWNVAVTVGN

SEQ ID NO: 51920 - protein, 122 aa, Glycine max
  peptide (1)..(122): Ceres Seq. ID no. 15177086
  misc_feature (9)..(81): Pfam Name: Glutathione S-transferase, N-terminal domain Pfam Description: Glutathione S-transferase, N-terminal domain
  misc_feature (1)..(122): Homolog of NCBI NO: 4127348 NR Description: glutathione transferase [Alopecurus myosuroides]
  misc_feature (1)..(122): Homolog of NCBI NO: 4127346 NR Description: glutathione transferase [Alopecurus myosuroides]
  misc_feature (1)..(113): Homolog of NCBI NO: 37536334 NR Description: putative glutathione S-transferase
  misc_feature (1)..(112): Homolog of NCBI NO: 6856103 NR Description: glutathione S-transferase [Gossypium hirsutum]
  misc_feature (4)..(113): Homolog of NCBI NO: 22022398 NR Description: glutathione-S-transferase Cla47 [Triticum
  misc_feature (1)..(113): Homolog of NCBI NO: 37536308 NR Description: putative glutathione S-transferase
  misc_feature (1)..(122): Homolog of NCBI NO: 37536330 NR Description: putative glutathione S-transferase
  misc_feature (3)..(113): Homolog of NCBI NO: 11385503 NR Description: glutathione S-transferase GST 26 [Zea mays]
  misc_feature (9)..(113): Homolog of NCBI NO: 37536356 NR Description: putative glutathione S-transferase
  misc_feature (1)..(113): Homolog of NCBI NO: 20067423 NR Description: glutathione transferase [Triticum aestivum]
MVGAQEQGLKLLVPRSGVSIYAIRVQMPLAMKGLAYDYLPKDPGCKSDLLLASNPVHKTLPVLIHGGRPVCESLIIMEYLDNAFPGNGASILPADPYRRAVARFWAAYIDNKVCSLPSRLAS

SEQ ID NO: 51921 - DNA, 795 bp, Glycine max
  misc_feature (1)..(795): Ceres Seq. ID no. 13638658
acctggacatccagacccgcgcgcccgtcccctctaacaacagatcaaccgatccttgaaaagtccaccctccaccacgggcaacaccatgtcgagcaccggcgcgtcgggcccggacgccgacgcggcggcnggcgaggggctggagctggcgcagttcggggcgggctgcttctggagcgtggagctggcgtaccagcggctccccggcgtggcgcgcaccgaggtgggctactcgcaggggcacctcgacgggcccacctaccgcgacgtgtgcggcggcggcaccggccacgccgaggtggtgcgcgtgcactacgaccccaaggagtgcccctacgccgtgcttctcgacgtcttctgggccaagcacaaccccaccacgctcaacaagcagggcaacgacgtcgggacgcagtaccggtcgggcatctactactacacggcggagcaggagcggcaggcgcgggagtcgctggcggagaagcagcgggagtggaaggagaagatcgtgacggaggtcctcccggcgaggaggttctacgcggccgaggactaccaccagcagtacctcgagaagggcggccagtccgccaagaagcgctgctccgaccccatccgctgctacggctgaaaccactgcccccgtccccgaccgcctaagctattggtgctgcattgccagtagcatcataaaggacaccgtctacctgactgttgttgttgttacaataaacaaacccattcgtgcagcgttttaaggtgaggtctggcactttgtttgctcgatgatct

SEQ ID NO: 51922 - protein, 220 aa, Glycine max
  peptide (1)..(220): Ceres Seq. ID no. 13638659
  misc_feature (45)..(45): Xaa is any aa, unknown or other
TWTSRPARPSPLTTDQPILEKSTLHHGQHHVEHRRVGPGRRRGGXRGAGAGAVRGGLLLERGAGVPAAPRRGAHRGGLLAGAPRRAHLPRRVRRRHRPRRGGARALRPQGVPLRRASRRLLGQAQPHHAQQAGQRRRDAVPVGHLLLHGGAGAAGAGVAGGEAAGVEGEDRDGGPPGEEVLRGRGLPPAVPREGRPVRQEALLRPHPLLRLKPLPPSPTA

SEQ ID NO: 51923 - protein, 181 aa, Glycine max
  peptide (1)..(181): Ceres Seq. ID no. 13638660
  misc_feature (20)..(172): Pfam Name: Peptide methionine sulfoxide reductase Pfam Description: Peptide methionine sulfoxide reductase
  misc_feature (2)..(181): Homolog of NCBI NO: 1709690 NR Description: Peptide methionine sulfoxide reductase
  misc_feature (12)..(181): Homolog of NCBI NO: 18424492 NR Description: peptide methionine sulfoxide reductase - like
  misc_feature (1)..(181): Homolog of NCBI NO: 1279212 NR Description: methionine sulfoxide reductase [Arabidopsis
  misc_feature (1)..(181): Homolog of NCBI NO: 15146324 NR Description: AT4g25130/F13M23_270 [Arabidopsis thaliana]
  misc_feature (1)..(181): Homolog of NCBI NO: 15234942 NR Description: protein-methionine-S-oxide reductase [Arabidopsis
  misc_feature (1)..(181): Homolog of NCBI NO: 21593143 NR Description: protein-methionine-S-oxide reductase [Arabidopsis
  misc_feature (1)..(181): Homolog of NCBI NO: 37536896 NR Description: putative peptide methionine sulfoxide reductase
  misc_feature (8)..(181): Homolog of NCBI NO: 38345256 NR Description: OSJNBb0011N17.17 [Oryza sativa (japonica
  misc_feature (1)..(181): Homolog of NCBI NO: 38345255 NR Description: OSJNBb0011N17.16 [Oryza sativa (japonica
  misc_feature (1)..(181): Homolog of NCBI NO: 40019251 NR Description: peptide methionine sulfoxide reductase [Secale
  misc_feature (15)..(15): Xaa is any aa, unknown or other
MSSTGASGPDADAAXGEGLELAQFGAGCFWSVELAYQRLPGVARTEVGYSQGHLDGPTYRDVCGGGTGHAEVVRVHYDPKECPYAVLLDVFWAKHNPTTLNKQGNDVGTQYRSGIYYYTAEQERQARESLAEKQREWKEKIVTEVLPARRFYAAEDYHQQYLEKGGQSAKKRCSDPIRCYG

SEQ ID NO: 51924 - DNA, 908 bp, Glycine max
  misc_feature (1)..(908): Ceres Seq. ID no. 15172878
ttgattcaccgctccccctccacctccacccggacccgcaagatcccgacccgccgcggcccccgctcctcgatcgattgatatcagacgcggccgggtgggcggaagaaggcggcggcggcggcgatgagcgcggtgaacatcaccaacgtggcggtgctggacaaccccaccgccttcctcaaccccttccagttcgagatctcctacgagtgcctcgtcccgctcgacgacgatctggaatggaagctcacatatgttggatcagctgaagacgaaacctatgatcagcaacttgagagcgtgcttgttggacctgtcaatgttgggacctaccgttttgtcttccaggctgacccaccggaccctttgaagatacgtgaagaagacatcattggtgtcaccgtgctgctgttgacatgctcctacgtgggtcaggagttcatgagggtgggttattatgtgaacaatgattacgacgaggagcagctgagagaagagcccccggcaaagctattacttgacagggtgtgagaaacattttggctgacaagccccgtgtcaccaagttcccaatcaacttccaccctgaacctggcacgagctcagaacagccgcaacaggatgcagaacagcagcagcagccgacttcaccggaaccacagacggctccagtagagccacatatggcgccactagagaatgtccccattgccgccgaccaatgatcagagttggggtgctaacggtctgttctccatgccttctatggtgtcttaatgttacgaatcgagagtggtggttctgcaatgtactgatctgttgtttacatttcacaatctgttctgtggcaaatgttgggtgtctagctatttcttgataaagagtacttctgcctattttgttac

SEQ ID NO: 51925 - protein, 135 aa, Glycine max
  peptide (1)..(135): Ceres Seq. ID no. 15172879
  misc_feature (1)..(135): Pfam Name: Anti-silencing protein, ASF1-like Pfam Description: Anti-silencing protein, ASF1-like
  misc_feature (1)..(129): Homolog of NCBI NO: 13384964 NR Description: ASF1 anti-silencing function 1 homolog A [Mus
  misc_feature (1)..(129): Homolog of NCBI NO: 6841514 NR Description: HSPC146 [Homo sapiens]
  misc_feature (1)..(129): Homolog of NCBI NO: 7661592 NR Description: ASF1 anti-silencing function 1 homolog A
  misc_feature (1)..(135): Homolog of NCBI NO: 31215032 NR Description: ENSANGP00000013594 [Anopheles gambiae]
  misc_feature (25)..(135): Homolog of NCBI NO: 34911252 NR Description: putative anti-silencing factor 1-like protein
  misc_feature (1)..(135): Homolog of NCBI NO: 17737649 NR Description: anti-silencing factor 1 CG9383-PA [Drosophila
  misc_feature (1)..(135): Homolog of NCBI NO: 32423381 NR Description: hypothetical protein [Neurospora crassa]
  misc_feature (12)..(135): Homolog of NCBI NO: 6069498 NR Description: S-locus protein 7 [Brassica rapa]
  misc_feature (1)..(135): Homolog of NCBI NO: 15240842 NR Description: anti-silencing factor 1-related protein
  misc_feature (1)..(135): Homolog of NCBI NO: 15219729 NR Description: (ASF1a) anti-silencing function 1a protein
MSAVNITNVAVLDNPTAFLNPFQFEISYECLVPLDDDLEWKLTYVGSAEDETYDQQLESVLVGPVNVGTYRFVFQADPPDPLKIREEDIIGVTVLLLTCSYVGQEFMRVGYYVNNDYDEEQLREEPPAKLLLDRV

SEQ ID NO: 51926 - protein, 89 aa, Glycine max
  peptide (1)..(89): Ceres Seq. ID no. 15172880
DSPLPLHLHPDPQDPDPPRPPLLDRLISDAAGWAEEGGGGGDERGEHHQRGGAGQPHRLPQPLPVRDLLRVPRPARRRSGMEAHICWIS

SEQ ID NO: 51927 - DNA, 930 bp, Glycine max
  misc_feature (1)..(930): Ceres Seq. ID no. 12609694
acacagacacatacgcctcacactctctatcagtcacgtcaggctcggtggatcacggtagcactagcttcagctagccagcctctgccactccgggcattttcttgcatccacgacggcaatggccaccgctgatgtccagaacccgacggccgcgctgacggaggaggcgcccacggtggagacgcccgtcgccgccgaggaggtcgcgaagacggaggaggcccccgcgccggccgaggccgaggtcaaggcgcctgctgcccccgtcgaggtcgaggagaccaaggaggtggcacctgccgccgctgagacggaggaggccaaggagcccgagccagcagctgcggccgagccggaggccgaggcccccaaagagacagaggcgccagccgtggtcgagacagagaccaaggaggccgtggctgaggcagagccagcggcgcccgaggaggtgaaggaggaggccgcgcctcctgccgagccagaagcaccggccgtcgccgaggaggcaccggctgcaccggaggaggcgcccgcggccgcggcagaggagccggccgccgcggtggccagcgtcagcgtgtgaggcgccggcgcgcgcggaggaggagctggccgggtcagcttccacggcggcggccgtgtgctcctacgtggcacggcgtgatgctgagtcagccagtggagtggagtggaatgatactttttactaggtgtggagtgggagtgctatgcgcggggtcgcgtgacgtgggctaaataaaagtgttgtcgggtcgggtcgacgcccagtgtcggtcagcagcgagcgacgcagtgccactctcgccggcctgcgtctgcgtctgcttagctggagccttgttacggtgtgtgtcacagtgtcagttccacctatgatcgatcggtatcctaaccggtttgcgt

SEQ ID NO: 51928 - protein, 155 aa, Glycine max
  peptide (1)..(155): Ceres Seq. ID no. 12609695
  misc_feature (1)..(152): Pfam Name: Brain acid soluble protein 1 (BASP1 protein) Pfam Description: Brain acid soluble protein 1 (BASP1 protein)
  misc_feature (1)..(151): Homolog of NCBI NO: 731172 NR Description: SKIN SECRETORY PROTEIN XP2 PRECURSOR (APEG
  misc_feature (1)..(154): Homolog of NCBI NO: 17537803 NR Description: Putative protein, nematode specific
  misc_feature (1)..(151): Homolog of NCBI NO: 71400 NR Description: dermal gland protein APEG precursor - African
  misc_feature (1)..(155): Homolog of NCBI NO: 1170600 NR Description: FRUIT PROTEIN PKIWI501
  misc_feature (1)..(155): Homolog of NCBI NO: 731172 NR Description: SKIN SECRETORY PROTEIN XP2 PRECURSOR (APEG
  misc_feature (1)..(155): Homolog of NCBI NO: 71400 NR Description: dermal gland protein APEG precursor - African
  misc_feature (13)..(153): Homolog of NCBI NO: 11691639 NR Description: RS2 protein [Beta vulgaris]
  misc_feature (1)..(146): Homolog of NCBI NO: 418139 NR Description: INDUCED STOLEN TIP PROTEIN TUB8
  misc_feature (1)..(150): Homolog of NCBI NO: 11691639 NR Description: RS2 protein [Beta vulgaris]
  misc_feature (1)..(153): Homolog of NCBI NO: 40287520 NR Description: induced stolon tip protein [Capsicum annuum]
MATADVQNPTAALTEEAPTVETPVAAEEVAKTEEAPAPAEAEVKAPAAPVEVEETKEVAPAAAETEEAKEPEPAAAAEPEAEAPKETEAPAVVETETKEAVAEAEPAAPEEVKEEAAPPAEPEAPAVAEEAPAAPEEAPAAAAEEPAAAVASVSV

SEQ ID NO: 51929 - DNA, 851 bp, Glycine max
  misc_feature (1)..(851): Ceres Seq. ID no. 13594870
atgttattatctcgattccctctcgattttgtgcatatcgatctctgtttggtgtttaattgctagatttcgattgcgtttcctctttgttcgctgatctagtgatttttcacctgcagaatcggccatgaaaggaggtaattcgaagactgactccagaaactccaagctctctgtgaacaagaagcctacgaaggcgagcaaagctgctgctaaagatcctaacaaacctaagaggccggccagtgctttcttcgtcttcatggaggacttccgtcagacttacaagaaggaacaccccagcaacaaatctgtcgctgctgttggaaaagctggtggagagaagtggaaatcactgtctgactctgagaaagctccctacgtagccaaggctgataagcgcaaggttgagtatgagaagaccatgaaggcctacaacaaaaagctggaggaaggtccaaaggaggacgaggaatctgacgacaagtcagtgtctgaggttagtgaagaggaggatgcggatgataggagtgatgaggaggaagacgattgactaagaagttgaagttggcagcattatataaggacctctgcaaggatctctctgatgccttttttttttttttttttttaatcttcttttcccttgcaatgttaacgaggctggttaaaattaaaatggggggttttctgcttttatatttactgctgtttctatttagtaagctaccactatctcccactgactctgattttacgggtaatggaaaaaaatgttttagatggtgatcttgatatttgcagctctatattttatggctgctctatgtttgttatgatcgtagattctt

SEQ ID NO: 51930 - protein, 141 aa, Glycine max
  peptide (1)..(141): Ceres Seq. ID no. 13594871
  misc_feature (35)..(104): Pfam Name: HMG (high mobility group) box Pfam Description: HMG (high mobility group) box
  misc_feature (1)..(137): Homolog of NCBI NO: 25402921 NR Description: protein F2D10.18 [imported] - Arabidopsis
  misc_feature (1)..(141): Homolog of NCBI NO: 18394898 NR Description: expressed protein [Arabidopsis thaliana]
  misc_feature (1)..(141): Homolog of NCBI NO: 18394900 NR Description: expressed protein [Arabidopsis thaliana]
  misc_feature (1)..(141): Homolog of NCBI NO: 25402921 NR Description: protein F2D10.18 [imported] - Arabidopsis
MKGGNSKTDSRNSKLSVNKKPTKASKAAAKDPNKPKRPASAFFVFMEDFRQTYKKEHPSNKSVAAVGKAGGEKWKSLSDSEKAPYVAKADKRKVEYEKTMKAYNKKLEEGPKEDEESDDKSVSEVSEEEDADDRSDEEEDD

SEQ ID NO: 51931 - protein, 96 aa, Glycine max
  peptide (1)..(96): Ceres Seq. ID no. 13594872
  misc_feature (1)..(59): Pfam Name: HMG (high mobility group) box Pfam Description: HMG (high mobility group) box
  misc_feature (1)..(92): Homolog of NCBI NO: 25402921 NR Description: protein F2D10.18 [imported] - Arabidopsis
  misc_feature (1)..(96): Homolog of NCBI NO: 18394898 NR Description: expressed protein [Arabidopsis thaliana]
  misc_feature (1)..(96): Homolog of NCBI NO: 18394900 NR Description: expressed protein [Arabidopsis thaliana]
  misc_feature (1)..(96): Homolog of NCBI NO: 25402921 NR Description: protein F2D10.18 [imported] - Arabidopsis
MEDFRQTYKKEHPSNKSVAAVGKAGGEKWKSLSDSEKAPYVAKADKRKVEYEKTMKAYNKKLEEGPKEDEESDDKSVSEVSEEEDADDRSDEEEDD

SEQ ID NO: 51932 - DNA, 1294 bp, Glycine max
  misc_feature (1)..(1294): Ceres Seq. ID no. 15177087
ccactcactgggcatcttcttcttcctcctcgttctgcatatcacacaagctagctagcagctgctgtcattgatcaaccttcgggagcccaagagagaacttcagcccttcaacaatggagcccatccctctcctgacgccgtacaagatgggccagctcaacctcgcccaccggatcgtcctggccccgctcacccgccagcgctcctacggcaacgtgccgcagccgcacgccgccttgtactactcccagcgcgcctccgccggcgggttgctcatcaccgaggccaccggggtctccgacacggcccaggggtaccgcgatacaccgggcgtctggacggcggagcacgtcgaggcatggaagccaattgtcgatgcagtgcacgccaagggcgcgctcatcttctgccagatctggcacgtcggccgcgtgtccacctatgagtaccagcccggcggtgccgcgccgctgtcgtgcacggacaagggggtgggcccgcaaatgagctatgacgggaggctggaggagttcgcgccgccgaggaggctcaaggtggaggagataccggccatcgtcgacgacttcaggaaggcggccaggaacgccatcgacgctggttttgacggtgtggagatccacggggcgaatgggtacctaattgagcagttcctcaaggacagtgcgaatgaccgcaccgacgagtatggtggcagcatcgagaaccggtgtcgctttgctctcgaggtggtggatgccgtcgtgaaggaggtcggtggccaccgtgtgggcatccgcctctcccccttcaccgactacatggactgccacgactctgacccgcacgccctcgcgctccacatgtccaccaaactcaacaactacaacatcatctatctccacatggtcgagccgaggatggccatcgttgatggacgaagggtggtcccgaagcgcttgctgccatacagggaggcgttcaagggtacatttatggccaatggcgggtacgaccgcgaggaagggggcaaggtggtcgctgatgggtacactgatttggtctccttcgggcgatcgttcttggcgaatccagacctgccaaagaggtttgagatcggcgcagagctgaacaagtatgataggatgaccttctacatctctgaccccgtcatcggctacactgactaccccttcctcgattaatagttgatgggggttctttgttcagtgatgcaactaattgtaccacacatcattaataaaatgtatcgtgcaagtgttgtgttttatcc

SEQ ID NO: 51933 - protein, 362 aa, Glycine max
  peptide (1)..(362): Ceres Seq. ID no. 15177088
  misc_feature (5)..(339): Pfam Name: NADH:flavin oxidoreductase / NADH oxidase family Pfam Description: NADH:flavin oxidoreductase / NADH oxidase family
  misc_feature (1)..(362): Homolog of NCBI NO: 40645345 NR Description: hypothetical protein [Pisum sativum]
  misc_feature (4)..(362): Homolog of NCBI NO: 40645459 NR Description: LEDI-5c protein [Lithospermum erythrorhizon]
  misc_feature (5)..(362): Homolog of NCBI NO: 7449901 NR Description: probable 12-oxophytodienoate reductase (EC
  misc_feature (1)..(362): Homolog of NCBI NO: 40645349 NR Description: hypothetical protein [Pisum sativum]
  misc_feature (1)..(362): Homolog of NCBI NO: 26450549 NR Description: putative 12-oxophytodienoate reductase OPR2
  misc_feature (2)..(362): Homolog of NCBI NO: 2765083 NR Description: 12-oxophytodienoate reductase [Arabidopsis
  misc_feature (1)..(362): Homolog of NCBI NO: 15223140 NR Description: 12-oxophytodienoate reductase (OPR2) [Arabidopsis
  misc_feature (2)..(362): Homolog of NCBI NO: 21593388 NR Description: 12-oxophytodienoate reductase (OPR1) [Arabidopsis
  misc_feature (2)..(362): Homolog of NCBI NO: 15223138 NR Description: 12-oxophytodienoate reductase (OPR1) [Arabidopsis
  misc_feature (4)..(362): Homolog of NCBI NO: 23495288 NR Description: 12-oxophytodienoic acid reductase [Oryza sativa]
MEPIPLLTPYKMGQLNLAHRIVLAPLTRQRSYGNVPQPHAALYYSQRASAGGLLITEATGVSDTAQGYRDTPGVWTAEHVEAWKPIVDAVHAKGALIFCQIWHVGRVSTYEYQPGGAAPLSCTDKGVGPQMSYDGRLEEFAPPRRLKVEEIPAIVDDFRKAARNAIDAGFDGVEIHGANGYLIEQFLKDSANDRTDEYGGSIENRCRFALEVVDAVVKEVGGHRVGIRLSPFTDYMDCHDSDPHALALHMSTKLNNYNIIYLHMVEPRMAIVDGRRVVPKRLLPYREAFKGTFMANGGYDREEGGKVVADGYTDLVSFGRSFLANPDLPKRFEIGAELNKYDRMTFYISDPVIGYTDYPFLD

SEQ ID NO: 51934 - protein, 351 aa, Glycine max
  peptide (1)..(351): Ceres Seq. ID no. 15177089
  misc_feature (1)..(328): Pfam Name: NADH:flavin oxidoreductase / NADH oxidase family Pfam Description: NADH:flavin oxidoreductase / NADH oxidase family
  misc_feature (1)..(351): Homolog of NCBI NO: 40645345 NR Description: hypothetical protein [Pisum sativum]
  misc_feature (1)..(351): Homolog of NCBI NO: 40645459 NR Description: LEDI-5c protein [Lithospermum erythrorhizon]
  misc_feature (1)..(351): Homolog of NCBI NO: 7449901 NR Description: probable 12-oxophytodienoate reductase (EC
  misc_feature (1)..(351): Homolog of NCBI NO: 40645349 NR Description: hypothetical protein [Pisum sativum]
  misc_feature (1)..(351): Homolog of NCBI NO: 26450549 NR Description: putative 12-oxophytodienoate reductase OPR2
  misc_feature (1)..(351): Homolog of NCBI NO: 2765083 NR Description: 12-oxophytodienoate reductase [Arabidopsis
  misc_feature (1)..(351): Homolog of NCBI NO: 15223140 NR Description: 12-oxophytodienoate reductase (OPR2) [Arabidopsis
  misc_feature (1)..(351): Homolog of NCBI NO: 21593388 NR Description: 12-oxophytodienoate reductase (OPR1) [Arabidopsis
  misc_feature (1)..(351): Homolog of NCBI NO: 15223138 NR Description: 12-oxophytodienoate reductase (OPR1) [Arabidopsis
  misc_feature (1)..(351): Homolog of NCBI NO: 23495288 NR Description: 12-oxophytodienoic acid reductase [Oryza sativa]
MGQLNLAHRIVLAPLTRQRSYGNVPQPHAALYYSQRASAGGLLITEATGVSDTAQGYRDTPGVWTAEHVEAWKPIVDAVHAKGALIFCQIWHVGRVSTYEYQPGGAAPLSCTDKGVGPQMSYDGRLEEFAPPRRLKVEEIPAIVDDFRKAARNAIDAGFDGVEIHGANGYLIEQFLKDSANDRTDEYGGSIENRCRFALEVVDAVVKEVGGHRVGIRLSPFTDYMDCHDSDPHALALHMSTKLNNYNIIYLHMVEPRMAIVDGRRVVPKRLLPYREAFKGTFMANGGYDREEGGKVVADGYTDLVSFGRSFLANPDLPKRFEIGAELNKYDRMTFYISDPVIGYTDYPFLD

SEQ ID NO: 51935 - protein, 232 aa, Glycine max
  peptide (1)..(232): Ceres Seq. ID no. 15177090
  misc_feature (1)..(209): Pfam Name: NADH:flavin oxidoreductase / NADH oxidase family Pfam Description: NADH:flavin oxidoreductase / NADH oxidase family
  misc_feature (1)..(232): Homolog of NCBI NO: 40645345 NR Description: hypothetical protein [Pisum sativum]
  misc_feature (1)..(232): Homolog of NCBI NO: 40645459 NR Description: LEDI-5c protein [Lithospermum erythrorhizon]
  misc_feature (1)..(232): Homolog of NCBI NO: 7449901 NR Description: probable 12-oxophytodienoate reductase (EC
  misc_feature (1)..(232): Homolog of NCBI NO: 40645349 NR Description: hypothetical protein [Pisum sativum]
  misc_feature (1)..(232): Homolog of NCBI NO: 26450549 NR Description: putative 12-oxophytodienoate reductase OPR2
  misc_feature (1)..(232): Homolog of NCBI NO: 2765083 NR Description: 12-oxophytodienoate reductase [Arabidopsis
  misc_feature (1)..(232): Homolog of NCBI NO: 15223140 NR Description: 12-oxophytodienoate reductase (OPR2) [Arabidopsis
  misc_feature (1)..(232): Homolog of NCBI NO: 21593388 NR Description: 12-oxophytodienoate reductase (OPR1) [Arabidopsis
  misc_feature (1)..(232): Homolog of NCBI NO: 15223138 NR Description: 12-oxophytodienoate reductase (OPR1) [Arabidopsis
  misc_feature (1)..(232): Homolog of NCBI NO: 23495288 NR Description: 12-oxophytodienoic acid reductase [Oryza sativa]
MSYDGRLEEFAPPRRLKVEEIPAIVDDFRKAARNAIDAGFDGVEIHGANGYLIEQFLKDSANDRTDEYGGSIENRCRFALEVVDAVVKEVGGHRVGIRLSPFTDYMDCHDSDPHALALHMSTKLNNYNIIYLHMVEPRMAIVDGRRVVPKRLLPYREAFKGTFMANGGYDREEGGKVVADGYTDLVSFGRSFLANPDLPKRFEIGAELNKYDRMTFYISDPVIGYTDYPFLD

SEQ ID NO: 51936 - DNA, 628 bp, Glycine max
  misc_feature (1)..(628): Ceres Seq. ID no. 12609201
aacaacagaacttacttacagaagcctctttaatttccaccccctctagattttctctctaactggttttccttagatctctcacaatgacctttaatcttatgcttttgttctgtttggttgcagtgatcagcaatgttgttgttccaactagtgcaagacaactcatgagtaccaccactacttcaccagacgagaaagaagtgatgatgaatattggcactgcaaatagaggacatgatgaaaaacatgatcatcaagtacaagtagatgatccaacaagcaagaactataacgtggaaaagaaagaagaaagatttgacaaaaaccaaatcatccctcccattcttccattcccatttggttttccatttccacgtccttcttttccatttccacgtgctgcttttccatttccacgttttccacttccaacaccattcgttccagggcttccatggccaataagccctgatgcggtttcttcatttccgtatcctcctgtagacatgcctgcttctccttaccttcatacaacaccttcatctccacctaactaaacatgtttccatgtgatgcatgggggtgatatccatttgcatgctatgtgcttctcgtgcggcacgag

SEQ ID NO: 51937 - protein, 157 aa, Glycine max
  peptide (1)..(157): Ceres Seq. ID no. 12609202
  misc_feature (85)..(156): Homolog of NCBI NO: 31194917 NR Description: ENSANGP00000001852 [Anopheles gambiae]
  misc_feature (89)..(156): Homolog of NCBI NO: 17158343 NR Description: wsv239 [shrimp white spot syndrome virus]
MTFNLMLLFCLVAVISNVVVPTSARQLMSTTTTSPDEKEVMMNIGTANRGHDEKHDHQVQVDDPTSKNYNVEKKEERFDKNQIIPPILPFPFGFPFPRPSFPFPRAAFPFPRFPLPTPFVPGLPWPISPDAVSSFPYPPVDMPASPYLHTTPSSPPN

SEQ ID NO: 51938 - protein, 152 aa, Glycine max
  peptide (1)..(152): Ceres Seq. ID no. 12609203
  misc_feature (80)..(151): Homolog of NCBI NO: 31194917 NR Description: ENSANGP00000001852 [Anopheles gambiae]
  misc_feature (84)..(151): Homolog of NCBI NO: 17158343 NR Description: wsv239 [shrimp white spot syndrome virus]
MLLFCLVAVISNVVVPTSARQLMSTTTTSPDEKEVMMNIGTANRGHDEKHDHQVQVDDPTSKNYNVEKKEERFDKNQIIPPILPFPFGFPFPRPSFPFPRAAFPFPRFPLPTPFVPGLPWPISPDAVSSFPYPPVDMPASPYLHTTPSSPPN

SEQ ID NO: 51939 - protein, 130 aa, Glycine max
  peptide (1)..(130): Ceres Seq. ID no. 12609204
  misc_feature (58)..(129): Homolog of NCBI NO: 31194917 NR Description: ENSANGP00000001852 [Anopheles gambiae]
  misc_feature (62)..(129): Homolog of NCBI NO: 17158343 NR Description: wsv239 [shrimp white spot syndrome virus]
MSTTTTSPDEKEVMMNIGTANRGHDEKHDHQVQVDDPTSKNYNVEKKEERFDKNQIIPPILPFPFGFPFPRPSFPFPRAAFPFPRFPLPTPFVPGLPWPISPDAVSSFPYPPVDMPASPYLHTTPSSPPN

SEQ ID NO: 51940 - DNA, 1075 bp, Glycine max
  misc_feature (1)..(1075): Ceres Seq. ID no. 13594845
aaaaaacgcattttctcggatctgagatcttagatcccaaacaccattgttcgtcctccaacatattgatccaagagattgaatagcttgagcttgctagctagtaatggcgagaaggcaagtaggttcaacacggcgtgtaggggatggtggaagcttcccttttgccggagctttgcactccaagtctagatcttctccgctactatctatttgccttgttcttgtgggggcttgcctactcataggttatgcttacagtggtccaggaatctttaaaagtatcaaagaagtcagcaaggttacaggtgactattcttgcacagcagaagtccaaagagccgtttctgttctgaagaaggcttatggagatgggatgcgcaaggtcttgcacgtaggccctgagacgtgctctgtggtttccactctcttgaaagaagatgagactgaagcatggggtgtcgaaccctatgacatcgaggatgctgattctcactgcaagagtcttgtcagcaaaggccttgtacgtgtcgctgatatcaagttccctctgccttaccgcccaaaatccttctctcttgttatcgtctcagatgctctggattatctctctcccaagtaccttaacaagaccgttcctgaactcgcaagggttgcttcagatggtgtagttctatttgcaggtctccccggtcagcagagagctaaagttgccgaactatctaaattcggtcgtcccgctaaaatgcgtagcgcatcgtggtggaaccgtttcttcgtccagacatccttagaagaaaacgaagcaccaagcaagaagtttgaacaggctgtatccaaaggatcatacaaaccagcctgccaagtcttccaccttaagccactacattaacaagccaccaccaatccccctactgttccacactaaagcatattcacacgtagagcccctcgcgaaacaagaacaacaaaaaatagcgtaagcgatattctccttgtattttgtaacaagtcagtttttttttttgtcatgttgtatccatcaacacagttttttttatattttattgagttt

SEQ ID NO: 51941 - protein, 261 aa, Glycine max
  peptide (1)..(261): Ceres Seq. ID no. 13594846
  misc_feature (91)..(261): Homolog of NCBI NO: 16649137 NR Description: Unknown protein [Arabidopsis thaliana]
  misc_feature (1)..(257): Homolog of NCBI NO: 34895744 NR Description: P0019D06.30 [Oryza sativa (japonica
  misc_feature (1)..(211): Homolog of NCBI NO: 9758568 NR Description: emb|CAB66910.1~gene_id:K22J17.2~similar to
  misc_feature (1)..(261): Homolog of NCBI NO: 18424995 NR Description: expressed protein [Arabidopsis thaliana]
  misc_feature (1)..(261): Homolog of NCBI NO: 21593192 NR Description: unknown [Arabidopsis thaliana]
  misc_feature (1)..(261): Homolog of NCBI NO: 18408931 NR Description: expressed protein [Arabidopsis thaliana]
MARRQVGSTRRVGDGGSFPFAGALHSKSRSSPLLSICLVLVGACLLIGYAYSGPGIFKSIKEVSKVTGDYSCTAEVQRAVSVLKKAYGDGMRKVLHVGPETCSVVSTLLKEDETEAWGVEPYDIEDADSHCKSLVSKGLVRVADIKFPLPYRPKSFSLVIVSDALDYLSPKYLNKTVPELARVASDGVVLFAGLPGQQRAKVAELSKFGRPAKMRSASWWNRFFVQTSLEENEAPSKKFEQAVSKGSYKPACQVFHLKPLH

SEQ ID NO: 51942 - protein, 171 aa, Glycine max
  peptide (1)..(171): Ceres Seq. ID no. 13594847
  misc_feature (1)..(171): Homolog of NCBI NO: 16649137 NR Description: Unknown protein [Arabidopsis thaliana]
  misc_feature (1)..(167): Homolog of NCBI NO: 34895744 NR Description: P0019D06.30 [Oryza sativa (japonica
  misc_feature (1)..(121): Homolog of NCBI NO: 9758568 NR Description: emb|CAB66910.1~gene_id:K22J17.2~similar to
  misc_feature (1)..(171): Homolog of NCBI NO: 18424995 NR Description: expressed protein [Arabidopsis thaliana]
  misc_feature (1)..(171): Homolog of NCBI NO: 21593192 NR Description: unknown [Arabidopsis thaliana]
  misc_feature (1)..(171): Homolog of NCBI NO: 18408931 NR Description: expressed protein [Arabidopsis thaliana]
MRKVLHVGPETCSVVSTLLKEDETEAWGVEPYDIEDADSHCKSLVSKGLVRVADIKFPLPYRPKSFSLVIVSDALDYLSPKYLNKTVPELARVASDGVVLFAGLPGQQRAKVAELSKFGRPAKMRSASWWNRFFVQTSLEENEAPSKKFEQAVSKGSYKPACQVFHLKPLH

SEQ ID NO: 51943 - DNA, 1059 bp, Glycine max
  misc_feature (1)..(1059): Ceres Seq. ID no. 15172862
agtcggccgcctcccccctccacctcctcccccagcgtcgcctcccgttcggaaccccaagctccccccgccgccggcgaaatggccccgaagcgaggcggcaaggcgccggtgccggcgaagaagaaggcggcggacaaggtggtgaacccactgttcgagaagaggccgaagcagttcggcatcggcggggcgctgccgcccaagaaggacctccaccggttcgtcaagtggcccaaggtcgtgcggatccagcgccagcgccgcatcctcaagcagcgcctcaaggttcccccggcgctccaccagttcacccgcaccctcgacaagaacctcgccaccaacctgtttaagatgcttctcaagtaccgccccgaggacaaggtggctaagaaggagaggcttctgaagagggcccaggctgaggctgaggggaaaaccgttgaggccaagaagccaattgttgtcaagtatggtcttaaccatgtcacttacctcatcgagcagagcaaggctcagctggtcgtcatcgctcatgatgttgacccaattgagctggttgtgtggctcccagccctgtgcaggaagatggaggttccatactgcattgttaagggaaaatcacgccttggatcgatcgttcacaagaagactgcctcagttctgtgcctcaccactgtgaagaacgaggacaagcttgagttcagcaagatcttggaggctatcaaggctaacttcaacgacaagtttgacgaggtcaggaagaagtggggcggtggtgtcatgggatccaagtcgcaggccaagaccaaggccagggaaaggctcatcgccaaggaggctgcgcagaggatgaactaagcctagccttatatgcgagagcatatgccatgtagtttccctttcagtgtgtcctgattttgacgaggaactcgaacccttttagcagcactgtggaatcgtattgtggttttctgattctctgttccgttctccagacttatgcaaagatcagatgaggtttacccatgtttggattctatatagttttatgtcccc

SEQ ID NO: 51944 - protein, 286 aa, Glycine max
  peptide (1)..(286): Ceres Seq. ID no. 15172863
  misc_feature (141)..(236): Pfam Name: Ribosomal protein L7Ae/L30e/S12e/Gadd45 family Pfam Description: Ribosomal protein L7Ae/L30e/S12e/Gadd45 family
  misc_feature (32)..(285): Homolog of NCBI NO: 40796182 NR Description: Ribosomal protein L7a [Mus musculus]
  misc_feature (32)..(285): Homolog of NCBI NO: 4506661 NR Description: ribosomal protein L7a
  misc_feature (13)..(284): Homolog of NCBI NO: 2119113 NR Description: ribosomal protein L7a, cytosolic - fruit fly
  misc_feature (1)..(285): Homolog of NCBI NO: 34853132 NR Description: similar to 60S ribosomal protein L7a (Surfeit
  misc_feature (13)..(284): Homolog of NCBI NO: 1173062 NR Description: 60S RIBOSOMAL PROTEIN L7A
  misc_feature (13)..(284): Homolog of NCBI NO: 17530825 NR Description: Ribosomal protein L7A CG3314-PD [Drosophila
  misc_feature (19)..(285): Homolog of NCBI NO: 20161741 NR Description: putative 60S ribosomal protein
  misc_feature (28)..(286): Homolog of NCBI NO: 15229338 NR Description: 60S ribosomal protein L7A (RPL7aB) [Arabidopsis
  misc_feature (28)..(286): Homolog of NCBI NO: 15226635 NR Description: 60S ribosomal protein L7A (RPL7aA) [Arabidopsis
  misc_feature (28)..(285): Homolog of NCBI NO: 548774 NR Description: 60S RIBOSOMAL PROTEIN L7A
SRPPPPSTSSPSVASRSEPQAPPAAGEMAPKRGGKAPVPAKKKAADKVVNPLFEKRPKQFGIGGALPPKKDLHRFVKWPKVVRIQRQRRILKQRLKVPPALHQFTRTLDKNLATNLFKMLLKYRPEDKVAKKERLLKRAQAEAEGKTVEAKKPIVVKYGLNHVTYLIEQSKAQLVVIAHDVDPIELVVWLPALCRKMEVPYCIVKGKSRLGSIVHKKTASVLCLTTVKNEDKLEFSKILEAIKANFNDKFDEVRKKWGGGVMGSKSQAKTKARERLIAKEAAQRMN

SEQ ID NO: 51945 - protein, 259 aa, Glycine max
  peptide (1)..(259): Ceres Seq. ID no. 15172864
  misc_feature (114)..(209): Pfam Name: Ribosomal protein L7Ae/L30e/S12e/Gadd45 family Pfam Description: Ribosomal protein L7Ae/L30e/S12e/Gadd45 family
  misc_feature (5)..(258): Homolog of NCBI NO: 40796182 NR Description: Ribosomal protein L7a [Mus musculus]
  misc_feature (5)..(258): Homolog of NCBI NO: 4506661 NR Description: ribosomal protein L7a
  misc_feature (1)..(257): Homolog of NCBI NO: 2119113 NR Description: ribosomal protein L7a, cytosolic - fruit fly
  misc_feature (1)..(258): Homolog of NCBI NO: 34853132 NR Description: similar to 60S ribosomal protein L7a (Surfeit
  misc_feature (1)..(257): Homolog of NCBI NO: 1173062 NR Description: 60S RIBOSOMAL PROTEIN L7A
  misc_feature (1)..(257): Homolog of NCBI NO: 17530825 NR Description: Ribosomal protein L7A CG3314-PD [Drosophila
  misc_feature (1)..(258): Homolog of NCBI NO: 20161741 NR Description: putative 60S ribosomal protein
  misc_feature (1)..(259): Homolog of NCBI NO: 15229338 NR Description: 60S ribosomal protein L7A (RPL7aB) [Arabidopsis
  misc_feature (1)..(259): Homolog of NCBI NO: 15226635 NR Description: 60S ribosomal protein L7A (RPL7aA) [Arabidopsis
  misc_feature (1)..(258): Homolog of NCBI NO: 548774 NR Description: 60S RIBOSOMAL PROTEIN L7A
MAPKRGGKAPVPAKKKAADKVVNPLFEKRPKQFGIGGALPPKKDLHRFVKWPKVVRIQRQRRILKQRLKVPPALHQFTRTLDKNLATNLFKMLLKYRPEDKVAKKERLLKRAQAEAEGKTVEAKKPIVVKYGLNHVTYLIEQSKAQLVVIAHDVDPIELVVWLPALCRKMEVPYCIVKGKSRLGSIVHKKTASVLCLTTVKNEDKLEFSKILEAIKANFNDKFDEVRKKWGGGVMGSKSQAKTKARERLIAKEAAQRMN

SEQ ID NO: 51946 - protein, 168 aa, Glycine max
  peptide (1)..(168): Ceres Seq. ID no. 15172865
  misc_feature (23)..(118): Pfam Name: Ribosomal protein L7Ae/L30e/S12e/Gadd45 family Pfam Description: Ribosomal protein L7Ae/L30e/S12e/Gadd45 family
  misc_feature (1)..(167): Homolog of NCBI NO: 40796182 NR Description: Ribosomal protein L7a [Mus musculus]
  misc_feature (1)..(167): Homolog of NCBI NO: 4506661 NR Description: ribosomal protein L7a
  misc_feature (1)..(166): Homolog of NCBI NO: 2119113 NR Description: ribosomal protein L7a, cytosolic - fruit fly
  misc_feature (1)..(167): Homolog of NCBI NO: 34853132 NR Description: similar to 60S ribosomal protein L7a (Surfeit
  misc_feature (1)..(166): Homolog of NCBI NO: 1173062 NR Description: 60S RIBOSOMAL PROTEIN L7A
  misc_feature (1)..(166): Homolog of NCBI NO: 17530825 NR Description: Ribosomal protein L7A CG3314-PD [Drosophila
  misc_feature (1)..(167): Homolog of NCBI NO: 20161741 NR Description: putative 60S ribosomal protein
  misc_feature (1)..(168): Homolog of NCBI NO: 15229338 NR Description: 60S ribosomal protein L7A (RPL7aB) [Arabidopsis
  misc_feature (1)..(168): Homolog of NCBI NO: 15226635 NR Description: 60S ribosomal protein L7A (RPL7aA) [Arabidopsis
  misc_feature (1)..(167): Homolog of NCBI NO: 548774 NR Description: 60S RIBOSOMAL PROTEIN L7A
MLLKYRPEDKVAKKERLLKRAQAEAEGKTVEAKKPIVVKYGLNHVTYLIEQSKAQLVVIAHDVDPIELVVWLPALCRKMEVPYCIVKGKSRLGSIVHKKTASVLCLTTVKNEDKLEFSKILEAIKANFNDKFDEVRKKWGGGVMGSKSQAKTKARERLIAKEAAQRMN

SEQ ID NO: 51947 - DNA, 683 bp, Glycine max
  misc_feature (1)..(683): Ceres Seq. ID no. 13581918
aactttacttttcaccgtcggagctaagttcgcgcgccggtcatcctaaacccatatcagcgatcagccggccaggaactcgccgtagtgccgtggcgtgttctggtagcgtggaaagagtacttctgtcatggaaccaagtcagcccgagctcgaggagttctcagctgccaccgcgggcgaggtgctgaaaccagtggaggccccatccgatggtgaaggatgccccatatgcttgggtcaagaggaggccacggagaccacttggatgaagacagcgtgcggacacatctttcatgggcggtgcgtggagaggtggctcaagatgaagggaagttgccccgtgtgccggcgccagctttcgataccgcatgttggtgcaaaacaagatgttccatttatacatccctttgacttgaggacgatagagtcaatgcggaggtttcctcacatattcccagatccagatggatatttctcaatgtatacgcaggatatgtttgaaggccattgaagatgatgttgccacgtacattatgctttcggtagctctacatataagaccggtgctaagaatgttatgtaaagtatggatctcttcactttcaaactaatagaacacgtgatttccgaaaaaaaaaataaaaaaaaaaaaaaaaaagctggacaataccgtcgactgt

SEQ ID NO: 51948 - protein, 127 aa, Glycine max
  peptide (1)..(127): Ceres Seq. ID no. 13581919
  misc_feature (32)..(73): Pfam Name: Zinc finger, C3HC4 type (RING finger) Pfam Description: Zinc finger, C3HC4 type (RING finger)
  misc_feature (5)..(81): Homolog of NCBI NO: 30690409 NR Description: zinc finger (C3HC4-type RING finger) protein
  misc_feature (1)..(76): Homolog of NCBI NO: 11358776 NR Description: RING-H2 finger protein RHA1a [imported] -
  misc_feature (12)..(87): Homolog of NCBI NO: 18921323 NR Description: putative zinc finger protein [Oryza sativa]
  misc_feature (20)..(113): Homolog of NCBI NO: 15219561 NR Description: RING zinc finger protein -related [Arabidopsis
  misc_feature (32)..(80): Homolog of NCBI NO: 34903926 NR Description: OSJNBa0038J17.8 [Oryza sativa (japonica
  misc_feature (18)..(77): Homolog of NCBI NO: 18071374 NR Description: putative zinc finger protein [Oryza sativa]
  misc_feature (24)..(74): Homolog of NCBI NO: 11358785 NR Description: RING-H2 finger protein RHG1a
  misc_feature (32)..(84): Homolog of NCBI NO: 18071392 NR Description: putative zinc finger protein [Oryza sativa]
  misc_feature (20)..(77): Homolog of NCBI NO: 34913258 NR Description: P0519E12.4 [Oryza sativa (japonica
  misc_feature (1)..(104): Homolog of NCBI NO: 40882686 NR Description: hypothetical protein [Oryza sativa (japonica
MEPSQPELEEFSAATAGEVLKPVEAPSDGEGCPICLGQEEATETTWMKTACGHIFHGRCVERWLKMKGSCPVCRRQLSIPHVGAKQDVPFIHPFDLRTIESMRRFPHIFPDPDGYFSMYTQDMFEGH

SEQ ID NO: 51949 - protein, 81 aa, Glycine max
  peptide (1)..(81): Ceres Seq. ID no. 13581920
  misc_feature (1)..(35): Homolog of NCBI NO: 30690409 NR Description: zinc finger (C3HC4-type RING finger) protein
  misc_feature (1)..(30): Homolog of NCBI NO: 11358776 NR Description: RING-H2 finger protein RHA1a [imported] -
  misc_feature (1)..(41): Homolog of NCBI NO: 18921323 NR Description: putative zinc finger protein [Oryza sativa]
  misc_feature (1)..(67): Homolog of NCBI NO: 15219561 NR Description: RING zinc finger protein -related [Arabidopsis
  misc_feature (1)..(34): Homolog of NCBI NO: 34903926 NR Description: OSJNBa0038J17.8 [Oryza sativa (japonica
  misc_feature (1)..(31): Homolog of NCBI NO: 18071374 NR Description: putative zinc finger protein [Oryza sativa]
  misc_feature (1)..(28): Homolog of NCBI NO: 11358785 NR Description: RING-H2 finger protein RHG1a
  misc_feature (1)..(38): Homolog of NCBI NO: 18071392 NR Description: putative zinc finger protein [Oryza sativa]
  misc_feature (1)..(31): Homolog of NCBI NO: 34913258 NR Description: P0519E12.4 [Oryza sativa (japonica
  misc_feature (1)..(58): Homolog of NCBI NO: 40882686 NR Description: hypothetical protein [Oryza sativa (japonica
MKTACGHIFHGRCVERWLKMKGSCPVCRRQLSIPHVGAKQDVPFIHPFDLRTIESMRRFPHIFPDPDGYFSMYTQDMFEGH

SEQ ID NO: 51950 - protein, 63 aa, Glycine max
  peptide (1)..(63): Ceres Seq. ID no. 13581921
MPHMLGSRGGHGDHLDEDSVRTHLSWAVRGEVAQDEGKLPRVPAPAFDTACWCKTRCSIYTSL

SEQ ID NO: 51951 - DNA, 1022 bp, Glycine max
  misc_feature (1)..(1022): Ceres Seq. ID no. 13638808
atcaacaacctccccgctttctccttcccgtctctctcctctcctctggtcccgattcccttctccgagcttcctccctataaataaggcggcccgcggcggccatcaattcccgtcaccgcccaccgaggccgcgaattattcctccgccccgcccgccgcgaaaaccctagccgccgccgatcccatggccaccgcctccagccaggcgagcctcctcctccagaagcagctccgagatctcgcgaagcaccccgtcgatgggttttcagccgggctcgtcgacgacagcaacgtcttcgagtggcaggtcaccatcatcggcccgcccgagaccctatatgatggaggctatttcaatgcaataatgagcttcccacaaaattatccgaacagccctccaacagtcagattcacttctgaaatgtggcatcctaatgtttatccggatgggcgggtatgcatttctattcttcatccacctggtgatgatcccaacggatacgagctcgcgagtgagcgttggacaccagtccatacggttgagagtatagtattaagcatcatttcgatgctttctagtccaaatgatgaatcaccggcaaatattgaagcagctaaggactggagagagaagcaggatgagttcaagaagaaggtcaggcgcgccgtacggaaatcccaggaaatgctctgaataaaatgggagtactggggaagttagccatgccatttcaggtgtggagggttttgctgtcgatctccaaatgtccatccgacactagcaatttcacttctcccctgtatattttccattagcctgtctcctgtggaggtcttggttttgactctgaaaacgcaacgcatattctaagggtctggttgttgtaattgtgtggcttcggctatcaatattgagaaacttgggagagctgctacttaccataattctttaacgaacctgatataaacggacacctgcctgatcagctaatgttgaagtctgctctcatctggaagcg

SEQ ID NO: 51952 - protein, 231 aa, Glycine max
  peptide (1)..(231): Ceres Seq. ID no. 13638809
  misc_feature (95)..(230): Homolog of NCBI NO: 18424219 NR Description: ubiquitin-conjugating enzyme 7 (UBC7)
  misc_feature (66)..(231): Homolog of NCBI NO: 18410268 NR Description: ubiquitin-conjugating enzyme 14 (UBC14)
  misc_feature (63)..(231): Homolog of NCBI NO: 136647 NR Description: Ubiquitin-conjugating enzyme E2 7
  misc_feature (67)..(230): Homolog of NCBI NO: 18408206 NR Description: ubiquitin-conjugating enzyme 13 (UBC13)
  misc_feature (67)..(230): Homolog of NCBI NO: 31088843 NR Description: Ubiquitin-conjugating enzyme E2 7
  misc_feature (64)..(230): Homolog of NCBI NO: 28973769 NR Description: putative E2, ubiquitin-conjugating enzyme UBC7
  misc_feature (64)..(230): Homolog of NCBI NO: 19347846 NR Description: putative E2, ubiquitin-conjugating enzyme UBC7
  misc_feature (63)..(230): Homolog of NCBI NO: 7437988 NR Description: ubiquitin-conjugating enzyme - maize
  misc_feature (63)..(231): Homolog of NCBI NO: 7437989 NR Description: ubiquitin-conjugating enzyme E2 - maize
  misc_feature (63)..(231): Homolog of NCBI NO: 34908132 NR Description: putative Ubiquitin carrier protein UBC7
STTSPLSPSRLSPLLWSRFPSPSFLPINKAARGGHQFPSPPTEAANYSSAPPAAKTLAAADPMATASSQASLLLQKQLRDLAKHPVDGFSAGLVDDSNVFEWQVTIIGPPETLYDGGYFNAIMSFPQNYPNSPPTVRFTSEMWHPNVYPDGRVCISILHPPGDDPNGYELASERWTPVHTVESIVLSIISMLSSPNDESPANIEAAKDWREKQDEFKKKVRRAVRKSQEML

SEQ ID NO: 51953 - protein, 169 aa, Glycine max
  peptide (1)..(169): Ceres Seq. ID no. 13638810
  misc_feature (33)..(168): Homolog of NCBI NO: 18424219 NR Description: ubiquitin-conjugating enzyme 7 (UBC7)
  misc_feature (4)..(169): Homolog of NCBI NO: 18410268 NR Description: ubiquitin-conjugating enzyme 14 (UBC14)
  misc_feature (1)..(169): Homolog of NCBI NO: 136647 NR Description: Ubiquitin-conjugating enzyme E2 7
  misc_feature (5)..(168): Homolog of NCBI NO: 18408206 NR Description: ubiquitin-conjugating enzyme 13 (UBC13)
  misc_feature (5)..(168): Homolog of NCBI NO: 31088843 NR Description: Ubiquitin-conjugating enzyme E2 7
  misc_feature (2)..(168): Homolog of NCBI NO: 28973769 NR Description: putative E2, ubiquitin-conjugating enzyme UBC7
  misc_feature (2)..(168): Homolog of NCBI NO: 19347846 NR Description: putative E2, ubiquitin-conjugating enzyme UBC7
  misc_feature (1)..(168): Homolog of NCBI NO: 7437988 NR Description: ubiquitin-conjugating enzyme - maize
  misc_feature (1)..(169): Homolog of NCBI NO: 7437989 NR Description: ubiquitin-conjugating enzyme E2 - maize
  misc_feature (1)..(169): Homolog of NCBI NO: 34908132 NR Description: putative Ubiquitin carrier protein UBC7
MATASSQASLLLQKQLRDLAKHPVDGFSAGLVDDSNVFEWQVTIIGPPETLYDGGYFNAIMSFPQNYPNSPPTVRFTSEMWHPNVYPDGRVCISILHPPGDDPNGYELASERWTPVHTVESIVLSIISMLSSPNDESPANIEAAKDWREKQDEFKKKVRRAVRKSQEML

SEQ ID NO: 51954 - DNA, 714 bp, Glycine max
  misc_feature (1)..(714): Ceres Seq. ID no. 12609797
ctccccccgctcggcctagctgccaccactcttcctcctcctcctcctcctagtcccggtcacagcctccttccatggcggatcggcacggcgagggcggcgtggcctcggcgcggcggccggggcgcacggacctggacgacctgtcgacgacgctgctgcagcgcgtgcaggcgcacctcccgaacgcgacgcaggtggtgggcctgctgaccctgctgctcgccggcgcggcgctgctggtgctggcggggctgacgttcacgggcgccgtggtggcgctcgtcttcctcggcccgctggcgctgctgaccagccccatctgggtgccgttctccttcgcgctcctcgtggtcgtcgtggcggcgctctccttcgtcgggttcgccgtggccgcgctcgccgcggccacctgggcgtaccggtacttcacggggcggcaccccgtgggcgccgaccgcgtggaccgcgcccgcagccgcctcgccgacaccgccagccacgtcaaggactacgcccgccgcgagtacgacggctacctcggcaaccggaccaaggacgccgcccccggcgcctagtcgccgcgcgtgcgtgcgtgcacgtcgtggctagatcgttattacgatatgctcttctctctttgcgtctctgtactctcccaggtgttggtgatcacgtcgtcttcacgtgtatgatctactattagtttcgttc

SEQ ID NO: 51955 - protein, 167 aa, Glycine max
  peptide (1)..(167): Ceres Seq. ID no. 12609798
  misc_feature (39)..(155): Pfam Name: Oleosin Pfam Description: Oleosin
  misc_feature (37)..(150): Homolog of NCBI NO: 3914199 NR Description: OLEOSIN 1
  misc_feature (37)..(150): Homolog of NCBI NO: 2119749 NR Description: oleosin - almond
  misc_feature (28)..(151): Homolog of NCBI NO: 27754701 NR Description: putative oleosin protein [Arabidopsis thaliana]
  misc_feature (28)..(151): Homolog of NCBI NO: 15225211 NR Description: oleosin; protein id: At2g25890.1 [Arabidopsis
  misc_feature (30)..(150): Homolog of NCBI NO: 5381321 NR Description: 15 kDa oleosin [Sesamum indicum]
  misc_feature (31)..(150): Homolog of NCBI NO: 7442009 NR Description: oleosin-like protein, salt stress-induced - sweet
  misc_feature (34)..(150): Homolog of NCBI NO: 29170509 NR Description: oleosin [Corylus avellana]
  misc_feature (22)..(167): Homolog of NCBI NO: 21311555 NR Description: 15.8 kDa oleosin [Theobroma cacao]
  misc_feature (1)..(167): Homolog of NCBI NO: 15222021 NR Description: oleosin; protein id: At1g48990.1 [Arabidopsis
  misc_feature (1)..(167): Homolog of NCBI NO: 15229674 NR Description: oleosin; protein id: At3g18570.1 [Arabidopsis
MADRHGEGGVASARRPGRTDLDDLSTTLLQRVQAHLPNATQVVGLLTLLLAGAALLVLAGLTFTGAVVALVFLGPLALLTSPIWVPFSFALLVVVVAALSFVGFAVAALAAATWAYRYFTGRHPVGADRVDRARSRLADTASHVKDYARREYDGYLGNRTKDAAPGA

SEQ ID NO: 51956 - DNA, 822 bp, Glycine max
  misc_feature (1)..(822): Ceres Seq. ID no. 13594852
atatctatcacttcccggagttcatcgtttggccacgctgatcaattgagatcaagaccatggcaaactgtaagaagtggcttctgctcgttgtgggcctcgcggccatggtttcctcgtcggaggcgtacgtcttctacgccggcggccgcgacggctgggtcgtcgaccccgccgagagctacaaccactgggccgagcgcaaccggtttcagatcaacgacaccatcgtgtttgcgcgcggcgaaggcgagggcgcggactcggtgctgctggtgaccgagccggacttcgacgcgtgcaacacgcgcagccctgtccgccggctagaggacgccggtggccgcccggagttccggttcgaccggtcgggtgccttcttcttcatcagcggcgacgaggaccggtgccagaagggcaagaagttgtacgtcgtcgtgatggcgcctcggtcccaggagtgggagctcgcaccggcgcccggatcgccgccgctctgggcctcagcgccagagcacgcggaggccccggacatgagccctggtgacgaggggatgtcgcgcagctcgctgaaggcgccaccgccgatggcgagcgcggcacggttggacttggaggtgatagtcgtcggcgttgtagtcggggttttaggtgctctggtgctctgagatgccgtacggatcagaccggacgttgtgttcgcgcggtcatggtgtggtctgcggatggtttgttcgttgtgtgatacgctgttggtgttagttgttatatgtagttcaaggagttgagattcgtatacagaataaaatgatgtttatatgt

SEQ ID NO: 51957 - protein, 202 aa, Glycine max
  peptide (1)..(202): Ceres Seq. ID no. 13594853
  misc_feature (34)..(121): Pfam Name: Plastocyanin-like domain Pfam Description: Plastocyanin-like domain
  misc_feature (1)..(175): Homolog of NCBI NO: 21592865 NR Description: unknown [Arabidopsis thaliana]
  misc_feature (1)..(175): Homolog of NCBI NO: 15234164 NR Description: expressed protein [Arabidopsis thaliana]
  misc_feature (8)..(202): Homolog of NCBI NO: 30689408 NR Description: plastocyanin-like domain containing protein
  misc_feature (8)..(202): Homolog of NCBI NO: 7486634 NR Description: hypothetical protein F8B4.190 - Arabidopsis
  misc_feature (9)..(197): Homolog of NCBI NO: 18417181 NR Description: plastocyanin-like domain containing protein
  misc_feature (9)..(201): Homolog of NCBI NO: 7485901 NR Description: hypothetical protein F20O9.30 - Arabidopsis
  misc_feature (4)..(180): Homolog of NCBI NO: 28396618 NR Description: phytocyanin protein, PUP2 [Arabidopsis thaliana]
  misc_feature (4)..(180): Homolog of NCBI NO: 15238868 NR Description: hypothetical protein [Arabidopsis thaliana]
  misc_feature (11)..(179): Homolog of NCBI NO: 34903678 NR Description: B1015E06.24 [Oryza sativa (japonica
  misc_feature (7)..(181): Homolog of NCBI NO: 34909494 NR Description: P0481E12.17 [Oryza sativa (japonica
MANCKKWLLLVVGLAAMVSSSEAYVFYAGGRDGWVVDPAESYNHWAERNRFQINDTIVFARGEGEGADSVLLVTEPDFDACNTRSPVRRLEDAGGRPEFRFDRSGAFFFISGDEDRCQKGKKLYVVVMAPRSQEWELAPAPGSPPLWASAPEHAEAPDMSPGDEGMSRSSLKAPPPMASAARLDLEVIVVGVVVGVLGALVL

SEQ ID NO: 51958 - protein, 186 aa, Glycine max
  peptide (1)..(186): Ceres Seq. ID no. 13594854
  misc_feature (18)..(105): Pfam Name: Plastocyanin-like domain Pfam Description: Plastocyanin-like domain
  misc_feature (1)..(159): Homolog of NCBI NO: 21592865 NR Description: unknown [Arabidopsis thaliana]
  misc_feature (1)..(159): Homolog of NCBI NO: 15234164 NR Description: expressed protein [Arabidopsis thaliana]
  misc_feature (1)..(186): Homolog of NCBI NO: 30689408 NR Description: plastocyanin-like domain containing protein
  misc_feature (1)..(186): Homolog of NCBI NO: 7486634 NR Description: hypothetical protein F8B4.190 - Arabidopsis
  misc_feature (1)..(181): Homolog of NCBI NO: 18417181 NR Description: plastocyanin-like domain containing protein
  misc_feature (1)..(185): Homolog of NCBI NO: 7485901 NR Description: hypothetical protein F20O9.30 - Arabidopsis
  misc_feature (1)..(164): Homolog of NCBI NO: 28396618 NR Description: phytocyanin protein, PUP2 [Arabidopsis thaliana]
  misc_feature (1)..(164): Homolog of NCBI NO: 15238868 NR Description: hypothetical protein [Arabidopsis thaliana]
  misc_feature (1)..(163): Homolog of NCBI NO: 34903678 NR Description: B1015E06.24 [Oryza sativa (japonica
  misc_feature (1)..(165): Homolog of NCBI NO: 34909494 NR Description: P0481E12.17 [Oryza sativa (japonica
MVSSSEAYVFYAGGRDGWVVDPAESYNHWAERNRFQINDTIVFARGEGEGADSVLLVTEPDFDACNTRSPVRRLEDAGGRPEFRFDRSGAFFFISGDEDRCQKGKKLYVVVMAPRSQEWELAPAPGSPPLWASAPEHAEAPDMSPGDEGMSRSSLKAPPPMASAARLDLEVIVVGVVVGVLGALVL

SEQ ID NO: 51959 - DNA, 778 bp, Glycine max
  misc_feature (1)..(778): Ceres Seq. ID no. 12609803
attcctgtgcttttgaatcatattcttcgatctgttcttcaacatattttctgctttcaaccgttcgcgtcgtgactcagcttcgaattgttcagtataagttggaacttggaacatgtacgggagtaaagctagtcaacttgtgaaagaatttgcaagtggagaaaaaggtcagcttaccacatacaataatgacttgattcgagaagtagttgcagagtgtactcaacatcaccttgattttcagtccttgataaggaagatgcaggaagaaggtttggatatccaaacggcaaaaaatgcagatcactatggagcccttatccaccatcttgctgtagtccgaaataaacgttgcctaatggcctatatgtataatcgagcagaaattatacgaaacttgttatggaagatagggcatgtgcttcctcaagaaattaaagtgaagctttgtaatacggaggaagaacatttcaagaatcattctaaagcactgaaaaattatatgttgaaagtggaggttgatttgactgtggatatggtaccgccaaaagatccatacatcaaagtgagggtcattgatgacattggagaaggcattctgctcagtgatgataagagtgccaattttgccctccattcaatgcaccttctgaagcgaactgatgcagagcaatttatcgcacagggaaaaatggaagagctcacgggttgaccggtaagatatatagacgagaaaactacttgtgaacttgataccaattatgtaatagtgttt

SEQ ID NO: 51960 - protein, 199 aa, Glycine max
  peptide (1)..(199): Ceres Seq. ID no. 12609804
  misc_feature (1)..(197): Pfam Name: Partner of SLD five, PSF1 Pfam Description: Partner of SLD five, PSF1
  misc_feature (5)..(195): Homolog of NCBI NO: 37619778 NR Description: Hypothetical protein R53.6 [Caenorhabditis
  misc_feature (1)..(152): Homolog of NCBI NO: 9407835 NR Description: bA384D7.3 (KIAA0186 protein) [Homo sapiens]
  misc_feature (1)..(154): Homolog of NCBI NO: 20380632 NR Description: Similar to RIKEN cDNA 2810418N01 gene [Mus
  misc_feature (1)..(197): Homolog of NCBI NO: 24655047 NR Description: CG9187-PA [Drosophila melanogaster]
  misc_feature (1)..(197): Homolog of NCBI NO: 29365479 NR Description: Psf1 [Xenopus laevis]
  misc_feature (1)..(197): Homolog of NCBI NO: 15214812 NR Description: KIAA0186 gene product [Homo sapiens]
  misc_feature (1)..(197): Homolog of NCBI NO: 40788899 NR Description: KIAA0186 [Homo sapiens]
  misc_feature (1)..(197): Homolog of NCBI NO: 10800148 NR Description: KIAA0186 gene product [Homo sapiens]
  misc_feature (1)..(197): Homolog of NCBI NO: 28487734 NR Description: RIKEN cDNA 2810418N01 [Mus musculus]
  misc_feature (1)..(199): Homolog of NCBI NO: 15220076 NR Description: unknown protein; protein id: At1g80190.1
MYGSKASQLVKEFASGEKGQLTTYNNDLIREVVAECTQHHLDFQSLIRKMQEEGLDIQTAKNADHYGALIHHLAVVRNKRCLMAYMYNRAEIIRNLLWKIGHVLPQEIKVKLCNTEEEHFKNHSKALKNYMLKVEVDLTVDMVPPKDPYIKVRVIDDIGEGILLSDDKSANFALHSMHLLKRTDAEQFIAQGKMEELTG

SEQ ID NO: 51961 - protein, 150 aa, Glycine max
  peptide (1)..(150): Ceres Seq. ID no. 12609805
  misc_feature (1)..(148): Pfam Name: Partner of SLD five, PSF1 Pfam Description: Partner of SLD five, PSF1
  misc_feature (1)..(146): Homolog of NCBI NO: 37619778 NR Description: Hypothetical protein R53.6 [Caenorhabditis
  misc_feature (1)..(103): Homolog of NCBI NO: 9407835 NR Description: bA384D7.3 (KIAA0186 protein) [Homo sapiens]
  misc_feature (1)..(105): Homolog of NCBI NO: 20380632 NR Description: Similar to RIKEN cDNA 2810418N01 gene [Mus
  misc_feature (1)..(148): Homolog of NCBI NO: 24655047 NR Description: CG9187-PA [Drosophila melanogaster]
  misc_feature (1)..(148): Homolog of NCBI NO: 29365479 NR Description: Psf1 [Xenopus laevis]
  misc_feature (1)..(148): Homolog of NCBI NO: 15214812 NR Description: KIAA0186 gene product [Homo sapiens]
  misc_feature (1)..(148): Homolog of NCBI NO: 40788899 NR Description: KIAA0186 [Homo sapiens]
  misc_feature (1)..(148): Homolog of NCBI NO: 10800148 NR Description: KIAA0186 gene product [Homo sapiens]
  misc_feature (1)..(148): Homolog of NCBI NO: 28487734 NR Description: RIKEN cDNA 2810418N01 [Mus musculus]
  misc_feature (1)..(150): Homolog of NCBI NO: 15220076 NR Description: unknown protein; protein id: At1g80190.1
MQEEGLDIQTAKNADHYGALIHHLAVVRNKRCLMAYMYNRAEIIRNLLWKIGHVLPQEIKVKLCNTEEEHFKNHSKALKNYMLKVEVDLTVDMVPPKDPYIKVRVIDDIGEGILLSDDKSANFALHSMHLLKRTDAEQFIAQGKMEELTG

SEQ ID NO: 51962 - protein, 117 aa, Glycine max
  peptide (1)..(117): Ceres Seq. ID no. 12609806
  misc_feature (1)..(115): Pfam Name: Partner of SLD five, PSF1 Pfam Description: Partner of SLD five, PSF1
  misc_feature (1)..(113): Homolog of NCBI NO: 37619778 NR Description: Hypothetical protein R53.6 [Caenorhabditis
  misc_feature (1)..(70): Homolog of NCBI NO: 9407835 NR Description: bA384D7.3 (KIAA0186 protein) [Homo sapiens]
  misc_feature (1)..(72): Homolog of NCBI NO: 20380632 NR Description: Similar to RIKEN cDNA 2810418N01 gene [Mus
  misc_feature (1)..(115): Homolog of NCBI NO: 24655047 NR Description: CG9187-PA [Drosophila melanogaster]
  misc_feature (1)..(115): Homolog of NCBI NO: 29365479 NR Description: Psf1 [Xenopus laevis]
  misc_feature (1)..(115): Homolog of NCBI NO: 15214812 NR Description: KIAA0186 gene product [Homo sapiens]
  misc_feature (1)..(115): Homolog of NCBI NO: 40788899 NR Description: KIAA0186 [Homo sapiens]
  misc_feature (1)..(115): Homolog of NCBI NO: 10800148 NR Description: KIAA0186 gene product [Homo sapiens]
  misc_feature (1)..(115): Homolog of NCBI NO: 28487734 NR Description: RIKEN cDNA 2810418N01 [Mus musculus]
  misc_feature (1)..(117): Homolog of NCBI NO: 15220076 NR Description: unknown protein; protein id: At1g80190.1
MAYMYNRAEIIRNLLWKIGHVLPQEIKVKLCNTEEEHFKNHSKALKNYMLKVEVDLTVDMVPPKDPYIKVRVIDDIGEGILLSDDKSANFALHSMHLLKRTDAEQFIAQGKMEELTG

SEQ ID NO: 51963 - DNA, 868 bp, Glycine max
  misc_feature (1)..(868): Ceres Seq. ID no. 13595022
agcactagattagtggaatctttttttttcttttctatcgcttcctccacccaactctaatctcatcgcttccttcttcagctctaatcggagaaaaatggaggcagtaacggcgataaagccactaatcaaagtcgctgcaatctccggttctctccggaaaggctctttcaacaccggtctcctccgcgccgcgatggagttgacgaaagaatcggttccggggatgcatattgagcatatagacatctctccgttgccgttgatcaacaccgatcttgaatccaacgggacttaccctcccgtcgtcgaagctttccggcagaagattcttgaagccgacagcattctcttcgcttcccctgagtacaacttctctgtctcagctccacttaagaacgcgatcgattgggcttcaaggtcacctaacgtttgggctgacaaacctgctgccatcataagcaccggtggaggttttggtggaggaaggtcgcagtaccatcttcgacagattggagtgttccttgatcttcatttcatcaacaaaccggagtttactctcaatgcgtttcagccgcctcagaagttcgatgcagaaggaaacttggtcgatgaagtggctagggagaggttaaaacaagtccttgtctcgttacaggcgtttactctgcgacttcaaggtaaataagtggagggccgttcttgatcatttgtgtgagagattgatgttcgtgtgatgaaaataatgtcagattcttgtgataagaaacattgccacttatcctatgtaaatttatatttctgattaatgtcgtatgtgtttacatgataaaactgtgtttattaaacgagtgattcttgttgtttc

SEQ ID NO: 51964 - protein, 196 aa, Glycine max
  peptide (1)..(196): Ceres Seq. ID no. 13595023
  misc_feature (11)..(181): Pfam Name: NADPH-dependent FMN reductase Pfam Description: NADPH-dependent FMN reductase
  misc_feature (11)..(194): Homolog of NCBI NO: 40549313 NR Description: YieF [Salmonella enterica]
  misc_feature (11)..(194): Homolog of NCBI NO: 16767134 NR Description: putative oxidoreductase [Salmonella typhimurium
  misc_feature (1)..(194): Homolog of NCBI NO: 16762479 NR Description: conserved hypothetical protein
  misc_feature (11)..(186): Homolog of NCBI NO: 22406524 NR Description: hypothetical protein [Ferroplasma acidarmanus]
  misc_feature (11)..(195): Homolog of NCBI NO: 15596401 NR Description: conserved hypothetical protein [Pseudomonas
  misc_feature (1)..(196): Homolog of NCBI NO: 34906652 NR Description: putative NADPH:quinone oxidoreductase
  misc_feature (1)..(196): Homolog of NCBI NO: 34906648 NR Description: putative NADPH:quinone oxidoreductase
  misc_feature (6)..(196): Homolog of NCBI NO: 24745889 NR Description: NAD(P)H:quinone oxidoreductase [Solanum tuberosum]
  misc_feature (1)..(196): Homolog of NCBI NO: 5002232 NR Description: NADPH:quinone oxidoreductase [Arabidopsis
  misc_feature (1)..(196): Homolog of NCBI NO: 15232856 NR Description: NADPH:quinone oxidoreductase (NQR) [Arabidopsis
MEAVTAIKPLIKVAAISGSLRKGSFNTGLLRAAMELTKESVPGMHIEHIDISPLPLINTDLESNGTYPPVVEAFRQKILEADSILFASPEYNFSVSAPLKNAIDWASRSPNVWADKPAAIISTGGGFGGGRSQYHLRQIGVFLDLHFINKPEFTLNAFQPPQKFDAEGNLVDEVARERLKQVLVSLQAFTLRLQGK

SEQ ID NO: 51965 - protein, 163 aa, Glycine max
  peptide (1)..(163): Ceres Seq. ID no. 13595024
  misc_feature (1)..(148): Pfam Name: NADPH-dependent FMN reductase Pfam Description: NADPH-dependent FMN reductase
  misc_feature (1)..(161): Homolog of NCBI NO: 40549313 NR Description: YieF [Salmonella enterica]
  misc_feature (1)..(161): Homolog of NCBI NO: 16767134 NR Description: putative oxidoreductase [Salmonella typhimurium
  misc_feature (1)..(161): Homolog of NCBI NO: 16762479 NR Description: conserved hypothetical protein
  misc_feature (1)..(153): Homolog of NCBI NO: 22406524 NR Description: hypothetical protein [Ferroplasma acidarmanus]
  misc_feature (1)..(162): Homolog of NCBI NO: 15596401 NR Description: conserved hypothetical protein [Pseudomonas
  misc_feature (1)..(163): Homolog of NCBI NO: 34906652 NR Description: putative NADPH:quinone oxidoreductase
  misc_feature (1)..(163): Homolog of NCBI NO: 34906648 NR Description: putative NADPH:quinone oxidoreductase
  misc_feature (1)..(163): Homolog of NCBI NO: 24745889 NR Description: NAD(P)H:quinone oxidoreductase [Solanum tuberosum]
  misc_feature (1)..(163): Homolog of NCBI NO: 5002232 NR Description: NADPH:quinone oxidoreductase [Arabidopsis
  misc_feature (1)..(163): Homolog of NCBI NO: 15232856 NR Description: NADPH:quinone oxidoreductase (NQR) [Arabidopsis
MELTKESVPGMHIEHIDISPLPLINTDLESNGTYPPVVEAFRQKILEADSILFASPEYNFSVSAPLKNAIDWASRSPNVWADKPAAIISTGGGFGGGRSQYHLRQIGVFLDLHFINKPEFTLNAFQPPQKFDAEGNLVDEVARERLKQVLVSLQAFTLRLQGK

SEQ ID NO: 51966 - protein, 153 aa, Glycine max
  peptide (1)..(153): Ceres Seq. ID no. 13595025
  misc_feature (1)..(138): Pfam Name: NADPH-dependent FMN reductase Pfam Description: NADPH-dependent FMN reductase
  misc_feature (1)..(151): Homolog of NCBI NO: 40549313 NR Description: YieF [Salmonella enterica]
  misc_feature (1)..(151): Homolog of NCBI NO: 16767134 NR Description: putative oxidoreductase [Salmonella typhimurium
  misc_feature (1)..(151): Homolog of NCBI NO: 16762479 NR Description: conserved hypothetical protein
  misc_feature (1)..(143): Homolog of NCBI NO: 22406524 NR Description: hypothetical protein [Ferroplasma acidarmanus]
  misc_feature (1)..(152): Homolog of NCBI NO: 15596401 NR Description: conserved hypothetical protein [Pseudomonas
  misc_feature (1)..(153): Homolog of NCBI NO: 34906652 NR Description: putative NADPH:quinone oxidoreductase
  misc_feature (1)..(153): Homolog of NCBI NO: 34906648 NR Description: putative NADPH:quinone oxidoreductase
  misc_feature (1)..(153): Homolog of NCBI NO: 24745889 NR Description: NAD(P)H:quinone oxidoreductase [Solanum tuberosum]
  misc_feature (1)..(153): Homolog of NCBI NO: 5002232 NR Description: NADPH:quinone oxidoreductase [Arabidopsis
  misc_feature (1)..(153): Homolog of NCBI NO: 15232856 NR Description: NADPH:quinone oxidoreductase (NQR) [Arabidopsis
MHIEHIDISPLPLINTDLESNGTYPPVVEAFRQKILEADSILFASPEYNFSVSAPLKNAIDWASRSPNVWADKPAAIISTGGGFGGGRSQYHLRQIGVFLDLHFINKPEFTLNAFQPPQKFDAEGNLVDEVARERLKQVLVSLQAFTLRLQGK

SEQ ID NO: 51967 - DNA, 885 bp, Glycine max
  misc_feature (1)..(885): Ceres Seq. ID no. 13638785
acctcatacttccactaccaagagaaagtcgttgacacaccacagataagcttctcgtcgctcacagcgaagagtcacacaatggcgtctgtcacttctccaaccactctcatctcctcctccacgagggctttcccagccaagtcttattcgcttccttctccctcagtctctttccttcgaaccctatcctctccttcctcatccgcttctctccgctccgcgtttgctcaacgctcttccctcagctccagttctcgccgtagcttcgctgtcaaggctcagaccgatgatcttccattggttggaaacaaggcccctgattttgaggcagaggcagtgtttgatcaggagttcatcaaggttaagctctctgagtacattgggaagaagtatgtgattctctttttctacccattggacttcactttcgtctgcccaacagagattactgccttcagtgaccggtacgcagagtttgagaagctgaacacggaagtgttaggtgtctcagtcgatagtgtgttctcccaccttgcgtgggtccagacagacagaaaatctggagggctcggtgatctgaactatcccctgatctcagatgtaactaaatcaatctcaaagtcatttggagtgctcatccatgatcagggaatagcactgagggggcttttcatcatcgacaaggaaggagtgatccaacattccaccatcaacaatcttggtattggacgaagtgttgatgagacaatgagaaccctccaggcgttacagtacatccaggagaaccctgatgaagtctgccctgcagggtggaaacctggtgagaagtcaatgaaacctgaccccaagctcagcaaagagtacttctcagctatttagaat

SEQ ID NO: 51968 - protein, 293 aa, Glycine max
  peptide (1)..(293): Ceres Seq. ID no. 13638786
  misc_feature (102)..(253): Pfam Name: AhpC/TSA family Pfam Description: AhpC/TSA family
  misc_feature (28)..(293): Homolog of NCBI NO: 13265490 NR Description: AT5g06290 [Arabidopsis thaliana]
  misc_feature (28)..(293): Homolog of NCBI NO: 11119229 NR Description: 2-Cys peroxiredoxin [Brassica napus]
  misc_feature (28)..(293): Homolog of NCBI NO: 9758409 NR Description: 2-cys peroxiredoxin-like protein [Arabidopsis
  misc_feature (28)..(293): Homolog of NCBI NO: 21553667 NR Description: 2-cys peroxiredoxin-like protein [Arabidopsis
  misc_feature (27)..(293): Homolog of NCBI NO: 18415155 NR Description: 2-cys peroxiredoxin-related protein [Arabidopsis
  misc_feature (28)..(293): Homolog of NCBI NO: 1498198 NR Description: 2-Cys peroxiredoxin bas1 [Arabidopsis thaliana]
  misc_feature (28)..(293): Homolog of NCBI NO: 7242491 NR Description: 2-Cys peroxiredoxin [Arabidopsis thaliana]
  misc_feature (28)..(293): Homolog of NCBI NO: 3121825 NR Description: 2-cys peroxiredoxin BAS1, chloroplast precursor
  misc_feature (28)..(293): Homolog of NCBI NO: 21592588 NR Description: putative 2-cys peroxiredoxin BAS1 precursor
  misc_feature (28)..(293): Homolog of NCBI NO: 15229806 NR Description: 2-cys peroxiredoxin BAS1 precursor
TSYFHYQEKVVDTPQISFSSLTAKSHTMASVTSPTTLISSSTRAFPAKSYSLPSPSVSFLRTLSSPSSSASLRSAFAQRSSLSSSSRRSFAVKAQTDDLPLVGNKAPDFEAEAVFDQEFIKVKLSEYIGKKYVILFFYPLDFTFVCPTEITAFSDRYAEFEKLNTEVLGVSVDSVFSHLAWVQTDRKSGGLGDLNYPLISDVTKSISKSFGVLIHDQGIALRGLFIIDKEGVIQHSTINNLGIGRSVDETMRTLQALQYIQENPDEVCPAGWKPGEKSMKPDPKLSKEYFSAI

SEQ ID NO: 51969 - protein, 266 aa, Glycine max
  peptide (1)..(266): Ceres Seq. ID no. 13638787
  misc_feature (75)..(226): Pfam Name: AhpC/TSA family Pfam Description: AhpC/TSA family
  misc_feature (1)..(266): Homolog of NCBI NO: 13265490 NR Description: AT5g06290 [Arabidopsis thaliana]
  misc_feature (1)..(266): Homolog of NCBI NO: 11119229 NR Description: 2-Cys peroxiredoxin [Brassica napus]
  misc_feature (1)..(266): Homolog of NCBI NO: 9758409 NR Description: 2-cys peroxiredoxin-like protein [Arabidopsis
  misc_feature (1)..(266): Homolog of NCBI NO: 21553667 NR Description: 2-cys peroxiredoxin-like protein [Arabidopsis
  misc_feature (1)..(266): Homolog of NCBI NO: 18415155 NR Description: 2-cys peroxiredoxin-related protein [Arabidopsis
  misc_feature (1)..(266): Homolog of NCBI NO: 1498198 NR Description: 2-Cys peroxiredoxin bas1 [Arabidopsis thaliana]
  misc_feature (1)..(266): Homolog of NCBI NO: 7242491 NR Description: 2-Cys peroxiredoxin [Arabidopsis thaliana]
  misc_feature (1)..(266): Homolog of NCBI NO: 3121825 NR Description: 2-cys peroxiredoxin BAS1, chloroplast precursor
  misc_feature (1)..(266): Homolog of NCBI NO: 21592588 NR Description: putative 2-cys peroxiredoxin BAS1 precursor
  misc_feature (1)..(266): Homolog of NCBI NO: 15229806 NR Description: 2-cys peroxiredoxin BAS1 precursor
MASVTSPTTLISSSTRAFPAKSYSLPSPSVSFLRTLSSPSSSASLRSAFAQRSSLSSSSRRSFAVKAQTDDLPLVGNKAPDFEAEAVFDQEFIKVKLSEYIGKKYVILFFYPLDFTFVCPTEITAFSDRYAEFEKLNTEVLGVSVDSVFSHLAWVQTDRKSGGLGDLNYPLISDVTKSISKSFGVLIHDQGIALRGLFIIDKEGVIQHSTINNLGIGRSVDETMRTLQALQYIQENPDEVCPAGWKPGEKSMKPDPKLSKEYFSAI

SEQ ID NO: 51970 - DNA, 897 bp, Glycine max
  misc_feature (1)..(897): Ceres Seq. ID no. 13594855
attcagattgacaacaacaacaaaaatctacgatgctacttgtgcgatccctctgccgtaccgctgcggcggcctccgtcgctacgctccgatcattgagatccgcccctccaaatcagctattgcgcaatcgttccctcctcacgcgaggattcttcgctgtttcttcatttccttcaaatcgaactccttacgattgtcggtatcctcgggcaattggcataggaagtgtgcgcaactttagcgaagatgtctcacatgcctgaactcaaagacagtgatgttcttaatgctttcaaaggtttgatggctacagactggtcagcgctgccttctgctgttgttaacgaggcgaaaaaggcagtctcgaaaaacacagacgacaaggcagggcaagaggccttgacgaatgtgttccgagcagctgaagctgttgaagaatttggtgggattctcaattccctaaagatggaaatcgacgatagcattgggatgagtggagaggatgtgaagagcttaccagaagatataaccaaagcgctgcgtcttgcttatcataggtatgctacctacctagatgcgtttggacctgaagaagtttatttgaagaagaaggttgagacggagttggggacaaagatgatccacttgaagatgagatgcagcgggcttggttcagaatggggaaaggttaccgttcttggaacatcaggactctcggggtcttacgtggagcaaagggcttaaaacggacagagaagaatcttaaataatgtttgttatttgcgttattgtgtcttcaacacataataaggtcaataactgaccaaagacatataaggtgagtttttgttcattgtcgctgcctcgaaaaattttaaacaagcttttgtgttc

SEQ ID NO: 51971 - protein, 165 aa, Glycine max
  peptide (1)..(165): Ceres Seq. ID no. 13594856
  misc_feature (3)..(151): Homolog of NCBI NO: 32488163 NR Description: OSJNBa0033G16.15 [Oryza sativa (japonica
  misc_feature (3)..(165): Homolog of NCBI NO: 18652408 NR Description: unknown [Hordeum vulgare]
  misc_feature (1)..(165): Homolog of NCBI NO: 18401719 NR Description: expressed protein [Arabidopsis thaliana]
MSHMPELKDSDVLNAFKGLMATDWSALPSAVVNEAKKAVSKNTDDKAGQEALTNVFRAAEAVEEFGGILNSLKMEIDDSIGMSGEDVKSLPEDITKALRLAYHRYATYLDAFGPEEVYLKKKVETELGTKMIHLKMRCSGLGSEWGKVTVLGTSGLSGSYVEQRA

SEQ ID NO: 51972 - protein, 162 aa, Glycine max
  peptide (1)..(162): Ceres Seq. ID no. 13594857
  misc_feature (1)..(148): Homolog of NCBI NO: 32488163 NR Description: OSJNBa0033G16.15 [Oryza sativa (japonica
  misc_feature (1)..(162): Homolog of NCBI NO: 18652408 NR Description: unknown [Hordeum vulgare]
  misc_feature (1)..(162): Homolog of NCBI NO: 18401719 NR Description: expressed protein [Arabidopsis thaliana]
MPELKDSDVLNAFKGLMATDWSALPSAVVNEAKKAVSKNTDDKAGQEALTNVFRAAEAVEEFGGILNSLKMEIDDSIGMSGEDVKSLPEDITKALRLAYHRYATYLDAFGPEEVYLKKKVETELGTKMIHLKMRCSGLGSEWGKVTVLGTSGLSGSYVEQRA

SEQ ID NO: 51973 - protein, 146 aa, Glycine max
  peptide (1)..(146): Ceres Seq. ID no. 13594858
  misc_feature (1)..(132): Homolog of NCBI NO: 32488163 NR Description: OSJNBa0033G16.15 [Oryza sativa (japonica
  misc_feature (1)..(146): Homolog of NCBI NO: 18652408 NR Description: unknown [Hordeum vulgare]
  misc_feature (1)..(146): Homolog of NCBI NO: 18401719 NR Description: expressed protein [Arabidopsis thaliana]
MATDWSALPSAVVNEAKKAVSKNTDDKAGQEALTNVFRAAEAVEEFGGILNSLKMEIDDSIGMSGEDVKSLPEDITKALRLAYHRYATYLDAFGPEEVYLKKKVETELGTKMIHLKMRCSGLGSEWGKVTVLGTSGLSGSYVEQRA

SEQ ID NO: 51974 - DNA, 1425 bp, Glycine max
  misc_feature (1)..(1425): Ceres Seq. ID no. 13594859
aaggcaaacccctcttttgaattccctccccctctcccctcggccgcctcgccgccgacccggcccgggacggaggccccctccctcccggaacctcctggaagcttccgcggctccctcccctgctccggcaacagcccgcgtcgtcgccgccgccgagggccagcacctcgcgctgccggcccgttgcttgcagcgggaggaaaggggtcaagatggttgtcggatcattcatcaccagagctttaatacttgttcttggatatgcatatccagcttatgattgttacaagacagtggagctgaataggcctgagattgagcagttgcggttctggtgtcagtactggattttacttgcaatgcttactgttttcgagagagttggggataatttcatatcatggttgccaatgtatagtgaagcaaagctggcttttattgtgtatttgtggtatcctaagacacaggggacttcatatgtctatgagtcgttcttcaagccttatatcgcaaaacacgaatctgagattgatcgcaatcttcttgagttgaggacaagggctagtgatattgctgttacttacttccacaaggttgcagactacagccagtcaaggttccatgaaatcttgcaatatattgcttctcaatcacaaggatctcgttctcaggcacagcaacagcagcagcgtccaccacctccacggactcggatggcgaatcctgcaccaccacctgttcccgcaccaacggcaccaccgatgccgccacaggccgcccaagttcctcctactccaccaaggatgcaggtgcaagataaaggcccagttccagttgcccctcctggcgcagtgcctcctgtgcagcaacaaacaccttcctgtcctggccctgtcgccggcaacagccccccaaaagagtgaagacatgctggttgatcaatctgggccttcgacaagcaacgtgccaccccgcccaaacaatgcctgaagacgaggagacgctcatccaggaggctattcggttgactcggggccggctcaggaggcgcatgggtggatctggacctccatccaactagctcttctcacacttacgacgatggcaggggaaatgctgggttggtccatcaggcatggctgaatttcctcgcacagttgcaagctcacgtccaccttgtaaaacgatgaatcctggttcctgttgtttcacagcccagattgtgtatataaacccaccccatgccaggggtaaaaacgctgggatgccagtggaccaccagtttagctaggcggtagcagaagatggtggttaagatgctcggtgaaatcggttccaacttagttctgtcgaaattcgttggtggtgacttcgtctgtattggaaagtggttcaaaggtgaagtgaaataatcttaggctg

SEQ ID NO: 51975 - protein, 236 aa, Glycine max
  peptide (1)..(236): Ceres Seq. ID no. 15221426
  misc_feature (4)..(99): Pfam Name: TB2/DP1, HVA22 family Pfam Description: TB2/DP1, HVA22 family
  misc_feature (2)..(168): Homolog of NCBI NO: 37531658 NR Description: putative Magnaporthe grisea pathogenicity protein
  misc_feature (13)..(163): Homolog of NCBI NO: 15222332 NR Description: hypothetical protein [Arabidopsis thaliana]
  misc_feature (13)..(234): Homolog of NCBI NO: 25513732 NR Description: T20H2.26 protein - Arabidopsis thaliana
  misc_feature (2)..(234): Homolog of NCBI NO: 21553483 NR Description: pathogenicity protein PATH531-like protein
  misc_feature (2)..(234): Homolog of NCBI NO: 18394805 NR Description: expressed protein [Arabidopsis thaliana]
  misc_feature (6)..(232): Homolog of NCBI NO: 9759014 NR Description: gene_id:K16E1.3~unknown protein [Arabidopsis
  misc_feature (2)..(232): Homolog of NCBI NO: 18422223 NR Description: expressed protein [Arabidopsis thaliana]
  misc_feature (2)..(232): Homolog of NCBI NO: 21553813 NR Description: unknown [Arabidopsis thaliana]
  misc_feature (145)..(232): Homolog of NCBI NO: 20502988 NR Description: Putative InsB from Escherichia coli
  misc_feature (2)..(158): Homolog of NCBI NO: 20502988 NR Description: Putative InsB from Escherichia coli
MVVGSFITRALILVLGYAYPAYDCYKTVELNRPEIEQLRFWCQYWILLAMLTVFERVGDNFISWLPMYSEAKLAFIVYLWYPKTQGTSYVYESFFKPYIAKHESEIDRNLLELRTRASDIAVTYFHKVADYSQSRFHEILQYIASQSQGSRSQAQQQQQRPPPPRTRMANPAPPPVPAPTAPPMPPQAAQVPPTPPRMQVQDKGPVPVAPPGAVPPVQQQTPSCPGPVAGNSPPKE

SEQ ID NO: 51976 - protein, 187 aa, Glycine max
  peptide (1)..(187): Ceres Seq. ID no. 15221427
  misc_feature (112)..(185): Pfam Name: Formin Homology 2 Domain Pfam Description: Formin Homology 2 Domain
  misc_feature (1)..(119): Homolog of NCBI NO: 37531658 NR Description: putative Magnaporthe grisea pathogenicity protein
  misc_feature (1)..(114): Homolog of NCBI NO: 15222332 NR Description: hypothetical protein [Arabidopsis thaliana]
  misc_feature (1)..(185): Homolog of NCBI NO: 25513732 NR Description: T20H2.26 protein - Arabidopsis thaliana
  misc_feature (1)..(185): Homolog of NCBI NO: 21553483 NR Description: pathogenicity protein PATH531-like protein
  misc_feature (1)..(185): Homolog of NCBI NO: 18394805 NR Description: expressed protein [Arabidopsis thaliana]
  misc_feature (1)..(183): Homolog of NCBI NO: 9759014 NR Description: gene_id:K16E1.3~unknown protein [Arabidopsis
  misc_feature (1)..(183): Homolog of NCBI NO: 18422223 NR Description: expressed protein [Arabidopsis thaliana]
  misc_feature (1)..(183): Homolog of NCBI NO: 21553813 NR Description: unknown [Arabidopsis thaliana]
  misc_feature (96)..(183): Homolog of NCBI NO: 20502988 NR Description: Putative InsB from Escherichia coli
  misc_feature (1)..(109): Homolog of NCBI NO: 20502988 NR Description: Putative InsB from Escherichia coli
MLTVFERVGDNFISWLPMYSEAKLAFIVYLWYPKTQGTSYVYESFFKPYIAKHESEIDRNLLELRTRASDIAVTYFHKVADYSQSRFHEILQYIASQSQGSRSQAQQQQQRPPPPRTRMANPAPPPVPAPTAPPMPPQAAQVPPTPPRMQVQDKGPVPVAPPGAVPPVQQQTPSCPGPVAGNSPPKE

SEQ ID NO: 51977 - protein, 170 aa, Glycine max
  peptide (1)..(170): Ceres Seq. ID no. 15221428
  misc_feature (95)..(168): Pfam Name: Formin Homology 2 Domain Pfam Description: Formin Homology 2 Domain
  misc_feature (1)..(102): Homolog of NCBI NO: 37531658 NR Description: putative Magnaporthe grisea pathogenicity protein
  misc_feature (1)..(97): Homolog of NCBI NO: 15222332 NR Description: hypothetical protein [Arabidopsis thaliana]
  misc_feature (1)..(168): Homolog of NCBI NO: 25513732 NR Description: T20H2.26 protein - Arabidopsis thaliana
  misc_feature (1)..(168): Homolog of NCBI NO: 21553483 NR Description: pathogenicity protein PATH531-like protein
  misc_feature (1)..(168): Homolog of NCBI NO: 18394805 NR Description: expressed protein [Arabidopsis thaliana]
  misc_feature (1)..(166): Homolog of NCBI NO: 9759014 NR Description: gene_id:K16E1.3~unknown protein [Arabidopsis
  misc_feature (1)..(166): Homolog of NCBI NO: 18422223 NR Description: expressed protein [Arabidopsis thaliana]
  misc_feature (1)..(166): Homolog of NCBI NO: 21553813 NR Description: unknown [Arabidopsis thaliana]
  misc_feature (79)..(166): Homolog of NCBI NO: 20502988 NR Description: Putative InsB from Escherichia coli
  misc_feature (1)..(92): Homolog of NCBI NO: 20502988 NR Description: Putative InsB from Escherichia coli
MYSEAKLAFIVYLWYPKTQGTSYVYESFFKPYIAKHESEIDRNLLELRTRASDIAVTYFHKVADYSQSRFHEILQYIASQSQGSRSQAQQQQQRPPPPRTRMANPAPPPVPAPTAPPMPPQAAQVPPTPPRMQVQDKGPVPVAPPGAVPPVQQQTPSCPGPVAGNSPPKE

SEQ ID NO: 51978 - DNA, 821 bp, Glycine max
  misc_feature (1)..(821): Ceres Seq. ID no. 15172846
ccccttcctcttcccctccccccatctcctcccccgacgccgaaccgaatcgccgcagcagccgccggagaagaacaaattgagcgccagcagccatgtccggcgtggaggaggaggagaacgccgccgagctcaagatcggcgaagagttcctcaaggccaagtgcctgatgaactgcgaggtggcgataatcctggagcacaagtgggagcagctgcagcacatgtcggacggcggcgccgaccaggtctcgcaggtgttcgagaagtcgcaggcctacgtcaagcgcttcagccgctacaagaaccccgacgcggtccgccaggtccgcgagacgctctcccgctacagcctcgtcgagttcgagctctgcaccctggggaacctctgccccgacaccgccgacgaggccaaggcgctcgtcccctccctcgtccccggcggcaggttcgacagcgacgaccgcgtcgacaagatgctcaacgacctctccctcatcaagaagttcgagtagctcttcttgtgttcctccaatggacatgatggacatggagaccatgtgtcatttatcagtctcaagaagtacttactagctactagtagcctagtttggtgatatgtttaatcttcagattatctcctcctatgctatgatcataaagcatcagcagtgtcaatctcaaatgtatggagttgattaaaccttgttgttatgctgtcttggagaaaaatgtagcagcttcttgttggagatatatggagtttacgctcctatatgctatgactataagacggagttgattaaacatttgttgatatc

SEQ ID NO: 51979 - protein, 180 aa, Glycine max
  peptide (1)..(180): Ceres Seq. ID no. 15172847
PFLFPSPHLLPRRRTESPQQPPEKNKLSASSHVRRGGGGERRRAQDRRRVPQGQVPDELRGGDNPGAQVGAAAAHVGRRRRPGLAGVREVAGLRQALQPLQEPRRGPPGPRDALPLQPRRVRALHPGEPLPRHRRRGQGARPLPRPRRQVRQRRPRRQDAQRPLPHQEVRVALLVFLQWT

SEQ ID NO: 51980 - protein, 139 aa, Glycine max
  peptide (1)..(139): Ceres Seq. ID no. 15172848
  misc_feature (20)..(138): Pfam Name: RNA polymerase Rpb4 Pfam Description: RNA polymerase Rpb4
  misc_feature (18)..(132): Homolog of NCBI NO: 24647897 NR Description: CG31237-PA [Drosophila melanogaster]
  misc_feature (7)..(139): Homolog of NCBI NO: 7503310 NR Description: hypothetical protein F43E2.1 - Caenorhabditis
  misc_feature (32)..(139): Homolog of NCBI NO: 28076931 NR Description: RIKEN cDNA 2610028L19 [Mus musculus]
  misc_feature (7)..(139): Homolog of NCBI NO: 39582357 NR Description: Hypothetical protein CBG13151 [Caenorhabditis
  misc_feature (7)..(139): Homolog of NCBI NO: 17533967 NR Description: RNA polymerase II (2H665) [Caenorhabditis
  misc_feature (7)..(132): Homolog of NCBI NO: 27263229 NR Description: RNA polymerase II accessory factor rpb4
  misc_feature (7)..(132): Homolog of NCBI NO: 31242991 NR Description: ENSANGP00000009867 [Anopheles gambiae]
  misc_feature (7)..(139): Homolog of NCBI NO: 34878674 NR Description: similar to RIKEN cDNA 2610028L19 [Rattus
  misc_feature (7)..(139): Homolog of NCBI NO: 4758574 NR Description: DNA directed RNA polymerase II polypeptide D
  misc_feature (1)..(139): Homolog of NCBI NO: 15242547 NR Description: 15.9 kDa subunit of RNA polymerase II
MSGVEEEENAAELKIGEEFLKAKCLMNCEVAIILEHKWEQLQHMSDGGADQVSQVFEKSQAYVKRFSRYKNPDAVRQVRETLSRYSLVEFELCTLGNLCPDTADEAKALVPSLVPGGRFDSDDRVDKMLNDLSLIKKFE

SEQ ID NO: 51981 - protein, 114 aa, Glycine max
  peptide (1)..(114): Ceres Seq. ID no. 15172849
  misc_feature (1)..(113): Pfam Name: RNA polymerase Rpb4 Pfam Description: RNA polymerase Rpb4
  misc_feature (1)..(107): Homolog of NCBI NO: 24647897 NR Description: CG31237-PA [Drosophila melanogaster]
  misc_feature (1)..(114): Homolog of NCBI NO: 7503310 NR Description: hypothetical protein F43E2.1 - Caenorhabditis
  misc_feature (7)..(114): Homolog of NCBI NO: 28076931 NR Description: RIKEN cDNA 2610028L19 [Mus musculus]
  misc_feature (1)..(114): Homolog of NCBI NO: 39582357 NR Description: Hypothetical protein CBG13151 [Caenorhabditis
  misc_feature (1)..(114): Homolog of NCBI NO: 17533967 NR Description: RNA polymerase II (2H665) [Caenorhabditis
  misc_feature (1)..(107): Homolog of NCBI NO: 27263229 NR Description: RNA polymerase II accessory factor rpb4
  misc_feature (1)..(107): Homolog of NCBI NO: 31242991 NR Description: ENSANGP00000009867 [Anopheles gambiae]
  misc_feature (1)..(114): Homolog of NCBI NO: 34878674 NR Description: similar to RIKEN cDNA 2610028L19 [Rattus
  misc_feature (1)..(114): Homolog of NCBI NO: 4758574 NR Description: DNA directed RNA polymerase II polypeptide D
  misc_feature (1)..(114): Homolog of NCBI NO: 15242547 NR Description: 15.9 kDa subunit of RNA polymerase II
MNCEVAIILEHKWEQLQHMSDGGADQVSQVFEKSQAYVKRFSRYKNPDAVRQVRETLSRYSLVEFELCTLGNLCPDTADEAKALVPSLVPGGRFDSDDRVDKMLNDLSLIKKFE

SEQ ID NO: 51982 - DNA, 695 bp, Glycine max
  misc_feature (1)..(695): Ceres Seq. ID no. 13594700
accattacctagaacatcctaatcgaaaaaatctttttgttcttttatggttttggaatcgatctgtaatctcattctgactttgatccaatcgcttcttatctagaaacccgacccgaaaagccatgagagtccatccaattcttaacaacaacacattgatccaccaccaccaccatcatcaccataacccgacccgagaacccggaaagaatctccgtcgcttacctcacatcttcaaccgcgttctcgagcttccgctaaggtccgaagcagacgtctccgtggaagagaaacccgattgcttcagattcgtggcggagacggacggtcttcgcggcggcggaggggagatgacggcgtatatggtggagatccatccgggtattaccaagatcgtcgttaggacaaatgggttgtctttgggtttgtcgttggatgagttggagcttgatgtctggcgttttaggcttccggagacgacgaggcctgagcttgttaccgtggcttgtgttgatggggctttggttgttacggttcctaagatggtttcagaggaagatgatgatggttttggacaaggtgtgggaactgggaggctagttcttgttttgtaaaatcgagccatgtctctgctttggattaagacagcttatgtaattatatctatgaacgttttcatttgaatctttgtg

SEQ ID NO: 51983 - protein, 163 aa, Glycine max
  peptide (1)..(163): Ceres Seq. ID no. 13594701
  misc_feature (29)..(140): Homolog of NCBI NO: 22773244 NR Description: Hypothetical protein [Oryza sativa (japonica
  misc_feature (28)..(163): Homolog of NCBI NO: 34394452 NR Description: hypothetical protein [Oryza sativa (japonica
  misc_feature (1)..(141): Homolog of NCBI NO: 15233585 NR Description: expressed protein [Arabidopsis thaliana]
  misc_feature (1)..(162): Homolog of NCBI NO: 11994285 NR Description: emb|CAB10262.1~gene_id:F16J14.9~similar to
  misc_feature (1)..(162): Homolog of NCBI NO: 21553463 NR Description: unknown [Arabidopsis thaliana]
  misc_feature (1)..(162): Homolog of NCBI NO: 18403425 NR Description: expressed protein [Arabidopsis thaliana]
MRVHPILNNNTLIHHHHHHHHNPTREPGKNLRRLPHIFNRVLELPLRSEADVSVEEKPDCFRFVAETDGLRGGGGEMTAYMVEIHPGITKIVVRTNGLSLGLSLDELELDVWRFRLPETTRPELVTVACVDGALVVTVPKMVSEEDDDGFGQGVGTGRLVLVL

SEQ ID NO: 51984 - protein, 87 aa, Glycine max
  peptide (1)..(87): Ceres Seq. ID no. 13594702
  misc_feature (1)..(64): Homolog of NCBI NO: 22773244 NR Description: Hypothetical protein [Oryza sativa (japonica
  misc_feature (1)..(87): Homolog of NCBI NO: 34394452 NR Description: hypothetical protein [Oryza sativa (japonica
  misc_feature (1)..(65): Homolog of NCBI NO: 15233585 NR Description: expressed protein [Arabidopsis thaliana]
  misc_feature (1)..(86): Homolog of NCBI NO: 11994285 NR Description: emb|CAB10262.1~gene_id:F16J14.9~similar to
  misc_feature (1)..(86): Homolog of NCBI NO: 21553463 NR Description: unknown [Arabidopsis thaliana]
  misc_feature (1)..(86): Homolog of NCBI NO: 18403425 NR Description: expressed protein [Arabidopsis thaliana]
MTAYMVEIHPGITKIVVRTNGLSLGLSLDELELDVWRFRLPETTRPELVTVACVDGALVVTVPKMVSEEDDDGFGQGVGTGRLVLVL

SEQ ID NO: 51985 - protein, 83 aa, Glycine max
  peptide (1)..(83): Ceres Seq. ID no. 13594703
  misc_feature (1)..(60): Homolog of NCBI NO: 22773244 NR Description: Hypothetical protein [Oryza sativa (japonica
  misc_feature (1)..(83): Homolog of NCBI NO: 34394452 NR Description: hypothetical protein [Oryza sativa (japonica
  misc_feature (1)..(61): Homolog of NCBI NO: 15233585 NR Description: expressed protein [Arabidopsis thaliana]
  misc_feature (1)..(82): Homolog of NCBI NO: 11994285 NR Description: emb|CAB10262.1~gene_id:F16J14.9~similar to
  misc_feature (1)..(82): Homolog of NCBI NO: 21553463 NR Description: unknown [Arabidopsis thaliana]
  misc_feature (1)..(82): Homolog of NCBI NO: 18403425 NR Description: expressed protein [Arabidopsis thaliana]
MVEIHPGITKIVVRTNGLSLGLSLDELELDVWRFRLPETTRPELVTVACVDGALVVTVPKMVSEEDDDGFGQGVGTGRLVLVL

SEQ ID NO: 51986 - DNA, 803 bp, Glycine max
  misc_feature (1)..(803): Ceres Seq. ID no. 13594582
aaaattcccacgaccatcggaccaaagaatcatacccctctcttctagccattcaaactagtaaacaatggggatactcaggaagaaaaaacacgagcgaaagccgtcgtttaagagtgttttaacctcaatattagctacacaagccgtaacattcctcttgttgatctccggtgtatccctcgccggcacagccgccgcatttatcgctaccatgccactattcgtagtattcagtccgattctcgtaccagctggtattaccactggtttactgactacgggtttagcagccgccggtggcgccggtgcgactgctgtcaccatcatcctgtggctctacaagcaagcaacgggcaaggagccgccagcagtcctgtcaaaagtcttgaaaaagataataccaggtgctgcagccgcgccagcagccgcaccagcagccgctccagcagccgcaccagctgccgcgccagcagccgcaccagcacctaagcccgcagccgcaccagcacctaagccagcagccccaccggcactatgaaaagaagtggtgggcatgagtaaaggctgatatggaaaatttgatacatggaaacaaaagagtaatccaactttttaaaaataaataacaacttcacgtggggatagaaaaaaattcaaatattattctactaatggatgtcgtggtacaaagtagtaacaaatgtaagcatatttattgtatagcattttaagaacgaagctgtgtatcgttgatattagtaccttattcaagttattcraggggggaaaaaaaaaaaaaa

SEQ ID NO: 51987 - protein, 157 aa, Glycine max
  peptide (1)..(157): Ceres Seq. ID no. 15221393
  misc_feature (14)..(128): Pfam Name: Oleosin Pfam Description: Oleosin
  misc_feature (55)..(141): Homolog of NCBI NO: 7488470 NR Description: oleosin-like protein OLN10 - rape (fragment)
  misc_feature (56)..(140): Homolog of NCBI NO: 7488475 NR Description: oleosin-like protein OLN8 - rape (fragment)
  misc_feature (11)..(145): Homolog of NCBI NO: 15081220 NR Description: glycine-rich protein GRP20 [Arabidopsis thaliana]
  misc_feature (11)..(145): Homolog of NCBI NO: 15081227 NR Description: glycine-rich protein GRP20 [Arabidopsis thaliana]
  misc_feature (11)..(147): Homolog of NCBI NO: 15081213 NR Description: glycine-rich protein GRP20 [Arabidopsis thaliana]
  misc_feature (11)..(147): Homolog of NCBI NO: 15240816 NR Description: glycine-rich protein GRP20 [Arabidopsis thaliana]
  misc_feature (1)..(140): Homolog of NCBI NO: 7488519 NR Description: anther-specific protein BNA237 - turnip
  misc_feature (1)..(157): Homolog of NCBI NO: 123952 NR Description: MICROSPORE-SPECIFIC PROTEIN I3
  misc_feature (1)..(156): Homolog of NCBI NO: 1076453 NR Description: oleosin - rape
  misc_feature (1)..(157): Homolog of NCBI NO: 1076452 NR Description: oleosin - rape
MGILRKKKHERKPSFKSVLTSILATQAVTFLLLISGVSLAGTAAAFIATMPLFVVFSPILVPAGITTGLLTTGLAAAGGAGATAVTIILWLYKQATGKEPPAVLSKVLKKIIPGAAAAPAAAPAAAPAAAPAAAPAAAPAPKPAAAPAPKPAAPPAL

SEQ ID NO: 51988 - protein, 108 aa, Glycine max
  peptide (1)..(108): Ceres Seq. ID no. 15221394
  misc_feature (1)..(79): Pfam Name: Oleosin Pfam Description: Oleosin
  misc_feature (6)..(92): Homolog of NCBI NO: 7488470 NR Description: oleosin-like protein OLN10 - rape (fragment)
  misc_feature (7)..(91): Homolog of NCBI NO: 7488475 NR Description: oleosin-like protein OLN8 - rape (fragment)
  misc_feature (1)..(96): Homolog of NCBI NO: 15081220 NR Description: glycine-rich protein GRP20 [Arabidopsis thaliana]
  misc_feature (1)..(96): Homolog of NCBI NO: 15081227 NR Description: glycine-rich protein GRP20 [Arabidopsis thaliana]
  misc_feature (1)..(98): Homolog of NCBI NO: 15081213 NR Description: glycine-rich protein GRP20 [Arabidopsis thaliana]
  misc_feature (1)..(98): Homolog of NCBI NO: 15240816 NR Description: glycine-rich protein GRP20 [Arabidopsis thaliana]
  misc_feature (1)..(91): Homolog of NCBI NO: 7488519 NR Description: anther-specific protein BNA237 - turnip
  misc_feature (1)..(108): Homolog of NCBI NO: 123952 NR Description: MICROSPORE-SPECIFIC PROTEIN I3
  misc_feature (1)..(107): Homolog of NCBI NO: 1076453 NR Description: oleosin - rape
  misc_feature (1)..(108): Homolog of NCBI NO: 1076452 NR Description: oleosin - rape
MPLFVVFSPILVPAGITTGLLTTGLAAAGGAGATAVTIILWLYKQATGKEPPAVLSKVLKKIIPGAAAAPAAAPAAAPAAAPAAAPAAAPAPKPAAAPAPKPAAPPAL

SEQ ID NO: 51989 - DNA, 1339 bp, Glycine max
  misc_feature (1)..(1339): Ceres Seq. ID no. 15177079
aaacacgcggaaaaaaatggaggcatgaacacgcccccctcctcctccgtccccgcctcctccgtccccgatcccgtcgacagcccagcggccccgcccccgccccctcctcgccggcggcacccttgctcgtaggcgggcgtgaggggagcggcgcgcagcgacgatgccgtcgcactcggatctggaccggcagatctcgctgctgcgggactgcaagttcctgccggacgccgaggtcaaggccctctgcgagcaggccaaggcgatcctcatggaggagtggaacgtgcagcccgtgcgctgccccgtcaccgtctgcggcgacatccacggccagttctacgacctcatcgagctcttccgcatcgggggcgacacccccgacaccaactaccttttcatgggcgactacgtcgaccgtggctactattcagtggagactgtttcattattagtggctctcaaagttcgttatagagacagaatcacaatcttgagaggaaatcacgagagccgacaaatcactcaagtgtatggcttctatgatgaatgcttacggaagtacggaaatgcaaatgtctggaagtacttcacagatttgtttgattatttgcctctcacagctcttatagaaaaccaggtgttttgcctccatggtggtctctctccatcattagatacattggacaatattcgttctcttgatcgcatacaagaggtcccgcatgaaggacctatgtgtgatcttttgtggtctgatccggatgaccgatgcgggtggggaatttcaccaagaggagcaggctacacatttggacaagatatagcacaacaatttaaccatacaaatggtcttagccttatttcaagggcccatcaacttgtgatggaagggttcaactgggcacaggagaagaatgttgtcacagttttcagtgcgccaaactactgttaccggtgtggtaacatggctgcgattctcgaaattggggagaacatggatcagaacttcctccaattcgatccagcgccgcggcaaatcgagccagacacaacgcgcaagacccccgactactttttgtaatcgtggtgttgactttttttaactcttctgctgcctggctggatctgtagatctctgtccttagaaaatgggattccttgagctgagttgtgtaccccccctctcattcttttgtttggagattttggttgccgcttctcaggacctcataggacatgttaaaagtacattgcattggtattttttttgtatctccattttgtattatttccgagacagagaagggaagctgcaatagaatcgtctcgtaac

SEQ ID NO: 51990 - protein, 306 aa, Glycine max
  peptide (1)..(306): Ceres Seq. ID no. 15177080
  misc_feature (47)..(242): Pfam Name: Calcineurin-like phosphoesterase Pfam Description: Calcineurin-like phosphoesterase
  misc_feature (1)..(306): Homolog of NCBI NO: 15218928 NR Description: serine/threonine protein phosphatase PP2A
  misc_feature (1)..(306): Homolog of NCBI NO: 21593150 NR Description: serine/threonine protein phosphatase type 2A,
  misc_feature (1)..(306): Homolog of NCBI NO: 11133825 NR Description: Serine/threonine protein phosphatase PP2A
  misc_feature (1)..(306): Homolog of NCBI NO: 15218524 NR Description: serine/threonine protein phosphatase, PP2A
  misc_feature (1)..(306): Homolog of NCBI NO: 7248361 NR Description: type 2A protein phosphatase-2 [Vicia faba]
  misc_feature (1)..(306): Homolog of NCBI NO: 10638985 NR Description: protein phosphatase 2A [Fagus sylvatica]
  misc_feature (1)..(306): Homolog of NCBI NO: 7248359 NR Description: type 2A protein phosphatase-1 [Vicia faba]
  misc_feature (1)..(306): Homolog of NCBI NO: 7435122 NR Description: probable phosphoprotein phosphatase (EC 3.1.3.16)
  misc_feature (1)..(306): Homolog of NCBI NO: 11134222 NR Description: Serine/threonine protein phosphatase PP2A-3
  misc_feature (1)..(306): Homolog of NCBI NO: 11134285 NR Description: Serine/threonine protein phosphatase PP2A-1
MPSHSDLDRQISLLRDCKFLPDAEVKALCEQAKAILMEEWNVQPVRCPVTVCGDIHGQFYDLIELFRIGGDTPDTNYLFMGDYVDRGYYSVETVSLLVALKVRYRDRITILRGNHESRQITQVYGFYDECLRKYGNANVWKYFTDLFDYLPLTALIENQVFCLHGGLSPSLDTLDNIRSLDRIQEVPHEGPMCDLLWSDPDDRCGWGISPRGAGYTFGQDIAQQFNHTNGLSLISRAHQLVMEGFNWAQEKNVVTVFSAPNYCYRCGNMAAILEIGENMDQNFLQFDPAPRQIEPDTTRKTPDYFL

SEQ ID NO: 51991 - protein, 270 aa, Glycine max
  peptide (1)..(270): Ceres Seq. ID no. 15177081
  misc_feature (11)..(206): Pfam Name: Calcineurin-like phosphoesterase Pfam Description: Calcineurin-like phosphoesterase
  misc_feature (1)..(270): Homolog of NCBI NO: 15218928 NR Description: serine/threonine protein phosphatase PP2A
  misc_feature (1)..(270): Homolog of NCBI NO: 21593150 NR Description: serine/threonine protein phosphatase type 2A,
  misc_feature (1)..(270): Homolog of NCBI NO: 11133825 NR Description: Serine/threonine protein phosphatase PP2A
  misc_feature (1)..(270): Homolog of NCBI NO: 15218524 NR Description: serine/threonine protein phosphatase, PP2A
  misc_feature (1)..(270): Homolog of NCBI NO: 7248361 NR Description: type 2A protein phosphatase-2 [Vicia faba]
  misc_feature (1)..(270): Homolog of NCBI NO: 10638985 NR Description: protein phosphatase 2A [Fagus sylvatica]
  misc_feature (1)..(270): Homolog of NCBI NO: 7248359 NR Description: type 2A protein phosphatase-1 [Vicia faba]
  misc_feature (1)..(270): Homolog of NCBI NO: 7435122 NR Description: probable phosphoprotein phosphatase (EC 3.1.3.16)
  misc_feature (1)..(270): Homolog of NCBI NO: 11134222 NR Description: Serine/threonine protein phosphatase PP2A-3
  misc_feature (1)..(270): Homolog of NCBI NO: 11134285 NR Description: Serine/threonine protein phosphatase PP2A-1
MEEWNVQPVRCPVTVCGDIHGQFYDLIELFRIGGDTPDTNYLFMGDYVDRGYYSVETVSLLVALKVRYRDRITILRGNHESRQITQVYGFYDECLRKYGNANVWKYFTDLFDYLPLTALIENQVFCLHGGLSPSLDTLDNIRSLDRIQEVPHEGPMCDLLWSDPDDRCGWGISPRGAGYTFGQDIAQQFNHTNGLSLISRAHQLVMEGFNWAQEKNVVTVFSAPNYCYRCGNMAAILEIGENMDQNFLQFDPAPRQIEPDTTRKTPDYFL

SEQ ID NO: 51992 - protein, 227 aa, Glycine max
  peptide (1)..(227): Ceres Seq. ID no. 15177082
  misc_feature (1)..(163): Pfam Name: Calcineurin-like phosphoesterase Pfam Description: Calcineurin-like phosphoesterase
  misc_feature (1)..(227): Homolog of NCBI NO: 15218928 NR Description: serine/threonine protein phosphatase PP2A
  misc_feature (1)..(227): Homolog of NCBI NO: 21593150 NR Description: serine/threonine protein phosphatase type 2A,
  misc_feature (1)..(227): Homolog of NCBI NO: 11133825 NR Description: Serine/threonine protein phosphatase PP2A
  misc_feature (1)..(227): Homolog of NCBI NO: 15218524 NR Description: serine/threonine protein phosphatase, PP2A
  misc_feature (1)..(227): Homolog of NCBI NO: 7248361 NR Description: type 2A protein phosphatase-2 [Vicia faba]
  misc_feature (1)..(227): Homolog of NCBI NO: 10638985 NR Description: protein phosphatase 2A [Fagus sylvatica]
  misc_feature (1)..(227): Homolog of NCBI NO: 7248359 NR Description: type 2A protein phosphatase-1 [Vicia faba]
  misc_feature (1)..(227): Homolog of NCBI NO: 7435122 NR Description: probable phosphoprotein phosphatase (EC 3.1.3.16)
  misc_feature (1)..(227): Homolog of NCBI NO: 11134222 NR Description: Serine/threonine protein phosphatase PP2A-3
  misc_feature (1)..(227): Homolog of NCBI NO: 11134285 NR Description: Serine/threonine protein phosphatase PP2A-1
MGDYVDRGYYSVETVSLLVALKVRYRDRITILRGNHESRQITQVYGFYDECLRKYGNANVWKYFTDLFDYLPLTALIENQVFCLHGGLSPSLDTLDNIRSLDRIQEVPHEGPMCDLLWSDPDDRCGWGISPRGAGYTFGQDIAQQFNHTNGLSLISRAHQLVMEGFNWAQEKNVVTVFSAPNYCYRCGNMAAILEIGENMDQNFLQFDPAPRQIEPDTTRKTPDYFL

SEQ ID NO: 51993 - DNA, 917 bp, Glycine max
  misc_feature (1)..(917): Ceres Seq. ID no. 12610267
gtcaagagacaagaggactgccaaacccacacccatacaagaggcaggcaaggggcaccctcctcaagcctcaagcaaccaacgcagttcttccaccgatatttccttccctcgccggcaccgccgacgatctgcagccatggcaatggcttacaagatggcgacggaggggatgaacatcaaggaggagtgcaagcggtggttcacggagatgaagtggaagaaggtgcaccgcttcgtggtctacaagatcgacgagcggacgcgcgccgtgctggtggacaaggtgggcggccccggggaggggtacgacgagctcgtcgccgcgctgcccggcgacgactgccgctacgccgtcttcgacttcgacttcgtctccgtcgacaactgccagaagagcaagatcttcttcatcgcatggtcgccggcggcgtcgaggataagggccaagattctgtacgcgacgtcgaagcaaggcctgcggcgggtgctggagggggtccactacgaggtgcaggccaccgagcgctccgagatgggcttcgacgtcatcagagagcgcgcgcaatgagcgagcttgctgccgggagtgagttttatgtctgcagtctgcgcgacgatcgccgctgtactataatcggacggacgctgattggggctggttgggtgtgctctgccggcagcctcgatgcaacctgacgagggtttgggctttgatttagaaaaattatccgtggtttgagattgtgccgtgtgatgtataggcggagctgagagagtggcagcggattaatgaaacgtcccatctctgcgtgcgacgtggaaattccactgacgctggggatgccccgacttcgtttgctattgtgcttcaacacttcaaccgttcaagatagtacttctacggttgattgctc

SEQ ID NO: 51994 - protein, 232 aa, Glycine max
  peptide (1)..(232): Ceres Seq. ID no. 12610268
VKRQEDCQTHTHTRGRQGAPSSSLKQPTQFFHRYFLPSPAPPTICSHGNGLQDGDGGDEHQGGVQAVVHGDEVEEGAPLRGLQDRRADARRAGGQGGRPRGGVRRARRRAARRRLPLRRLRLRLRLRRQLPEEQDLLHRMVAGGVEDKGQDSVRDVEARPAAGAGGGPLRGAGHRALRDGLRRHQRARAMSELAAGSEFYVCSLRDDRRCTIIGRTLIGAGWVCSAGSLDAT

SEQ ID NO: 51995 - protein, 189 aa, Glycine max
  peptide (1)..(189): Ceres Seq. ID no. 12610269
  misc_feature (62)..(189): Pfam Name: Cofilin/tropomyosin-type actin-binding protein Pfam Description: Cofilin/tropomyosin-type actin-binding protein
  misc_feature (58)..(188): Homolog of NCBI NO: 25295741 NR Description: actin depolymerizing factor 6 [imported] -
  misc_feature (54)..(188): Homolog of NCBI NO: 21554405 NR Description: Actin-depolymerizing factor ADF-6 [Arabidopsis
  misc_feature (54)..(188): Homolog of NCBI NO: 18402587 NR Description: actin depolymerizing factor 6
  misc_feature (54)..(188): Homolog of NCBI NO: 24745620 NR Description: actin depolymerizing factor 6 [Solanum tuberosum]
  misc_feature (54)..(188): Homolog of NCBI NO: 4566614 NR Description: actin depolymerizing factor [Populus x canescens]
  misc_feature (53)..(189): Homolog of NCBI NO: 7330254 NR Description: actin depolymerizing factor [Elaeis guineensis]
  misc_feature (54)..(188): Homolog of NCBI NO: 32363121 NR Description: Actin-depolymerizing factor (ADF)
  misc_feature (62)..(189): Homolog of NCBI NO: 15236233 NR Description: actin depolymerizing factor - like protein
  misc_feature (58)..(189): Homolog of NCBI NO: 25295742 NR Description: actin depolymerizing factor 5 [imported] -
  misc_feature (47)..(189): Homolog of NCBI NO: 18398187 NR Description: actin depolymerizing factor 5
SRDKRTAKPTPIQEAGKGHPPQASSNQRSSSTDISFPRRHRRRSAAMAMAYKMATEGMNIKEECKRWFTEMKWKKVHRFVVYKIDERTRAVLVDKVGGPGEGYDELVAALPGDDCRYAVFDFDFVSVDNCQKSKIFFIAWSPAASRIRAKILYATSKQGLRRVLEGVHYEVQATERSEMGFDVIRERAQ

SEQ ID NO: 51996 - protein, 143 aa, Glycine max
  peptide (1)..(143): Ceres Seq. ID no. 12610270
  misc_feature (16)..(143): Pfam Name: Cofilin/tropomyosin-type actin-binding protein Pfam Description: Cofilin/tropomyosin-type actin-binding protein
  misc_feature (12)..(142): Homolog of NCBI NO: 25295741 NR Description: actin depolymerizing factor 6 [imported] -
  misc_feature (8)..(142): Homolog of NCBI NO: 21554405 NR Description: Actin-depolymerizing factor ADF-6 [Arabidopsis
  misc_feature (8)..(142): Homolog of NCBI NO: 18402587 NR Description: actin depolymerizing factor 6
  misc_feature (8)..(142): Homolog of NCBI NO: 24745620 NR Description: actin depolymerizing factor 6 [Solanum tuberosum]
  misc_feature (8)..(142): Homolog of NCBI NO: 4566614 NR Description: actin depolymerizing factor [Populus x canescens]
  misc_feature (7)..(143): Homolog of NCBI NO: 7330254 NR Description: actin depolymerizing factor [Elaeis guineensis]
  misc_feature (8)..(142): Homolog of NCBI NO: 32363121 NR Description: Actin-depolymerizing factor (ADF)
  misc_feature (16)..(143): Homolog of NCBI NO: 15236233 NR Description: actin depolymerizing factor - like protein
  misc_feature (12)..(143): Homolog of NCBI NO: 25295742 NR Description: actin depolymerizing factor 5 [imported] -
  misc_feature (1)..(143): Homolog of NCBI NO: 18398187 NR Description: actin depolymerizing factor 5
MAMAYKMATEGMNIKEECKRWFTEMKWKKVHRFVVYKIDERTRAVLVDKVGGPGEGYDELVAALPGDDCRYAVFDFDFVSVDNCQKSKIFFIAWSPAASRIRAKILYATSKQGLRRVLEGVHYEVQATERSEMGFDVIRERAQ

SEQ ID NO: 51997 - DNA, 1342 bp, Glycine max
  misc_feature (1)..(1342): Ceres Seq. ID no. 12781552
aatcgaaaactcacttctagatttccgggcctcaggattgcccctccctaccgtagctttgctaagtagttgcttcttcttcttggtttcttttcttgattgctttgggtctccgattttttgggtcctcggtttcttggtcctcccctgaatcttgtagagtctgttcctttcgccgccggtagccatggacgacaggattccgccgccgtctcacctgcagcagtactcgcagtcccctgtccattcttcgcctcatcaccaccacctcaattccatgaggtactctgcctcctctgagagagaaaggtatctggctgagttgcttgctgagaggcagaagttaggcccattcattcaagttcttccctactgcaccaggctcttgaaccaagagattttgcgggcatcttctttgccacctaaccataattttgttgatgctgagagaattgagcatggtagcccgttaaggttacctggccacccagtgaatggtcaaccaatggatctggagggatggtcaggaaggcaagcagagcatatgggggttctgcaagcatcaccaatgagctggaatggtgctccagcacttggtggtactcctgttgtcaagaaacttgtgaggctagatgttcctgtggacaagtatcctaacttcaactttgttggccgtctattggggccacgaggaaactccctgaaaagagttgaagctacgactcaatgcagagtttacattcgtgggcgtggatcagttaaagactctgtgaaggaagagaagctgagagataagcctggatatgagcacctcaatgaggcactgcacgtgcttgtggaagcagagttcccagcagacattattgatgtgcgtctaaaccaagctgtgaccatcctggaagatcttctcaaaccaatggatgagtccatggactactacaagaagcagcagctgagagagctggccatcctgaatggcactctgagggaggaaagccccagcccccaccttagcccgagcgtgtccccctttaactccgccgggatgaagcgtccgaaaacggggcggtgatctaaaaagacttggtctgtctgaatctgatgacaagggtggagatgattggtgttgcatttgccgggatgatgagtgctggcctatgcctgtcatgatctgcgtgctttaccaaccgtagatgggtccgtgggcgaatgatgatcctcggtgggcttgattgatgtttgacgctgttcctattatttattctttctgtgcaatctgactttggaaaaaatgacattgtttattggtttggggtaagttaacaaggccaggtggccatcc

SEQ ID NO: 51998 - protein, 294 aa, Glycine max
  peptide (1)..(294): Ceres Seq. ID no. 12781553
  misc_feature (147)..(201): Pfam Name: KH domain Pfam Description: KH domain
  misc_feature (6)..(292): Homolog of NCBI NO: 15236738 NR Description: KH domain protein; protein id: At4g26480.1
  misc_feature (22)..(292): Homolog of NCBI NO: 15241136 NR Description: KH domain protein; protein id: At5g56140.1
  misc_feature (41)..(291): Homolog of NCBI NO: 34900448 NR Description: contains EST C27129(C51039)~similar to
  misc_feature (38)..(294): Homolog of NCBI NO: 40645104 NR Description: hypothetical protein [Nicotiana tabacum]
  misc_feature (14)..(293): Homolog of NCBI NO: 15224909 NR Description: KH domain protein
  misc_feature (22)..(294): Homolog of NCBI NO: 30680583 NR Description: KH domain protein [Arabidopsis thaliana]
  misc_feature (6)..(294): Homolog of NCBI NO: 12322716 NR Description: unknown protein; 28504-31237 [Arabidopsis
  misc_feature (1)..(292): Homolog of NCBI NO: 16930473 NR Description: At1g09660/F21M12_5 [Arabidopsis thaliana]
  misc_feature (1)..(292): Homolog of NCBI NO: 22329449 NR Description: KH domain quaking protein, putative
  misc_feature (70)..(294): Homolog of NCBI NO: 34907446 NR Description: P0434C04.5 [Oryza sativa (japonica
MDDRIPPPSHLQQYSQSPVHSSPHHHHLNSMRYSASSERERYLAELLAERQKLGPFIQVLPYCTRLLNQEILRASSLPPNHNFVDAERIEHGSPLRLPGHPVNGQPMDLEGWSGRQAEHMGVLQASPMSWNGAPALGGTPVVKKLVRLDVPVDKYPNFNFVGRLLGPRGNSLKRVEATTQCRVYIRGRGSVKDSVKEEKLRDKPGYEHLNEALHVLVEAEFPADIIDVRLNQAVTILEDLLKPMDESMDYYKKQQLRELAILNGTLREESPSPHLSPSVSPFNSAGMKRPKTGR

SEQ ID NO: 51999 - protein, 264 aa, Glycine max
  peptide (1)..(264): Ceres Seq. ID no. 12781554
  misc_feature (117)..(171): Pfam Name: KH domain Pfam Description: KH domain
  misc_feature (1)..(262): Homolog of NCBI NO: 15236738 NR Description: KH domain protein; protein id: At4g26480.1
  misc_feature (1)..(262): Homolog of NCBI NO: 15241136 NR Description: KH domain protein; protein id: At5g56140.1
  misc_feature (11)..(261): Homolog of NCBI NO: 34900448 NR Description: contains EST C27129(C51039)~similar to
  misc_feature (8)..(264): Homolog of NCBI NO: 40645104 NR Description: hypothetical protein [Nicotiana tabacum]
  misc_feature (1)..(263): Homolog of NCBI NO: 15224909 NR Description: KH domain protein
  misc_feature (1)..(264): Homolog of NCBI NO: 30680583 NR Description: KH domain protein [Arabidopsis thaliana]
  misc_feature (1)..(264): Homolog of NCBI NO: 12322716 NR Description: unknown protein; 28504-31237 [Arabidopsis
  misc_feature (1)..(262): Homolog of NCBI NO: 16930473 NR Description: At1g09660/F21M12_5 [Arabidopsis thaliana]
  misc_feature (1)..(262): Homolog of NCBI NO: 22329449 NR Description: KH domain quaking protein, putative
  misc_feature (40)..(264): Homolog of NCBI NO: 34907446 NR Description: P0434C04.5 [Oryza sativa (japonica
MRYSASSERERYLAELLAERQKLGPFIQVLPYCTRLLNQEILRASSLPPNHNFVDAERIEHGSPLRLPGHPVNGQPMDLEGWSGRQAEHMGVLQASPMSWNGAPALGGTPVVKKLVRLDVPVDKYPNFNFVGRLLGPRGNSLKRVEATTQCRVYIRGRGSVKDSVKEEKLRDKPGYEHLNEALHVLVEAEFPADIIDVRLNQAVTILEDLLKPMDESMDYYKKQQLRELAILNGTLREESPSPHLSPSVSPFNSAGMKRPKTGR

SEQ ID NO: 52000 - protein, 188 aa, Glycine max
  peptide (1)..(188): Ceres Seq. ID no. 12781555
  misc_feature (41)..(95): Pfam Name: KH domain Pfam Description: KH domain
  misc_feature (1)..(186): Homolog of NCBI NO: 15236738 NR Description: KH domain protein; protein id: At4g26480.1
  misc_feature (1)..(186): Homolog of NCBI NO: 15241136 NR Description: KH domain protein; protein id: At5g56140.1
  misc_feature (1)..(185): Homolog of NCBI NO: 34900448 NR Description: contains EST C27129(C51039)~similar to
  misc_feature (1)..(188): Homolog of NCBI NO: 40645104 NR Description: hypothetical protein [Nicotiana tabacum]
  misc_feature (1)..(187): Homolog of NCBI NO: 15224909 NR Description: KH domain protein
  misc_feature (1)..(188): Homolog of NCBI NO: 30680583 NR Description: KH domain protein [Arabidopsis thaliana]
  misc_feature (1)..(188): Homolog of NCBI NO: 12322716 NR Description: unknown protein; 28504-31237 [Arabidopsis
  misc_feature (1)..(186): Homolog of NCBI NO: 16930473 NR Description: At1g09660/F21M12_5 [Arabidopsis thaliana]
  misc_feature (1)..(186): Homolog of NCBI NO: 22329449 NR Description: KH domain quaking protein, putative
  misc_feature (1)..(188): Homolog of NCBI NO: 34907446 NR Description: P0434C04.5 [Oryza sativa (japonica
MDLEGWSGRQAEHMGVLQASPMSWNGAPALGGTPVVKKLVRLDVPVDKYPNFNFVGRLLGPRGNSLKRVEATTQCRVYIRGRGSVKDSVKEEKLRDKPGYEHLNEALHVLVEAEFPADIIDVRLNQAVTILEDLLKPMDESMDYYKKQQLRELAILNGTLREESPSPHLSPSVSPFNSAGMKRPKTGR

SEQ ID NO: 52001 - DNA, 467 bp, Glycine max
  misc_feature (1)..(467): Ceres Seq. ID no. 13594583
aaatcagacaaaacacgatggcatcagcagcgccattctccggcaccggcagtctccttcgcctgacaaaaccaggaacgccacagccccagttcttctcccctccgccgtctcgctcccacttccaccttcgaacccgccccgccaaggcaaagagcccaatcgccggagccatcgcctcctcttccatggcggcagcccagccccagacgtgcgacggccaacaacaacgggcggaggaggccatgaagctgctgttcgtcgagatgggcgtcgggtacgaccagcacggacaggacatcacctccgccgcggtgcgcgcctgcaaggatgccatctcctccaactccatccccgccttccgccgcgggtcgataccaggggtgaacagtgaacagatgaaactgcagatcaagctgggtgtcccgaggccggtgcagcatctgttggactttgagagaatcaag

SEQ ID NO: 52002 - protein, 155 aa, Glycine max
  peptide (1)..(155): Ceres Seq. ID no. 13594584
  misc_feature (83)..(154): Homolog of NCBI NO: 16802555 NR Description: lmo0512 [Listeria monocytogenes EGD-e]
  misc_feature (123)..(154): Homolog of NCBI NO: 25373109 NR Description: F28N24.25 protein - Arabidopsis thaliana
  misc_feature (28)..(97): Homolog of NCBI NO: 25373109 NR Description: F28N24.25 protein - Arabidopsis thaliana
  misc_feature (83)..(154): Homolog of NCBI NO: 23098421 NR Description: hypothetical protein [Oceanobacillus iheyensis
  misc_feature (84)..(154): Homolog of NCBI NO: 23098097 NR Description: hypothetical protein [Oceanobacillus iheyensis
  misc_feature (82)..(154): Homolog of NCBI NO: 37520060 NR Description: hypothetical protein glr0491 [Gloeobacter
  misc_feature (28)..(154): Homolog of NCBI NO: 30690579 NR Description: expressed protein [Arabidopsis thaliana]
  misc_feature (28)..(154): Homolog of NCBI NO: 21954066 NR Description: unknown protein [Arabidopsis thaliana]
  misc_feature (28)..(154): Homolog of NCBI NO: 18396927 NR Description: expressed protein [Arabidopsis thaliana]
  misc_feature (6)..(154): Homolog of NCBI NO: 34912624 NR Description: P0410E01.16 [Oryza sativa (japonica
IRQNTMASAAPFSGTGSLLRLTKPGTPQPQFFSPPPSRSHFHLRTRPAKAKSPIAGAIASSSMAAAQPQTCDGQQQRAEEAMKLLFVEMGVGYDQHGQDITSAAVRACKDAISSNSIPAFRRGSIPGVNSEQMKLQIKLGVPRPVQHLLDFERIK

SEQ ID NO: 52003 - protein, 150 aa, Glycine max
  peptide (1)..(150): Ceres Seq. ID no. 13594585
  misc_feature (78)..(149): Homolog of NCBI NO: 16802555 NR Description: lmo0512 [Listeria monocytogenes EGD-e]
  misc_feature (118)..(149): Homolog of NCBI NO: 25373109 NR Description: F28N24.25 protein - Arabidopsis thaliana
  misc_feature (23)..(92): Homolog of NCBI NO: 25373109 NR Description: F28N24.25 protein - Arabidopsis thaliana
  misc_feature (78)..(149): Homolog of NCBI NO: 23098421 NR Description: hypothetical protein [Oceanobacillus iheyensis
  misc_feature (79)..(149): Homolog of NCBI NO: 23098097 NR Description: hypothetical protein [Oceanobacillus iheyensis
  misc_feature (77)..(149): Homolog of NCBI NO: 37520060 NR Description: hypothetical protein glr0491 [Gloeobacter
  misc_feature (23)..(149): Homolog of NCBI NO: 30690579 NR Description: expressed protein [Arabidopsis thaliana]
  misc_feature (23)..(149): Homolog of NCBI NO: 21954066 NR Description: unknown protein [Arabidopsis thaliana]
  misc_feature (23)..(149): Homolog of NCBI NO: 18396927 NR Description: expressed protein [Arabidopsis thaliana]
  misc_feature (1)..(149): Homolog of NCBI NO: 34912624 NR Description: P0410E01.16 [Oryza sativa (japonica
MASAAPFSGTGSLLRLTKPGTPQPQFFSPPPSRSHFHLRTRPAKAKSPIAGAIASSSMAAAQPQTCDGQQQRAEEAMKLLFVEMGVGYDQHGQDITSAAVRACKDAISSNSIPAFRRGSIPGVNSEQMKLQIKLGVPRPVQHLLDFERIK

SEQ ID NO: 52004 - protein, 130 aa, Glycine max
  peptide (1)..(130): Ceres Seq. ID no. 13594586
NQTKHDGISSAILRHRQSPSPDKTRNATAPVLLPSAVSLPLPPSNPPRQGKEPNRRSHRLLFHGGSPAPDVRRPTTTGGGGHEAAVRRDGRRVRPARTGHHLRRGARLQGCHLLQLHPRLPPRVDTRGEQ

SEQ ID NO: 52005 - DNA, 1032 bp, Glycine max
  misc_feature (1)..(1032): Ceres Seq. ID no. 13638835
agcgactagaatatcccggcccgaaacagcaaggtctctctctcgcgctcgcctctctcctcctcgtcttcggcggcggcgacggcggtggcgatgctgtccggcgacgttcccccgaaccagaccgtctacttcaggaacctcaacgagaaggtcaagaaagaagagctgaagagatcactttatgcattgtgctctcagtatggaaggatagtggatgttgtggccttgaaaactcataaactgagggggcaagcctgggtggcattcagtgaaattacagcggctaccaacgctttccggggcctacaggacttcgatttttacggcaaaaaaatgcgggtacaatatgcaaaaacaaagtctgactgttttgcaaaagcagatgggtcttatgctcctaaagagaaaaggaagaagcaagaggagaaagctgctgagaaaaaacggcgaactgaagatgggcaacaacctggtgctagtgctcctgttgccccaagcaatggaactggtcatcaaccttctcgttttgccaagcctccgcaagagccagctgctccgccgaacaacatcctcttcctccagaacatgccggaccagaccacgagcatgatgctccagatcctgttccagcaataccctggtttccgggaggtgcggatgatcgaagccaagccaggcattgcttttgtggagtacgaggatgagaaccagtccatggttgcaatggaagccctccagggtttcaagatcagcccagagaacccaatggccatctcatacgccaaaaagtgaaaacgatccatgtgatctcggaaccggccaaaagaaatctgtaactgtaagattttccaccttaagctttcaagctgctgtgctgtgcttgtgctggctttctaaccctgtatttcttggaagtgacttgcttgttgtttaagaagttaaaaagtatgtgctactttaaatcaggtttggctctacgttttcatgtgaaccctggtattgtccttgtcaagtctggtatcgtggcct

SEQ ID NO: 52006 - protein, 233 aa, Glycine max
  peptide (1)..(233): Ceres Seq. ID no. 13638836
  misc_feature (161)..(228): Pfam Name: RNA recognition motif. (a.k.a. RRM, RBD, or RNP domain) Pfam Description: RNA recognition motif. (a.k.a. RRM, RBD, or RNP
  misc_feature (5)..(233): Homolog of NCBI NO: 15226631 NR Description: small nuclear ribonucleoprotein (spliceosomal
  misc_feature (1)..(233): Homolog of NCBI NO: 34897622 NR Description: putative small nuclear ribonucleoprotein U1A
  misc_feature (4)..(233): Homolog of NCBI NO: 2119045 NR Description: small nuclear ribonucleoprotein U1A - potato
  misc_feature (1)..(233): Homolog of NCBI NO: 25294325 NR Description: hypothetical protein [imported] - Arabidopsis
  misc_feature (1)..(233): Homolog of NCBI NO: 19347861 NR Description: putative spliceosomal protein (U2B) [Arabidopsis
  misc_feature (1)..(233): Homolog of NCBI NO: 21593001 NR Description: putative small nuclear ribonucleoprotein U2B
  misc_feature (1)..(233): Homolog of NCBI NO: 30679892 NR Description: small nuclear ribonucleoprotein U2B (spliceosomal
  misc_feature (1)..(233): Homolog of NCBI NO: 30679897 NR Description: small nuclear ribonucleoprotein U2B (spliceosomal
  misc_feature (1)..(233): Homolog of NCBI NO: 15227729 NR Description: small nuclear ribonucleoprotein U2B (spliceosomal
  misc_feature (1)..(233): Homolog of NCBI NO: 421960 NR Description: small nuclear ribonucleoprotein U2B'' - potato
MLSGDVPPNQTVYFRNLNEKVKKEELKRSLYALCSQYGRIVDVVALKTHKLRGQAWVAFSEITAATNAFRGLQDFDFYGKKMRVQYAKTKSDCFAKADGSYAPKEKRKKQEEKAAEKKRRTEDGQQPGASAPVAPSNGTGHQPSRFAKPPQEPAAPPNNILFLQNMPDQTTSMMLQILFQQYPGFREVRMIEAKPGIAFVEYEDENQSMVAMEALQGFKISPENPMAISYAKK

SEQ ID NO: 52007 - protein, 152 aa, Glycine max
  peptide (1)..(152): Ceres Seq. ID no. 13638837
  misc_feature (80)..(147): Pfam Name: RNA recognition motif. (a.k.a. RRM, RBD, or RNP domain) Pfam Description: RNA recognition motif. (a.k.a. RRM, RBD, or RNP
  misc_feature (1)..(152): Homolog of NCBI NO: 15226631 NR Description: small nuclear ribonucleoprotein (spliceosomal
  misc_feature (1)..(152): Homolog of NCBI NO: 34897622 NR Description: putative small nuclear ribonucleoprotein U1A
  misc_feature (1)..(152): Homolog of NCBI NO: 2119045 NR Description: small nuclear ribonucleoprotein U1A - potato
  misc_feature (1)..(152): Homolog of NCBI NO: 25294325 NR Description: hypothetical protein [imported] - Arabidopsis
  misc_feature (1)..(152): Homolog of NCBI NO: 19347861 NR Description: putative spliceosomal protein (U2B) [Arabidopsis
  misc_feature (1)..(152): Homolog of NCBI NO: 21593001 NR Description: putative small nuclear ribonucleoprotein U2B
  misc_feature (1)..(152): Homolog of NCBI NO: 30679892 NR Description: small nuclear ribonucleoprotein U2B (spliceosomal
  misc_feature (1)..(152): Homolog of NCBI NO: 30679897 NR Description: small nuclear ribonucleoprotein U2B (spliceosomal
  misc_feature (1)..(152): Homolog of NCBI NO: 15227729 NR Description: small nuclear ribonucleoprotein U2B (spliceosomal
  misc_feature (1)..(152): Homolog of NCBI NO: 421960 NR Description: small nuclear ribonucleoprotein U2B'' - potato
MRVQYAKTKSDCFAKADGSYAPKEKRKKQEEKAAEKKRRTEDGQQPGASAPVAPSNGTGHQPSRFAKPPQEPAAPPNNILFLQNMPDQTTSMMLQILFQQYPGFREVRMIEAKPGIAFVEYEDENQSMVAMEALQGFKISPENPMAISYAKK

SEQ ID NO: 52008 - DNA, 879 bp, Glycine max
  misc_feature (1)..(879): Ceres Seq. ID no. 12609093
cctcactgcagaaacaccacacgatctgaaaaaaccgacagaacatgtcgtcggggaagcaggagacggcggcggtgcgcgtgctgggcaggtggccgagcccgttcgtgatccgggtgctgatagctcttgggctcaagggcgtggaccacgagctcgtggaggaggcggcgggcaacaagagcgagctgctgctcgcctccaaccccgtgcacaagaagatccccgtgctcctgcaccacggcaggcccgtctccgagtccctcatcatcgtccagtacgtcgacgaggcctgggcctcccaagccccggcgctcatcccgtccgacccctacgcccgcgcggccgagcggttctgggcccagtacgtcgacgacaagtttcctacggcgatccgggtcctgaggggaaggctggacggagacaaggaagaagcggcggctcaggtgtgcgccgctctgcagcacctggaggtggccttcgtcgagtgcggccaagggaaggattacttcggcggcgacggcgtcggttacctggacattgctctcgggtcgcacctcggatgggtcagggcggtagagaggatcgctgaaatcaggctgctcgacgcggccaaggttcctaagctggcggcgtgggcggatcggttctgcgcccacccggcggtggcgaacgccatgcctaacgtggacaggttcgtggagttcagcgtcaagaatgacggcgttctgaaggcggctagtgctaattccaagtgagcgaactgttgtgggcactagacagcgctcgatggcatagccagaataagtaacctgctggctgttggtgtaaaccctcttttattatatggcaattgataaatctcgaatgtttggattt

SEQ ID NO: 52009 - protein, 237 aa, Glycine max
  peptide (1)..(237): Ceres Seq. ID no. 12609094
  misc_feature (11)..(237): Homolog of NCBI NO: 11385505 NR Description: glutathione S-transferase GST 27 [Zea mays]
  misc_feature (13)..(237): Homolog of NCBI NO: 33304610 NR Description: tau class GST protein 4 [Oryza sativa (indica
  misc_feature (11)..(234): Homolog of NCBI NO: 37536350 NR Description: putative glutathione S-transferase
  misc_feature (11)..(222): Homolog of NCBI NO: 11385525 NR Description: glutathione S-transferase GST 37 [Zea mays]
  misc_feature (13)..(222): Homolog of NCBI NO: 11385495 NR Description: glutathione S-transferase GST 22 [Zea mays]
  misc_feature (23)..(224): Homolog of NCBI NO: 37535432 NR Description: putative glutathione S-transferase
  misc_feature (2)..(234): Homolog of NCBI NO: 37536248 NR Description: putative glutathione S-transferase
  misc_feature (1)..(237): Homolog of NCBI NO: 37536246 NR Description: putative glutathione S-transferase
  misc_feature (9)..(237): Homolog of NCBI NO: 11385513 NR Description: glutathione S-transferase GST 31 [Zea mays]
  misc_feature (9)..(223): Homolog of NCBI NO: 11385519 NR Description: glutathione S-transferase GST 34 [Zea mays]
MSSGKQETAAVRVLGRWPSPFVIRVLIALGLKGVDHELVEEAAGNKSELLLASNPVHKKIPVLLHHGRPVSESLIIVQYVDEAWASQAPALIPSDPYARAAERFWAQYVDDKFPTAIRVLRGRLDGDKEEAAAQVCAALQHLEVAFVECGQGKDYFGGDGVGYLDIALGSHLGWVRAVERIAEIRLLDAAKVPKLAAWADRFCAHPAVANAMPNVDRFVEFSVKNDGVLKAASANSK

SEQ ID NO: 52010 - protein, 196 aa, Glycine max
  peptide (1)..(196): Ceres Seq. ID no. 12609095
  misc_feature (17)..(195): Pfam Name: HlyD family secretion protein Pfam Description: HlyD family secretion protein
LTAETPHDLKKPTEHVVGEAGDGGGARAGQVAEPVRDPGADSSWAQGRGPRARGGGGGQQERAAARLQPRAQEDPRAPAPRQARLRVPHHRPVRRRGLGLPSPGAHPVRPLRPRGRAVLGPVRRRQVSYGDPGPEGKAGRRQGRSGGSGVRRSAAPGGGLRRVRPREGLLRRRRRRLPGHCSRVAPRMGQGGREDR

SEQ ID NO: 52011 - DNA, 1015 bp, Glycine max
  misc_feature (1)..(1015): Ceres Seq. ID no. 13638838
ttttagatcacaccgtgggttttcttggtcggtaggaataggattcaggcccgggcggccgcgtcaaaatcgtctctttgctcctcctcctgtccgtccgtctccgtccgtccgcccgcccgccccgaagcgtctcgccgccccctccaccggagaaccccctcgaaggcgagcacccgccctccccttcctcccggattcttgtctgccatgggtgactacacaatccggataagcaccagcttgatcgagcagctcgcgcgcgatgacgagaagcagatgaagaggaggaccaggaaacccaagccgaggaaggtcgtggagcaaccagaggagcctcaggacaatggcagggaacttccaactgaacccaagagcagccctgctcctgttttgccttttccgccacccatgtacctgccagtgacccccgctcctccaccgcccccgcccgtgatccaggaggtggaagccatacgcgccgtggttgtggagagcgagaaggtgctggagaagctgcagaagaaggaggcgacgatgcgcgaggagctcaccaagagggccaaggagctgcacgacaaggagttcaagctgccctaccagaacccctcgccgtgcaccgacgagagggcaggctgcgctgagtgctacaggagcaacgtgcaggacccgctcaagtgcgccgaggcggtcaagaggttcgaggcgtgcgttcgcatggcgattcggggcggtaccaccatgggagctgctcagtaggcagtggcgctgggagtcggggctgagtgagcgaggtgtcgagcacacgattttgcttctgtcgggatgattgattgaataacctgcctggatttttgtttggtgagacctgaaacaccatcagttgtagattaattctggtaacgggttgctactggtgttggcaacaagaggccatgagtgtccttgaatttaggggagtggctccatgctacttgcatacatattacaaaatgagacatgaaatttgcagggt

SEQ ID NO: 52012 - protein, 182 aa, Glycine max
  peptide (1)..(182): Ceres Seq. ID no. 13638839
  misc_feature (31)..(81): Pfam Name: Extensin-like region Pfam Description: Extensin-like region
  misc_feature (1)..(169): Homolog of NCBI NO: 18413789 NR Description: expressed protein [Arabidopsis thaliana]
MGDYTIRISTSLIEQLARDDEKQMKRRTRKPKPRKVVEQPEEPQDNGRELPTEPKSSPAPVLPFPPPMYLPVTPAPPPPPPVIQEVEAIRAVVVESEKVLEKLQKKEATMREELTKRAKELHDKEFKLPYQNPSPCTDERAGCAECYRSNVQDPLKCAEAVKRFEACVRMAIRGGTTMGAAQ

SEQ ID NO: 52013 - protein, 159 aa, Glycine max
  peptide (1)..(159): Ceres Seq. ID no. 13638840
  misc_feature (8)..(58): Pfam Name: Extensin-like region Pfam Description: Extensin-like region
  misc_feature (1)..(146): Homolog of NCBI NO: 18413789 NR Description: expressed protein [Arabidopsis thaliana]
MKRRTRKPKPRKVVEQPEEPQDNGRELPTEPKSSPAPVLPFPPPMYLPVTPAPPPPPPVIQEVEAIRAVVVESEKVLEKLQKKEATMREELTKRAKELHDKEFKLPYQNPSPCTDERAGCAECYRSNVQDPLKCAEAVKRFEACVRMAIRGGTTMGAAQ

SEQ ID NO: 52014 - protein, 115 aa, Glycine max
  peptide (1)..(115): Ceres Seq. ID no. 13638841
  misc_feature (1)..(102): Homolog of NCBI NO: 18413789 NR Description: expressed protein [Arabidopsis thaliana]
MYLPVTPAPPPPPPVIQEVEAIRAVVVESEKVLEKLQKKEATMREELTKRAKELHDKEFKLPYQNPSPCTDERAGCAECYRSNVQDPLKCAEAVKRFEACVRMAIRGGTTMGAAQ

SEQ ID NO: 52015 - DNA, 1022 bp, Glycine max
  misc_feature (1)..(1022): Ceres Seq. ID no. 15177108
aactcatccaccacagctttgctgcaaccaccagtgaagcactcttgatcaacaaactctagctgatcagtgctagctaagcttgctacatagcaagccatgggttactccaaaaacctaggggctagcctgtttgccatgctgctgcttgctccggccgtcctggcctccgaccctgaccctctccaagacttctgcgttgctgacctcgacggcaaggcggtctctgtgaacgggcatccatgcaagcccatgtcggaggccggtgacgacttcctcttctcgaccaagctggccaaggccggcaacacgtccaccccgaatggctcggccgtgacggagctcgacgtggccgagtggcccggtacgaacacgctgggtgtgtccatgaaccgtgtggacttcgcgccgggaggcaccaacccgccgcatgtccacccgcgcgggaccgagatcggcatggtgatgaaaggtgagctcctcgttggaatcctcggaagcctcgactccggaaacaagctctactctagggtggtgcgtgctggagagacgttcctcatcccacgcgggctcatgcacttccagttcaacgttggtaagacagaggcctacatggttgtttccttcaacagccagaaccccggcatcgttttcgtgccgctcatgctcttcggttccaacccgccaatccccacgccggtgctcaccaaggcactaagggtggaggccggggtcgtcgaacttctcaagtccaagttcgctggtgggtcttaatccctgggagcttgccctgaaatgatgagtatataatttgatatatgcatgccaatgagatttaataattgttcagcagaagacacgtattcaagcttctagctaagctcgcatgcagttgtaataagattgaataagttagcctcgcggtttagccttcagagccaatacgaggaatcgaagtgtactgcttttcattgtcgtatttgttcttttcactgaatggaatatataattatcattttcgc

SEQ ID NO: 52016 - protein, 224 aa, Glycine max
  peptide (1)..(224): Ceres Seq. ID no. 15177109
  misc_feature (63)..(214): Pfam Name: Cupin Pfam Description: Cupin
  misc_feature (1)..(223): Homolog of NCBI NO: 21912430 NR Description: oxalate oxidase 4 [Lolium perenne]
  misc_feature (1)..(223): Homolog of NCBI NO: 21912428 NR Description: oxalate oxidase 2 [Lolium perenne]
  misc_feature (1)..(223): Homolog of NCBI NO: 22138786 NR Description: oxalate oxidase [Lolium perenne]
  misc_feature (1)..(223): Homolog of NCBI NO: 11967814 NR Description: oxalate oxidase [Lolium perenne]
  misc_feature (1)..(224): Homolog of NCBI NO: 121131 NR Description: Oxalate oxidase GF-3.8 precursor (Germin GF-3.8)
  misc_feature (1)..(223): Homolog of NCBI NO: 121129 NR Description: Oxalate oxidase GF-2.8 precursor (Germin GF-2.8)
  misc_feature (1)..(224): Homolog of NCBI NO: 7447343 NR Description: germin homolog Ger3 - wheat
  misc_feature (1)..(223): Homolog of NCBI NO: 1171937 NR Description: Oxalate oxidase 2 precursor (Germin)
  misc_feature (1)..(224): Homolog of NCBI NO: 2266668 NR Description: oxalate oxidase [Hordeum vulgare]
  misc_feature (1)..(210): Homolog of NCBI NO: 7447342 NR Description: germin homolog Ger1 - wheat
MGYSKNLGASLFAMLLLAPAVLASDPDPLQDFCVADLDGKAVSVNGHPCKPMSEAGDDFLFSTKLAKAGNTSTPNGSAVTELDVAEWPGTNTLGVSMNRVDFAPGGTNPPHVHPRGTEIGMVMKGELLVGILGSLDSGNKLYSRVVRAGETFLIPRGLMHFQFNVGKTEAYMVVSFNSQNPGIVFVPLMLFGSNPPIPTPVLTKALRVEAGVVELLKSKFAGGS

SEQ ID NO: 52017 - protein, 211 aa, Glycine max
  peptide (1)..(211): Ceres Seq. ID no. 15177110
  misc_feature (50)..(201): Pfam Name: Cupin Pfam Description: Cupin
  misc_feature (1)..(210): Homolog of NCBI NO: 21912430 NR Description: oxalate oxidase 4 [Lolium perenne]
  misc_feature (1)..(210): Homolog of NCBI NO: 21912428 NR Description: oxalate oxidase 2 [Lolium perenne]
  misc_feature (1)..(210): Homolog of NCBI NO: 22138786 NR Description: oxalate oxidase [Lolium perenne]
  misc_feature (1)..(210): Homolog of NCBI NO: 11967814 NR Description: oxalate oxidase [Lolium perenne]
  misc_feature (1)..(211): Homolog of NCBI NO: 121131 NR Description: Oxalate oxidase GF-3.8 precursor (Germin GF-3.8)
  misc_feature (1)..(210): Homolog of NCBI NO: 121129 NR Description: Oxalate oxidase GF-2.8 precursor (Germin GF-2.8)
  misc_feature (1)..(211): Homolog of NCBI NO: 7447343 NR Description: germin homolog Ger3 - wheat
  misc_feature (1)..(210): Homolog of NCBI NO: 1171937 NR Description: Oxalate oxidase 2 precursor (Germin)
  misc_feature (1)..(211): Homolog of NCBI NO: 2266668 NR Description: oxalate oxidase [Hordeum vulgare]
  misc_feature (1)..(197): Homolog of NCBI NO: 7447342 NR Description: germin homolog Ger1 - wheat
MLLLAPAVLASDPDPLQDFCVADLDGKAVSVNGHPCKPMSEAGDDFLFSTKLAKAGNTSTPNGSAVTELDVAEWPGTNTLGVSMNRVDFAPGGTNPPHVHPRGTEIGMVMKGELLVGILGSLDSGNKLYSRVVRAGETFLIPRGLMHFQFNVGKTEAYMVVSFNSQNPGIVFVPLMLFGSNPPIPTPVLTKALRVEAGVVELLKSKFAGGS

SEQ ID NO: 52018 - protein, 173 aa, Glycine max
  peptide (1)..(173): Ceres Seq. ID no. 15177111
  misc_feature (12)..(163): Pfam Name: Cupin Pfam Description: Cupin
  misc_feature (1)..(172): Homolog of NCBI NO: 21912430 NR Description: oxalate oxidase 4 [Lolium perenne]
  misc_feature (1)..(172): Homolog of NCBI NO: 21912428 NR Description: oxalate oxidase 2 [Lolium perenne]
  misc_feature (1)..(172): Homolog of NCBI NO: 22138786 NR Description: oxalate oxidase [Lolium perenne]
  misc_feature (1)..(172): Homolog of NCBI NO: 11967814 NR Description: oxalate oxidase [Lolium perenne]
  misc_feature (1)..(173): Homolog of NCBI NO: 121131 NR Description: Oxalate oxidase GF-3.8 precursor (Germin GF-3.8)
  misc_feature (1)..(172): Homolog of NCBI NO: 121129 NR Description: Oxalate oxidase GF-2.8 precursor (Germin GF-2.8)
  misc_feature (1)..(173): Homolog of NCBI NO: 7447343 NR Description: germin homolog Ger3 - wheat
  misc_feature (1)..(172): Homolog of NCBI NO: 1171937 NR Description: Oxalate oxidase 2 precursor (Germin)
  misc_feature (1)..(173): Homolog of NCBI NO: 2266668 NR Description: oxalate oxidase [Hordeum vulgare]
  misc_feature (1)..(159): Homolog of NCBI NO: 7447342 NR Description: germin homolog Ger1 - wheat
MSEAGDDFLFSTKLAKAGNTSTPNGSAVTELDVAEWPGTNTLGVSMNRVDFAPGGTNPPHVHPRGTEIGMVMKGELLVGILGSLDSGNKLYSRVVRAGETFLIPRGLMHFQFNVGKTEAYMVVSFNSQNPGIVFVPLMLFGSNPPIPTPVLTKALRVEAGVVELLKSKFAGGS

SEQ ID NO: 52019 - DNA, 926 bp, Glycine max
  misc_feature (1)..(926): Ceres Seq. ID no. 12609096
atcaaaatattcaaacctaaccccaaactcaaaccatgtcttcttccaactgtccgtcaccgttacccaccgtcacgaaacttcaagttgattccgttacttttccaccgtccgtcatctcaccggcttcctccaaccctctcttcctcggtggcgcaggtgtgcgaggtttggatatccaaggaaaattcgtgatcttcaccgtcatcggagtttacctagatcctgtctccgtcccgtcactctccgttaagtggaaaggtaaaacgacagaggagttaacggaatccgtccctttcttccgtgaaatcgtcacaggctcgtttgagaaattcatcaaagtgacgatgaagctgccgttaacgggacaacaatattcagagaaagtaacggagaactgtgtggcgatatggaaatcgttagggatttacacagactctgaggctaaagctgtggagagatttttggaagtcttcaaagacgaaacgttccctcctggtgcatccatcctcttcgctctcgcctctaaaggctctcttacggttgcgttttcgaaagatgatagcattcctgaaacgggaaaagcggtgatcgaaaataagttgttggcagaggcagttcttgaatcgatcattggaaagaacggtgtgtctcctggggctaggttgagtgttgccgagagattagctcagctgatgaatagtgacaaggtcgaagaagatgcaacaaagactgatcaagaggaagctaacaatctccccctaggagataaactggccaaagagaactgatggaatgggagttttttcttggttttttagtgctttatgtttctatatctaataacgttctgtttagttcccattgtatgttttaaatctgtttctgttcgtaagacttattaaataatcacatggagttggttc

SEQ ID NO: 52020 - protein, 251 aa, Glycine max
  peptide (1)..(251): Ceres Seq. ID no. 12609097
  misc_feature (11)..(221): Pfam Name: Chalcone-flavanone isomerase Pfam Description: Chalcone-flavanone isomerase
  misc_feature (8)..(227): Homolog of NCBI NO: 4126399 NR Description: chalcone isomerase [Citrus sinensis]
  misc_feature (8)..(228): Homolog of NCBI NO: 1705761 NR Description: CHALCONE--FLAVONONE ISOMERASE (CHALCONE
  misc_feature (12)..(240): Homolog of NCBI NO: 5921722 NR Description: Chalcone--flavonone isomerase (Chalcone
  misc_feature (39)..(209): Homolog of NCBI NO: 28804474 NR Description: chalcone flavanone isomerase [Raphanus sativus]
  misc_feature (1)..(251): Homolog of NCBI NO: 8670918 NR Description: chalcone flavanone isomerase [Arabidopsis
  misc_feature (1)..(251): Homolog of NCBI NO: 15233190 NR Description: chalcone isomerase
  misc_feature (1)..(251): Homolog of NCBI NO: 8670955 NR Description: chalcone flavanone isomerase [Arabidopsis
  misc_feature (1)..(251): Homolog of NCBI NO: 320138 NR Description: chalcone isomerase (EC 5.5.1.6) - Arabidopsis
  misc_feature (7)..(251): Homolog of NCBI NO: 18203239 NR Description: Chalcone--flavonone isomerase (Chalcone
  misc_feature (1)..(251): Homolog of NCBI NO: 5921725 NR Description: CHALCONE--FLAVONONE ISOMERASE (CHALCONE
MSSSNCPSPLPTVTKLQVDSVTFPPSVISPASSNPLFLGGAGVRGLDIQGKFVIFTVIGVYLDPVSVPSLSVKWKGKTTEELTESVPFFREIVTGSFEKFIKVTMKLPLTGQQYSEKVTENCVAIWKSLGIYTDSEAKAVERFLEVFKDETFPPGASILFALASKGSLTVAFSKDDSIPETGKAVIENKLLAEAVLESIIGKNGVSPGARLSVAERLAQLMNSDKVEEDATKTDQEEANNLPLGDKLAKEN

SEQ ID NO: 52021 - protein, 147 aa, Glycine max
  peptide (1)..(147): Ceres Seq. ID no. 12609098
  misc_feature (1)..(117): Pfam Name: Chalcone-flavanone isomerase Pfam Description: Chalcone-flavanone isomerase
  misc_feature (1)..(123): Homolog of NCBI NO: 4126399 NR Description: chalcone isomerase [Citrus sinensis]
  misc_feature (1)..(124): Homolog of NCBI NO: 1705761 NR Description: CHALCONE--FLAVONONE ISOMERASE (CHALCONE
  misc_feature (1)..(136): Homolog of NCBI NO: 5921722 NR Description: Chalcone--flavonone isomerase (Chalcone
  misc_feature (1)..(105): Homolog of NCBI NO: 28804474 NR Description: chalcone flavanone isomerase [Raphanus sativus]
  misc_feature (1)..(147): Homolog of NCBI NO: 8670918 NR Description: chalcone flavanone isomerase [Arabidopsis
  misc_feature (1)..(147): Homolog of NCBI NO: 15233190 NR Description: chalcone isomerase
  misc_feature (1)..(147): Homolog of NCBI NO: 8670955 NR Description: chalcone flavanone isomerase [Arabidopsis
  misc_feature (1)..(147): Homolog of NCBI NO: 320138 NR Description: chalcone isomerase (EC 5.5.1.6) - Arabidopsis
  misc_feature (1)..(147): Homolog of NCBI NO: 18203239 NR Description: Chalcone--flavonone isomerase (Chalcone
  misc_feature (1)..(147): Homolog of NCBI NO: 5921725 NR Description: CHALCONE--FLAVONONE ISOMERASE (CHALCONE
MKLPLTGQQYSEKVTENCVAIWKSLGIYTDSEAKAVERFLEVFKDETFPPGASILFALASKGSLTVAFSKDDSIPETGKAVIENKLLAEAVLESIIGKNGVSPGARLSVAERLAQLMNSDKVEEDATKTDQEEANNLPLGDKLAKEN

SEQ ID NO: 52022 - DNA, 974 bp, Glycine max
  misc_feature (1)..(974): Ceres Seq. ID no. 12609839
acacttgcaaattgagcaaacttaagcgcacatacgtacacagcagagcaaatagtttacgagcaccaaatagtagcaaggaagagagatcgatcgaagaggaatatcggaaacgatggccggccaaggagatgacgatgtcaaggtactgggcaccgcggcgagcatgttcgcgatccgcgtgcgcatggcgctgcacgtcaatggcgtgagctacgagtacctggagcaggacctgttccacaagggcgagctcctcctcgcctccaacccggtgcgcaaggccgtcccggtgctcatccacgccggcaggcccgtctgcgagtcgctcgccatcgtcgagtacgtcgacgaggtctgggccggcgccgcctcgctcctcccggcggacccctacgaccgcgccgtcgcccgcttctgggccgcctacatcgatgacaaggctgtccccacgtggataggcatcatgagggcagccacggaggaagacagggcggagagcctgtccggtgcgctcgcggcggtcgcgcccttggaggacgccttcgcccagtgctctagcgggaaggccttctttgccggcgactccatcggttacctcgacctcgtgcttgggtgcaacctcttctggatcgaggcgctgcgccacatgttcggcatcacggtcatcgacgccggcaggactccgcgcctggccgcctgggctgaaaggttcgtcgagacggaggctgcaaagaaggcggcgccgcccatggaaagcatgttggaggaggccgggaagctgcgggctatgtgggctgctgctgccgccccggctgccaagtaattagtttggagatttgcagtggtcacctttttttacatcagcgtcattggtcacttgtttacctaaaggattatgaatttcattgttctaagttgtgtgattgatttcattgcataataaatggtcatctatctttgtaaaagttgtg

SEQ ID NO: 52023 - protein, 236 aa, Glycine max
  peptide (1)..(236): Ceres Seq. ID no. 12609840
  misc_feature (89)..(204): Pfam Name: Glutathione S-transferase, C-terminal domain Pfam Description: Glutathione S-transferase, C-terminal domain
  misc_feature (1)..(232): Homolog of NCBI NO: 11385531 NR Description: glutathione S-transferase GST 40 [Zea mays]
  misc_feature (1)..(232): Homolog of NCBI NO: 37536308 NR Description: putative glutathione S-transferase
  misc_feature (1)..(235): Homolog of NCBI NO: 37536310 NR Description: putative glutathione S-transferase
  misc_feature (1)..(235): Homolog of NCBI NO: 33304610 NR Description: tau class GST protein 4 [Oryza sativa (indica
  misc_feature (1)..(235): Homolog of NCBI NO: 37536280 NR Description: putative glutathione S-transferase
  misc_feature (5)..(232): Homolog of NCBI NO: 11385517 NR Description: glutathione S-transferase GST 33 [Zea mays]
  misc_feature (2)..(230): Homolog of NCBI NO: 11385503 NR Description: glutathione S-transferase GST 26 [Zea mays]
  misc_feature (1)..(235): Homolog of NCBI NO: 37536352 NR Description: putative glutathione S-transferase
  misc_feature (1)..(235): Homolog of NCBI NO: 37536354 NR Description: putative glutathione S-transferase
  misc_feature (1)..(229): Homolog of NCBI NO: 22022398 NR Description: glutathione-S-transferase Cla47 [Triticum
MAGQGDDDVKVLGTAASMFAIRVRMALHVNGVSYEYLEQDLFHKGELLLASNPVRKAVPVLIHAGRPVCESLAIVEYVDEVWAGAASLLPADPYDRAVARFWAAYIDDKAVPTWIGIMRAATEEDRAESLSGALAAVAPLEDAFAQCSSGKAFFAGDSIGYLDLVLGCNLFWIEALRHMFGITVIDAGRTPRLAAWAERFVETEAAKKAAPPMESMLEEAGKLRAMWAAAAAPAAK

SEQ ID NO: 52024 - protein, 219 aa, Glycine max
  peptide (1)..(219): Ceres Seq. ID no. 12609841
  misc_feature (72)..(187): Pfam Name: Glutathione S-transferase, C-terminal domain Pfam Description: Glutathione S-transferase, C-terminal domain
  misc_feature (1)..(215): Homolog of NCBI NO: 11385531 NR Description: glutathione S-transferase GST 40 [Zea mays]
  misc_feature (1)..(215): Homolog of NCBI NO: 37536308 NR Description: putative glutathione S-transferase
  misc_feature (1)..(218): Homolog of NCBI NO: 37536310 NR Description: putative glutathione S-transferase
  misc_feature (1)..(218): Homolog of NCBI NO: 33304610 NR Description: tau class GST protein 4 [Oryza sativa (indica
  misc_feature (1)..(218): Homolog of NCBI NO: 37536280 NR Description: putative glutathione S-transferase
  misc_feature (1)..(215): Homolog of NCBI NO: 11385517 NR Description: glutathione S-transferase GST 33 [Zea mays]
  misc_feature (1)..(213): Homolog of NCBI NO: 11385503 NR Description: glutathione S-transferase GST 26 [Zea mays]
  misc_feature (1)..(218): Homolog of NCBI NO: 37536352 NR Description: putative glutathione S-transferase
  misc_feature (1)..(218): Homolog of NCBI NO: 37536354 NR Description: putative glutathione S-transferase
  misc_feature (1)..(212): Homolog of NCBI NO: 22022398 NR Description: glutathione-S-transferase Cla47 [Triticum
MFAIRVRMALHVNGVSYEYLEQDLFHKGELLLASNPVRKAVPVLIHAGRPVCESLAIVEYVDEVWAGAASLLPADPYDRAVARFWAAYIDDKAVPTWIGIMRAATEEDRAESLSGALAAVAPLEDAFAQCSSGKAFFAGDSIGYLDLVLGCNLFWIEALRHMFGITVIDAGRTPRLAAWAERFVETEAAKKAAPPMESMLEEAGKLRAMWAAAAAPAAK

SEQ ID NO: 52025 - protein, 212 aa, Glycine max
  peptide (1)..(212): Ceres Seq. ID no. 12609842
  misc_feature (65)..(180): Pfam Name: Glutathione S-transferase, C-terminal domain Pfam Description: Glutathione S-transferase, C-terminal domain
  misc_feature (1)..(208): Homolog of NCBI NO: 11385531 NR Description: glutathione S-transferase GST 40 [Zea mays]
  misc_feature (1)..(208): Homolog of NCBI NO: 37536308 NR Description: putative glutathione S-transferase
  misc_feature (1)..(211): Homolog of NCBI NO: 37536310 NR Description: putative glutathione S-transferase
  misc_feature (1)..(211): Homolog of NCBI NO: 33304610 NR Description: tau class GST protein 4 [Oryza sativa (indica
  misc_feature (1)..(211): Homolog of NCBI NO: 37536280 NR Description: putative glutathione S-transferase
  misc_feature (1)..(208): Homolog of NCBI NO: 11385517 NR Description: glutathione S-transferase GST 33 [Zea mays]
  misc_feature (1)..(206): Homolog of NCBI NO: 11385503 NR Description: glutathione S-transferase GST 26 [Zea mays]
  misc_feature (1)..(211): Homolog of NCBI NO: 37536352 NR Description: putative glutathione S-transferase
  misc_feature (1)..(211): Homolog of NCBI NO: 37536354 NR Description: putative glutathione S-transferase
  misc_feature (1)..(205): Homolog of NCBI NO: 22022398 NR Description: glutathione-S-transferase Cla47 [Triticum
MALHVNGVSYEYLEQDLFHKGELLLASNPVRKAVPVLIHAGRPVCESLAIVEYVDEVWAGAASLLPADPYDRAVARFWAAYIDDKAVPTWIGIMRAATEEDRAESLSGALAAVAPLEDAFAQCSSGKAFFAGDSIGYLDLVLGCNLFWIEALRHMFGITVIDAGRTPRLAAWAERFVETEAAKKAAPPMESMLEEAGKLRAMWAAAAAPAAK

SEQ ID NO: 52026 - DNA, 916 bp, Glycine max
  misc_feature (1)..(916): Ceres Seq. ID no. 13594593
ctcgaaaggaaatgccagtggcattccagtgaacccacccccgactaggtccggacaccgccgctgcaatggctacggccatctccgcctccgcgctcctctcctccacattcgccggcgataggcgccatcgccgcgcggcgaggcccgcgccccgccgcgccgtcccggctggcctcacggtgcggtgcgagcagagcgacaaacagaagcggcagcctctttccgcactcgttccccgcgagcagcgcttcatgttcgagggcgacgagctctgcggacccgacatatggaacacaacatggtaccctaaggctgctgatcacgtaactaccgagaagacgtggtatgttgttgatgcagaggacaagattcttggcaggctagcatctgctatcgcagtgcatatgagagggaaaaatgagcccacatacactccaagtgtggacatgggggcttttgttattgtggttaatgcagagaaggttgctgtttctggtaaaaagaggtcacagaagctctataaaaggcactctggacggcccggtggaatgaaagaagaaacttttgatcagcttcagaaaaggattccggagagaattatcgaacatgctgtgcgtggcatgcttcctaagggcaggctgggcagaagactatttacccacctcaaggtgtacaaaggatcagagcacccgcatgtggctcaaaaacctgttccgctgcccatcagagacaaaagaataatgaagtctggctagagaacccctggatattgagaaaagatacagcaaccgtgcttccccgcccagtgttaggagcgtgacccgaacattcatgtcatctgtccacaagagtggtgtgtaacttttttgtaatttaattatgtttctgcaaaagctttcgattcctttcggtc

SEQ ID NO: 52027 - protein, 229 aa, Glycine max
  peptide (1)..(229): Ceres Seq. ID no. 13594594
  misc_feature (93)..(220): Pfam Name: Ribosomal protein L13 Pfam Description: Ribosomal protein L13
  misc_feature (78)..(210): Homolog of NCBI NO: 23124102 NR Description: hypothetical protein [Nostoc punctiforme]
  misc_feature (91)..(227): Homolog of NCBI NO: 33241135 NR Description: Ribosomal protein L13
  misc_feature (91)..(221): Homolog of NCBI NO: 23042794 NR Description: hypothetical protein [Trichodesmium erythraeum
  misc_feature (93)..(220): Homolog of NCBI NO: 16329914 NR Description: 50S ribosomal protein L13 [Synechocystis sp. PCC
  misc_feature (90)..(220): Homolog of NCBI NO: 33866625 NR Description: 50S ribosomal protein L13 [Synechococcus sp. WH
  misc_feature (90)..(220): Homolog of NCBI NO: 17231680 NR Description: 50S ribosomal protein L13 [Nostoc sp. PCC 7120]
  misc_feature (93)..(220): Homolog of NCBI NO: 22297652 NR Description: 50S ribosomal protein L13 [Thermosynechococcus
  misc_feature (1)..(225): Homolog of NCBI NO: 132659 NR Description: 50S RIBOSOMAL PROTEIN L13, CHLOROPLAST PRECURSOR
  misc_feature (36)..(225): Homolog of NCBI NO: 15218435 NR Description: ribosomal protein L13p family [Arabidopsis
  misc_feature (1)..(228): Homolog of NCBI NO: 34909522 NR Description: putative ribosomal protein L13
MATAISASALLSSTFAGDRRHRRAARPAPRRAVPAGLTVRCEQSDKQKRQPLSALVPREQRFMFEGDELCGPDIWNTTWYPKAADHVTTEKTWYVVDAEDKILGRLASAIAVHMRGKNEPTYTPSVDMGAFVIVVNAEKVAVSGKKRSQKLYKRHSGRPGGMKEETFDQLQKRIPERIIEHAVRGMLPKGRLGRRLFTHLKVYKGSEHPHVAQKPVPLPIRDKRIMKSG

SEQ ID NO: 52028 - protein, 167 aa, Glycine max
  peptide (1)..(167): Ceres Seq. ID no. 13594595
  misc_feature (31)..(158): Pfam Name: Ribosomal protein L13 Pfam Description: Ribosomal protein L13
  misc_feature (16)..(148): Homolog of NCBI NO: 23124102 NR Description: hypothetical protein [Nostoc punctiforme]
  misc_feature (29)..(165): Homolog of NCBI NO: 33241135 NR Description: Ribosomal protein L13
  misc_feature (29)..(159): Homolog of NCBI NO: 23042794 NR Description: hypothetical protein [Trichodesmium erythraeum
  misc_feature (31)..(158): Homolog of NCBI NO: 16329914 NR Description: 50S ribosomal protein L13 [Synechocystis sp. PCC
  misc_feature (28)..(158): Homolog of NCBI NO: 33866625 NR Description: 50S ribosomal protein L13 [Synechococcus sp. WH
  misc_feature (28)..(158): Homolog of NCBI NO: 17231680 NR Description: 50S ribosomal protein L13 [Nostoc sp. PCC 7120]
  misc_feature (31)..(158): Homolog of NCBI NO: 22297652 NR Description: 50S ribosomal protein L13 [Thermosynechococcus
  misc_feature (1)..(163): Homolog of NCBI NO: 132659 NR Description: 50S RIBOSOMAL PROTEIN L13, CHLOROPLAST PRECURSOR
  misc_feature (1)..(163): Homolog of NCBI NO: 15218435 NR Description: ribosomal protein L13p family [Arabidopsis
  misc_feature (1)..(166): Homolog of NCBI NO: 34909522 NR Description: putative ribosomal protein L13
MFEGDELCGPDIWNTTWYPKAADHVTTEKTWYVVDAEDKILGRLASAIAVHMRGKNEPTYTPSVDMGAFVIVVNAEKVAVSGKKRSQKLYKRHSGRPGGMKEETFDQLQKRIPERIIEHAVRGMLPKGRLGRRLFTHLKVYKGSEHPHVAQKPVPLPIRDKRIMKSG

SEQ ID NO: 52029 - protein, 116 aa, Glycine max
  peptide (1)..(116): Ceres Seq. ID no. 13594596
  misc_feature (1)..(107): Pfam Name: Ribosomal protein L13 Pfam Description: Ribosomal protein L13
  misc_feature (1)..(97): Homolog of NCBI NO: 23124102 NR Description: hypothetical protein [Nostoc punctiforme]
  misc_feature (1)..(114): Homolog of NCBI NO: 33241135 NR Description: Ribosomal protein L13
  misc_feature (1)..(108): Homolog of NCBI NO: 23042794 NR Description: hypothetical protein [Trichodesmium erythraeum
  misc_feature (1)..(107): Homolog of NCBI NO: 16329914 NR Description: 50S ribosomal protein L13 [Synechocystis sp. PCC
  misc_feature (1)..(107): Homolog of NCBI NO: 33866625 NR Description: 50S ribosomal protein L13 [Synechococcus sp. WH
  misc_feature (1)..(107): Homolog of NCBI NO: 17231680 NR Description: 50S ribosomal protein L13 [Nostoc sp. PCC 7120]
  misc_feature (1)..(107): Homolog of NCBI NO: 22297652 NR Description: 50S ribosomal protein L13 [Thermosynechococcus
  misc_feature (1)..(112): Homolog of NCBI NO: 132659 NR Description: 50S RIBOSOMAL PROTEIN L13, CHLOROPLAST PRECURSOR
  misc_feature (1)..(112): Homolog of NCBI NO: 15218435 NR Description: ribosomal protein L13p family [Arabidopsis
  misc_feature (1)..(115): Homolog of NCBI NO: 34909522 NR Description: putative ribosomal protein L13
MRGKNEPTYTPSVDMGAFVIVVNAEKVAVSGKKRSQKLYKRHSGRPGGMKEETFDQLQKRIPERIIEHAVRGMLPKGRLGRRLFTHLKVYKGSEHPHVAQKPVPLPIRDKRIMKSG

SEQ ID NO: 52030 - DNA, 873 bp, Glycine max
  misc_feature (1)..(873): Ceres Seq. ID no. 15178123
agattaacgttttcttcattcagtcatactaccgccctctgcagcaccagactgcatcacgcatggcagctccggcggcgcagccgccgccaaagaccgtcctgcgggtggcggcgatctccggctcgctgcgcagggcgtcggccaacaccggcctcatccgcgccgctgcggagatttgcagggagtccatcccgggcctgcacatcgaccacgtcgacatctcggagctgccgctgctcaacaccgacctcgaggccagcggccggttcccgccggccgtcgaggcgttccgcgacaaagtccgcgcggccgattgcttcctcttcgcctcgcccgagtacaactactccatttcagggcctctgaagaacgcgctggactggggatcacggccgcccaactgctgggccgaccgagccgcggcgatgctgagcgcgtcgggcggctccggcggcagccggtcgcagtaccacatccggcaggtcggggtgtttcttgacatccacttcatcaacaggccggagctcttcaccaaggcacacctgcccccgagaaagttcgacgcggacggcaacctcatcgactcggagaccaaggagcaggtcaggaagatgctcctctcgctgcaagccttcgcactcaagctccagggtgcagactctgtctgaacaggggaactgatgcctgaatttgtttcttcagacgaacggtggtgctctgctcattagatggactgagcagatcgtcacaaactccaaatgcgaaagccatatactggttgatgctccatgatatctggaataattcttcatctgcgactgaacattccggtggcacagtaatgcaaatctatttttattatcttgcccc

SEQ ID NO: 52031 - protein, 222 aa, Glycine max
  peptide (1)..(222): Ceres Seq. ID no. 15178124
  misc_feature (34)..(203): Pfam Name: NADPH-dependent FMN reductase Pfam Description: NADPH-dependent FMN reductase
  misc_feature (33)..(128): Homolog of NCBI NO: 13473655 NR Description: hypothetical protein [Mesorhizobium loti]
  misc_feature (13)..(128): Homolog of NCBI NO: 15805651 NR Description: conserved hypothetical protein [Deinococcus
  misc_feature (35)..(222): Homolog of NCBI NO: 25169076 NR Description: putative NADPH:quinone oxidoreductase
  misc_feature (34)..(218): Homolog of NCBI NO: 32041222 NR Description: hypothetical protein [Pseudomonas aeruginosa
  misc_feature (34)..(218): Homolog of NCBI NO: 15596401 NR Description: conserved hypothetical protein [Pseudomonas
  misc_feature (31)..(218): Homolog of NCBI NO: 15232856 NR Description: NADPH:quinone oxidoreductase (NQR) [Arabidopsis
  misc_feature (31)..(218): Homolog of NCBI NO: 5002232 NR Description: NADPH:quinone oxidoreductase [Arabidopsis
  misc_feature (25)..(218): Homolog of NCBI NO: 24745889 NR Description: NAD(P)H:quinone oxidoreductase [Solanum tuberosum]
  misc_feature (21)..(220): Homolog of NCBI NO: 34906648 NR Description: putative NADPH:quinone oxidoreductase
  misc_feature (30)..(218): Homolog of NCBI NO: 34906652 NR Description: putative NADPH:quinone oxidoreductase
INVFFIQSYYRPLQHQTASRMAAPAAQPPPKTVLRVAAISGSLRRASANTGLIRAAAEICRESIPGLHIDHVDISELPLLNTDLEASGRFPPAVEAFRDKVRAADCFLFASPEYNYSISGPLKNALDWGSRPPNCWADRAAAMLSASGGSGGSRSQYHIRQVGVFLDIHFINRPELFTKAHLPPRKFDADGNLIDSETKEQVRKMLLSLQAFALKLQGADSV

SEQ ID NO: 52032 - protein, 202 aa, Glycine max
  peptide (1)..(202): Ceres Seq. ID no. 15178125
  misc_feature (14)..(183): Pfam Name: NADPH-dependent FMN reductase Pfam Description: NADPH-dependent FMN reductase
  misc_feature (13)..(108): Homolog of NCBI NO: 13473655 NR Description: hypothetical protein [Mesorhizobium loti]
  misc_feature (1)..(108): Homolog of NCBI NO: 15805651 NR Description: conserved hypothetical protein [Deinococcus
  misc_feature (15)..(202): Homolog of NCBI NO: 25169076 NR Description: putative NADPH:quinone oxidoreductase
  misc_feature (14)..(198): Homolog of NCBI NO: 32041222 NR Description: hypothetical protein [Pseudomonas aeruginosa
  misc_feature (14)..(198): Homolog of NCBI NO: 15596401 NR Description: conserved hypothetical protein [Pseudomonas
  misc_feature (11)..(198): Homolog of NCBI NO: 15232856 NR Description: NADPH:quinone oxidoreductase (NQR) [Arabidopsis
  misc_feature (11)..(198): Homolog of NCBI NO: 5002232 NR Description: NADPH:quinone oxidoreductase [Arabidopsis
  misc_feature (5)..(198): Homolog of NCBI NO: 24745889 NR Description: NAD(P)H:quinone oxidoreductase [Solanum tuberosum]
  misc_feature (1)..(200): Homolog of NCBI NO: 34906648 NR Description: putative NADPH:quinone oxidoreductase
  misc_feature (10)..(198): Homolog of NCBI NO: 34906652 NR Description: putative NADPH:quinone oxidoreductase
MAAPAAQPPPKTVLRVAAISGSLRRASANTGLIRAAAEICRESIPGLHIDHVDISELPLLNTDLEASGRFPPAVEAFRDKVRAADCFLFASPEYNYSISGPLKNALDWGSRPPNCWADRAAAMLSASGGSGGSRSQYHIRQVGVFLDIHFINRPELFTKAHLPPRKFDADGNLIDSETKEQVRKMLLSLQAFALKLQGADSV

SEQ ID NO: 52033 - protein, 122 aa, Glycine max
  peptide (1)..(122): Ceres Seq. ID no. 15178126
  misc_feature (63)..(122): Pfam Name: Equine herpesvirus glycoprotein gp2 Pfam Description: Equine herpesvirus glycoprotein gp2
  misc_feature (25)..(122): Homolog of NCBI NO: 19923466 NR Description: splicing coactivator subunit SRm300
  misc_feature (23)..(122): Homolog of NCBI NO: 5821143 NR Description: RNA binding protein [Homo sapiens]
  misc_feature (25)..(122): Homolog of NCBI NO: 6649242 NR Description: splicing coactivator subunit SRm300 [Homo sapiens]
  misc_feature (23)..(122): Homolog of NCBI NO: 5821145 NR Description: RNA binding protein [Homo sapiens]
  misc_feature (28)..(122): Homolog of NCBI NO: 11359723 NR Description: proteophosphoglycan, membrane-associated
  misc_feature (25)..(122): Homolog of NCBI NO: 5821143 NR Description: RNA binding protein [Homo sapiens]
  misc_feature (25)..(122): Homolog of NCBI NO: 5821145 NR Description: RNA binding protein [Homo sapiens]
  misc_feature (5)..(122): Homolog of NCBI NO: 13592175 NR Description: ppg3 [Leishmania major]
  misc_feature (28)..(122): Homolog of NCBI NO: 5420387 NR Description: proteophosphoglycan [Leishmania major]
RLTFSSFSHTTALCSTRLHHAWQLRRRSRRQRPSCGWRRSPARCAGRRPTPASSAPLRRFAGSPSRACTSTTSTSRSCRCSTPTSRPAAGSRRPSRRSATKSARPIASSSPRPSTTTPFQGL

SEQ ID NO: 52034 - DNA, 899 bp, Glycine max
  misc_feature (1)..(899): Ceres Seq. ID no. 13594705
aaaagatcagagcaaaacaggcagcgaaaagtacagcagacagggaaaaaagaagagatagctttgcacgggattcgccggcgccgccgcggagcagcacaagcacaggcagcagccagcagcagcagcgagccccggcgagcgagcgaggatgcactccttcgggcaccgcgcgaacgcggtggcgacgttcgcgctgacgatactcgccgccatgtgcttcgccgcctccttctccgacagcttcaactcccccacccccgccgcctccgtcaagatcctcaacatcaactggttccagaaggaggccaacgccaacgacgaggttagcatgacgctgaacatctccgccgacctttcgtcgctcttcacgtggaacacgaaacaggtgtttgttttcgtggcagctgagtatgagactccacaaaatgccctgaatcaagtgtccctttgggatggaatcataccggcgaaggagcacgccaagttcttgatccataccacaaacaagtacagatttatcgaccaggggagcaacctgaagggcagggacttcaacctgacgatgcactggcacatcatgcccaagacgggcaagatgttcgcggacaagatcgtcatgacggggtaccagctccccgagcagtacagataggccgccgccatctctgaacaagagctgctagccctatctatatatggtccgctgtgctgtgcaaacgcaggaagggtttagtggcagtggcagtggttgcgttgctggcgccgggccttttttgctctaaatcttggcgggacaggacatgtaaacttgctcatgagcttgtatgttggccgaatatgcgcgagacgaaaccgtaatgcaaaaaaaaaaaaaaaaaagcttatcgataccgtcg

SEQ ID NO: 52035 - protein, 167 aa, Glycine max
  peptide (1)..(167): Ceres Seq. ID no. 13594706
  misc_feature (1)..(167): Pfam Name: Signal peptidase subunit Pfam Description: Signal peptidase subunit
  misc_feature (1)..(162): Homolog of NCBI NO: 39587410 NR Description: Hypothetical protein CBG22979 [Caenorhabditis
  misc_feature (1)..(148): Homolog of NCBI NO: 26346292 NR Description: unnamed protein product [Mus musculus]
  misc_feature (1)..(148): Homolog of NCBI NO: 26390287 NR Description: unnamed protein product [Mus musculus]
  misc_feature (1)..(148): Homolog of NCBI NO: 11345462 NR Description: hypothetical protein FLJ22649 similar to signal
  misc_feature (1)..(148): Homolog of NCBI NO: 134791 NR Description: Microsomal signal peptidase 23 kDa subunit (SPase
  misc_feature (1)..(166): Homolog of NCBI NO: 34895578 NR Description: unnamed protein product [Oryza sativa (japonica
  misc_feature (1)..(167): Homolog of NCBI NO: 18397160 NR Description: expressed protein [Arabidopsis thaliana]
  misc_feature (1)..(167): Homolog of NCBI NO: 15240934 NR Description: signal peptidase [Arabidopsis thaliana]
  misc_feature (1)..(167): Homolog of NCBI NO: 28558783 NR Description: signal peptidase protein-like protein [Cucumis
MHSFGHRANAVATFALTILAAMCFAASFSDSFNSPTPAASVKILNINWFQKEANANDEVSMTLNISADLSSLFTWNTKQVFVFVAAEYETPQNALNQVSLWDGIIPAKEHAKFLIHTTNKYRFIDQGSNLKGRDFNLTMHWHIMPKTGKMFADKIVMTGYQLPEQYR

SEQ ID NO: 52036 - protein, 146 aa, Glycine max
  peptide (1)..(146): Ceres Seq. ID no. 13594707
  misc_feature (1)..(146): Pfam Name: Signal peptidase subunit Pfam Description: Signal peptidase subunit
  misc_feature (1)..(141): Homolog of NCBI NO: 39587410 NR Description: Hypothetical protein CBG22979 [Caenorhabditis
  misc_feature (1)..(127): Homolog of NCBI NO: 26346292 NR Description: unnamed protein product [Mus musculus]
  misc_feature (1)..(127): Homolog of NCBI NO: 26390287 NR Description: unnamed protein product [Mus musculus]
  misc_feature (1)..(127): Homolog of NCBI NO: 11345462 NR Description: hypothetical protein FLJ22649 similar to signal
  misc_feature (1)..(127): Homolog of NCBI NO: 134791 NR Description: Microsomal signal peptidase 23 kDa subunit (SPase
  misc_feature (1)..(145): Homolog of NCBI NO: 34895578 NR Description: unnamed protein product [Oryza sativa (japonica
  misc_feature (1)..(146): Homolog of NCBI NO: 18397160 NR Description: expressed protein [Arabidopsis thaliana]
  misc_feature (1)..(146): Homolog of NCBI NO: 15240934 NR Description: signal peptidase [Arabidopsis thaliana]
  misc_feature (1)..(146): Homolog of NCBI NO: 28558783 NR Description: signal peptidase protein-like protein [Cucumis
MCFAASFSDSFNSPTPAASVKILNINWFQKEANANDEVSMTLNISADLSSLFTWNTKQVFVFVAAEYETPQNALNQVSLWDGIIPAKEHAKFLIHTTNKYRFIDQGSNLKGRDFNLTMHWHIMPKTGKMFADKIVMTGYQLPEQYR

SEQ ID NO: 52037 - protein, 109 aa, Glycine max
  peptide (1)..(109): Ceres Seq. ID no. 13594708
KRSEQNRQRKVQQTGKKEEIALHGIRRRRRGAAQAQAAASSSSEPRRASEDALLRAPRERGGDVRADDTRRHVLRRLLLRQLQLPHPRRLRQDPQHQLVPEGGQRQRRG

SEQ ID NO: 52038 - DNA, 1517 bp, Glycine max
  misc_feature (1)..(1517): Ceres Seq. ID no. 15178246
ctctcctccccaccctcgcccgctgaggtttccgccgcgatctcgtctcgatccgcactctctatctgagatttggaatcgggcgaggcctgcagctcctgccgacatggcgctcgttttgcattcgggcagtggcaacaagaatgccttcaaggcacttattgctgcagagtactgtggggtcaaggttgagctgaccaagaactttgagatgggtgtctcaaacaaaacccctgaattcatcaagatgaatccccttggcaaggttcctgttcttgagactcctgatggtgctgtttttgagagcaatgctattgcacgctatgttgctcgctcaaagggtgacaacctgctttggggtggttctcttattgaatatgcgcgtgttgagcaatggatggactttggtgccacagaggttgatcccaatatcgcaaggtggctgtacccaaggcttggttatatgccttacaatgcccagtctgaggaattcggcattgctggattgaagagggcccttgaagcattgaacacacacctggcatcaaacacattccttgttgggcattctgtcactctggctgatattgtcatgacatgcaacctctaccatggttttgctcggatcttgaccaagactttcacatctgagttccctcatgttgagaggtacttctggaccatggttaaccagcctaacttcaagaaggtcattggcgatttcaagcaggcagaggttgtacctcctgttcagaagaaggctgctcctgctaaaccaaaggaggccaagaaagaggctcccaaggcggccccaaagccagcagaggttgaggcaccagaggaagaggcaccaaagccaaagcccaaaaatccccttgatctactgccaccaagcaagatggtacttgatgactggaagaggctatactcaaacactaagagcaacttccatgatgttgctgttaaaggtttctgggagatgtatgacccagagggctactctctctggttctgtgactacaagtaccaggaagagaacaccgtgtcctacgtgaccctgaacaaggtcggcgggttcctgcagcggatggatctgtgccgcaagtacgcttttggcaagatgctcgtgattggttctgaggcgcccttcaaagtcaaggggctgtggctcttccgtgggcaggacatccctgagttcgtcatgaatgaggtctatgacatggagctctacgagtggactaaggttgacctctccgacgaggcccagaagaagcgtgtcgaggccatgatcgaggaccttgagccgtttgaggggcaggccttgctggacgccaagtgcttcaagtaagcgaacagtgcctgggatcgtgatggcggtggcaaagaaactatctaggacttgaaattcagtgtcgaaacagttggtcttttttttggaagagtttgcttgttacttaatggctatttgacctggtgaactagttaattttgtgctatgctaagagtttttgggtatc

SEQ ID NO: 52039 - protein, 448 aa, Glycine max
  peptide (1)..(448): Ceres Seq. ID no. 15178247
  misc_feature (287)..(395): Pfam Name: Elongation factor 1 gamma, conserved domain Pfam Description: Elongation factor 1 gamma, conserved domain
  misc_feature (36)..(448): Homolog of NCBI NO: 13626392 NR Description: Elongation factor 1-gamma (EF-1-gamma) (eEF-1B
  misc_feature (36)..(448): Homolog of NCBI NO: 18391048 NR Description: elongation factor 1B-gamma, putative (eEF-1B
  misc_feature (36)..(448): Homolog of NCBI NO: 15223649 NR Description: elongation factor 1B-gamma, putative (eEF-1B
  misc_feature (36)..(448): Homolog of NCBI NO: 14334818 NR Description: putative elongation factor 1B gamma [Arabidopsis
  misc_feature (45)..(448): Homolog of NCBI NO: 29367403 NR Description: elongation factor 1 gamma-like protein
  misc_feature (36)..(448): Homolog of NCBI NO: 13626515 NR Description: Elongation factor 1-gamma (EF-1-gamma) (eEF-1B
  misc_feature (39)..(448): Homolog of NCBI NO: 29367381 NR Description: elongation factor 1 gamma-like protein
SPPHPRPLRFPPRSRLDPHSLSEIWNRARPAAPADMALVLHSGSGNKNAFKALIAAEYCGVKVELTKNFEMGVSNKTPEFIKMNPLGKVPVLETPDGAVFESNAIARYVARSKGDNLLWGGSLIEYARVEQWMDFGATEVDPNIARWLYPRLGYMPYNAQSEEFGIAGLKRALEALNTHLASNTFLVGHSVTLADIVMTCNLYHGFARILTKTFTSEFPHVERYFWTMVNQPNFKKVIGDFKQAEVVPPVQKKAAPAKPKEAKKEAPKAAPKPAEVEAPEEEAPKPKPKNPLDLLPPSKMVLDDWKRLYSNTKSNFHDVAVKGFWEMYDPEGYSLWFCDYKYQEENTVSYVTLNKVGGFLQRMDLCRKYAFGKMLVIGSEAPFKVKGLWLFRGQDIPEFVMNEVYDMELYEWTKVDLSDEAQKKRVEAMIEDLEPFEGQALLDAKCFK

SEQ ID NO: 52040 - protein, 413 aa, Glycine max
  peptide (1)..(413): Ceres Seq. ID no. 15178248
  misc_feature (252)..(360): Pfam Name: Elongation factor 1 gamma, conserved domain Pfam Description: Elongation factor 1 gamma, conserved domain
  misc_feature (1)..(413): Homolog of NCBI NO: 13626392 NR Description: Elongation factor 1-gamma (EF-1-gamma) (eEF-1B
  misc_feature (1)..(413): Homolog of NCBI NO: 18391048 NR Description: elongation factor 1B-gamma, putative (eEF-1B
  misc_feature (1)..(413): Homolog of NCBI NO: 15223649 NR Description: elongation factor 1B-gamma, putative (eEF-1B
  misc_feature (1)..(413): Homolog of NCBI NO: 14334818 NR Description: putative elongation factor 1B gamma [Arabidopsis
  misc_feature (10)..(413): Homolog of NCBI NO: 29367403 NR Description: elongation factor 1 gamma-like protein
  misc_feature (1)..(413): Homolog of NCBI NO: 13626515 NR Description: Elongation factor 1-gamma (EF-1-gamma) (eEF-1B
  misc_feature (4)..(413): Homolog of NCBI NO: 29367381 NR Description: elongation factor 1 gamma-like protein
MALVLHSGSGNKNAFKALIAAEYCGVKVELTKNFEMGVSNKTPEFIKMNPLGKVPVLETPDGAVFESNAIARYVARSKGDNLLWGGSLIEYARVEQWMDFGATEVDPNIARWLYPRLGYMPYNAQSEEFGIAGLKRALEALNTHLASNTFLVGHSVTLADIVMTCNLYHGFARILTKTFTSEFPHVERYFWTMVNQPNFKKVIGDFKQAEVVPPVQKKAAPAKPKEAKKEAPKAAPKPAEVEAPEEEAPKPKPKNPLDLLPPSKMVLDDWKRLYSNTKSNFHDVAVKGFWEMYDPEGYSLWFCDYKYQEENTVSYVTLNKVGGFLQRMDLCRKYAFGKMLVIGSEAPFKVKGLWLFRGQDIPEFVMNEVYDMELYEWTKVDLSDEAQKKRVEAMIEDLEPFEGQALLDAKCFK

SEQ ID NO: 52041 - protein, 378 aa, Glycine max
  peptide (1)..(378): Ceres Seq. ID no. 15178249
  misc_feature (217)..(325): Pfam Name: Elongation factor 1 gamma, conserved domain Pfam Description: Elongation factor 1 gamma, conserved domain
  misc_feature (1)..(378): Homolog of NCBI NO: 13626392 NR Description: Elongation factor 1-gamma (EF-1-gamma) (eEF-1B
  misc_feature (1)..(378): Homolog of NCBI NO: 18391048 NR Description: elongation factor 1B-gamma, putative (eEF-1B
  misc_feature (1)..(378): Homolog of NCBI NO: 15223649 NR Description: elongation factor 1B-gamma, putative (eEF-1B
  misc_feature (1)..(378): Homolog of NCBI NO: 14334818 NR Description: putative elongation factor 1B gamma [Arabidopsis
  misc_feature (1)..(378): Homolog of NCBI NO: 29367403 NR Description: elongation factor 1 gamma-like protein
  misc_feature (1)..(378): Homolog of NCBI NO: 13626515 NR Description: Elongation factor 1-gamma (EF-1-gamma) (eEF-1B
  misc_feature (1)..(378): Homolog of NCBI NO: 29367381 NR Description: elongation factor 1 gamma-like protein
MGVSNKTPEFIKMNPLGKVPVLETPDGAVFESNAIARYVARSKGDNLLWGGSLIEYARVEQWMDFGATEVDPNIARWLYPRLGYMPYNAQSEEFGIAGLKRALEALNTHLASNTFLVGHSVTLADIVMTCNLYHGFARILTKTFTSEFPHVERYFWTMVNQPNFKKVIGDFKQAEVVPPVQKKAAPAKPKEAKKEAPKAAPKPAEVEAPEEEAPKPKPKNPLDLLPPSKMVLDDWKRLYSNTKSNFHDVAVKGFWEMYDPEGYSLWFCDYKYQEENTVSYVTLNKVGGFLQRMDLCRKYAFGKMLVIGSEAPFKVKGLWLFRGQDIPEFVMNEVYDMELYEWTKVDLSDEAQKKRVEAMIEDLEPFEGQALLDAKCFK

SEQ ID NO: 52042 - DNA, 679 bp, Glycine max
  misc_feature (1)..(679): Ceres Seq. ID no. 13594900
agattttgatcggtttctggaataagaagaagaggaaagaaaggatggggagattgttcttggtgaatttggaaggcaagtcttacagttgtaggcactgtaagactagtatcgctctctgcgatgatgtcgtctccaagtcttttcaatcacgccatgggaaagcttacctcttcagtaaggtagcgaatgtgtatgctgggaagaaggaagataggatgatgatgacgggtatgcacaccgttgtcgatatttactgcgtcaaatgcggctcttatgttggatggagatatgagtttgcttttgagaagaaccaaaagtacaaggaaggcaaatctgttctcgaaaggtacaaggtctgcggtccggatgggaacaattactgggtggcggctcaagaagttgaagccggagaaagtgatactgatgaatgaatgaatgaatgaatgaatgaatgaatgaatgaatgaatgaatgaatgatatgcttcttcatctcaataattcaccatatctgatttgtacattctcctctcctcttatcattcttttttcaatgtcttcttctcttttctcattttgtgaaccatccagcttccattaggactccttcggagatcaactgtttgtgttgcaactacttgtggaacacatgcaattataatttatctcattatctt

SEQ ID NO: 52043 - protein, 143 aa, Glycine max
  peptide (1)..(143): Ceres Seq. ID no. 13594901
  misc_feature (15)..(122): Pfam Name: Yippee putative zinc-binding protein Pfam Description: Yippee putative zinc-binding protein
  misc_feature (9)..(115): Homolog of NCBI NO: 9558721 NR Description: yippee-like 1 [Homo sapiens]
  misc_feature (15)..(117): Homolog of NCBI NO: 34393694 NR Description: Yippee-like protein [Oryza sativa (japonica
  misc_feature (15)..(119): Homolog of NCBI NO: 15238881 NR Description: zinc-binding protein-related [Arabidopsis
  misc_feature (15)..(117): Homolog of NCBI NO: 15232001 NR Description: Yippee-related protein [Arabidopsis thaliana]
  misc_feature (15)..(126): Homolog of NCBI NO: 15228759 NR Description: Yippee-related protein [Arabidopsis thaliana]
  misc_feature (15)..(143): Homolog of NCBI NO: 28273361 NR Description: putative zinc binding protein
  misc_feature (15)..(143): Homolog of NCBI NO: 27923880 NR Description: Yippee-like protein
  misc_feature (15)..(143): Homolog of NCBI NO: 15225631 NR Description: expressed protein [Arabidopsis thaliana]
  misc_feature (15)..(143): Homolog of NCBI NO: 21617953 NR Description: yippee-like protein [Arabidopsis thaliana]
  misc_feature (15)..(143): Homolog of NCBI NO: 18399156 NR Description: expressed protein [Arabidopsis thaliana]
ILIGFWNKKKRKERMGRLFLVNLEGKSYSCRHCKTSIALCDDVVSKSFQSRHGKAYLFSKVANVYAGKKEDRMMMTGMHTVVDIYCVKCGSYVGWRYEFAFEKNQKYKEGKSVLERYKVCGPDGNNYWVAAQEVEAGESDTDE

SEQ ID NO: 52044 - protein, 129 aa, Glycine max
  peptide (1)..(129): Ceres Seq. ID no. 13594902
  misc_feature (1)..(108): Pfam Name: Yippee putative zinc-binding protein Pfam Description: Yippee putative zinc-binding protein
  misc_feature (1)..(101): Homolog of NCBI NO: 9558721 NR Description: yippee-like 1 [Homo sapiens]
  misc_feature (1)..(103): Homolog of NCBI NO: 34393694 NR Description: Yippee-like protein [Oryza sativa (japonica
  misc_feature (1)..(105): Homolog of NCBI NO: 15238881 NR Description: zinc-binding protein-related [Arabidopsis
  misc_feature (1)..(103): Homolog of NCBI NO: 15232001 NR Description: Yippee-related protein [Arabidopsis thaliana]
  misc_feature (1)..(112): Homolog of NCBI NO: 15228759 NR Description: Yippee-related protein [Arabidopsis thaliana]
  misc_feature (1)..(129): Homolog of NCBI NO: 28273361 NR Description: putative zinc binding protein
  misc_feature (1)..(129): Homolog of NCBI NO: 27923880 NR Description: Yippee-like protein
  misc_feature (1)..(129): Homolog of NCBI NO: 15225631 NR Description: expressed protein [Arabidopsis thaliana]
  misc_feature (1)..(129): Homolog of NCBI NO: 21617953 NR Description: yippee-like protein [Arabidopsis thaliana]
  misc_feature (1)..(129): Homolog of NCBI NO: 18399156 NR Description: expressed protein [Arabidopsis thaliana]
MGRLFLVNLEGKSYSCRHCKTSIALCDDVVSKSFQSRHGKAYLFSKVANVYAGKKEDRMMMTGMHTVVDIYCVKCGSYVGWRYEFAFEKNQKYKEGKSVLERYKVCGPDGNNYWVAAQEVEAGESDTDE

SEQ ID NO: 52045 - protein, 71 aa, Glycine max
  peptide (1)..(71): Ceres Seq. ID no. 13594903
  misc_feature (1)..(43): Homolog of NCBI NO: 9558721 NR Description: yippee-like 1 [Homo sapiens]
  misc_feature (1)..(45): Homolog of NCBI NO: 34393694 NR Description: Yippee-like protein [Oryza sativa (japonica
  misc_feature (1)..(47): Homolog of NCBI NO: 15238881 NR Description: zinc-binding protein-related [Arabidopsis
  misc_feature (1)..(45): Homolog of NCBI NO: 15232001 NR Description: Yippee-related protein [Arabidopsis thaliana]
  misc_feature (1)..(54): Homolog of NCBI NO: 15228759 NR Description: Yippee-related protein [Arabidopsis thaliana]
  misc_feature (1)..(71): Homolog of NCBI NO: 28273361 NR Description: putative zinc binding protein
  misc_feature (1)..(71): Homolog of NCBI NO: 27923880 NR Description: Yippee-like protein
  misc_feature (1)..(71): Homolog of NCBI NO: 15225631 NR Description: expressed protein [Arabidopsis thaliana]
  misc_feature (1)..(71): Homolog of NCBI NO: 21617953 NR Description: yippee-like protein [Arabidopsis thaliana]
  misc_feature (1)..(71): Homolog of NCBI NO: 18399156 NR Description: expressed protein [Arabidopsis thaliana]
MMMTGMHTVVDIYCVKCGSYVGWRYEFAFEKNQKYKEGKSVLERYKVCGPDGNNYWVAAQEVEAGESDTDE

SEQ ID NO: 52046 - DNA, 971 bp, Glycine max
  misc_feature (1)..(971): Ceres Seq. ID no. 13638849
atccaacacaaaaccaaacaggtcttacgcaacaaatggagagcacccagagcaacacaagcgtgatgaaccatttcatcctggtgcacggcctctgccacggggcctggtgttggtacaaggtggttgcggcgcttcaggcagcggggcaccgtgtcacggcggtcgacctggccgcgtccggcgctcacccggcgcgcatcgacgaggtgcactcgttcgaggagtactcccagcctctgcttgacgtagtggccgcggcgccagagggtgacggcgagaggctgattctggtcgggcacagccacggcgggctcagcttggcgctagccatggagaggttccccggcaaggtcgccgccgccgtgttcgcagccgccgggatgccgtgcgttggcaagcacatgggcgtcaccaccgaggagttcatgcgaaggacatcatcggaaggactcatggactgcaagatgctgccaatcaataacaaccacggtgcaggggttgcaatgataatgggcccaaacttcttagcacacaagaactaccagcaaagttcacctgaggatttggccctggcaaaaatgttggtgagaccgggaaacctgttcatggaggatccggtgatgaaggatgcaagcctgctcaccgataccaactacgggtcggtgaagaaggtatatgtggtagcaaaggctgatggctccagcaccgaggagatgcagcgttggatggtgttgttgagccccggcacggaggctgaggagatcgcgggagctgaccacgccatcatgagctcaaggcctagggagctctgtgatgctctggtcaagatcgccgacagcttaaatacttgctaaattgtacgatatatatccctggaaatcaatgtaggtgtgtacttgattttcatctaaaaataaatatgttcagtgatactattaaatcaatggaaattaagtagtattaccttc

SEQ ID NO: 52047 - protein, 284 aa, Glycine max
  peptide (1)..(284): Ceres Seq. ID no. 13638850
  misc_feature (50)..(276): Pfam Name: alpha/beta hydrolase fold Pfam Description: alpha/beta hydrolase fold
  misc_feature (24)..(282): Homolog of NCBI NO: 21554666 NR Description: putative acetone-cyanohydrin lyase [Arabidopsis
  misc_feature (24)..(279): Homolog of NCBI NO: 27754457 NR Description: putative acetone-cyanohydrin lyase [Arabidopsis
  misc_feature (24)..(279): Homolog of NCBI NO: 15227867 NR Description: esterase, putative [Arabidopsis thaliana]
  misc_feature (24)..(278): Homolog of NCBI NO: 14279437 NR Description: ethylene-induced esterase [Citrus sinensis]
  misc_feature (17)..(280): Homolog of NCBI NO: 6651393 NR Description: polyneuridine aldehyde esterase [Rauvolfia
  misc_feature (24)..(282): Homolog of NCBI NO: 40549303 NR Description: salicylic acid-binding protein 2 [Nicotiana
  misc_feature (24)..(278): Homolog of NCBI NO: 2498778 NR Description: PIR7A PROTEIN
  misc_feature (24)..(278): Homolog of NCBI NO: 34907178 NR Description: pir7a protein (Pseudomonas inducible protein)
  misc_feature (24)..(279): Homolog of NCBI NO: 498747 NR Description: Pir7b [Oryza sativa]
  misc_feature (18)..(279): Homolog of NCBI NO: 34907176 NR Description: pir7b protein (Pseudomonas inducible protein)
PTQNQTGLTQQMESTQSNTSVMNHFILVHGLCHGAWCWYKVVAALQAAGHRVTAVDLAASGAHPARIDEVHSFEEYSQPLLDVVAAAPEGDGERLILVGHSHGGLSLALAMERFPGKVAAAVFAAAGMPCVGKHMGVTTEEFMRRTSSEGLMDCKMLPINNNHGAGVAMIMGPNFLAHKNYQQSSPEDLALAKMLVRPGNLFMEDPVMKDASLLTDTNYGSVKKVYVVAKADGSSTEEMQRWMVLLSPGTEAEEIAGADHAIMSSRPRELCDALVKIADSLNTC

SEQ ID NO: 52048 - protein, 273 aa, Glycine max
  peptide (1)..(273): Ceres Seq. ID no. 13638851
  misc_feature (39)..(265): Pfam Name: alpha/beta hydrolase fold Pfam Description: alpha/beta hydrolase fold
  misc_feature (13)..(271): Homolog of NCBI NO: 21554666 NR Description: putative acetone-cyanohydrin lyase [Arabidopsis
  misc_feature (13)..(268): Homolog of NCBI NO: 27754457 NR Description: putative acetone-cyanohydrin lyase [Arabidopsis
  misc_feature (13)..(268): Homolog of NCBI NO: 15227867 NR Description: esterase, putative [Arabidopsis thaliana]
  misc_feature (13)..(267): Homolog of NCBI NO: 14279437 NR Description: ethylene-induced esterase [Citrus sinensis]
  misc_feature (6)..(269): Homolog of NCBI NO: 6651393 NR Description: polyneuridine aldehyde esterase [Rauvolfia
  misc_feature (13)..(271): Homolog of NCBI NO: 40549303 NR Description: salicylic acid-binding protein 2 [Nicotiana
  misc_feature (13)..(267): Homolog of NCBI NO: 2498778 NR Description: PIR7A PROTEIN
  misc_feature (13)..(267): Homolog of NCBI NO: 34907178 NR Description: pir7a protein (Pseudomonas inducible protein)
  misc_feature (13)..(268): Homolog of NCBI NO: 498747 NR Description: Pir7b [Oryza sativa]
  misc_feature (7)..(268): Homolog of NCBI NO: 34907176 NR Description: pir7b protein (Pseudomonas inducible protein)
MESTQSNTSVMNHFILVHGLCHGAWCWYKVVAALQAAGHRVTAVDLAASGAHPARIDEVHSFEEYSQPLLDVVAAAPEGDGERLILVGHSHGGLSLALAMERFPGKVAAAVFAAAGMPCVGKHMGVTTEEFMRRTSSEGLMDCKMLPINNNHGAGVAMIMGPNFLAHKNYQQSSPEDLALAKMLVRPGNLFMEDPVMKDASLLTDTNYGSVKKVYVVAKADGSSTEEMQRWMVLLSPGTEAEEIAGADHAIMSSRPRELCDALVKIADSLNTC

SEQ ID NO: 52049 - protein, 263 aa, Glycine max
  peptide (1)..(263): Ceres Seq. ID no. 13638852
  misc_feature (29)..(255): Pfam Name: alpha/beta hydrolase fold Pfam Description: alpha/beta hydrolase fold
  misc_feature (3)..(261): Homolog of NCBI NO: 21554666 NR Description: putative acetone-cyanohydrin lyase [Arabidopsis
  misc_feature (3)..(258): Homolog of NCBI NO: 27754457 NR Description: putative acetone-cyanohydrin lyase [Arabidopsis
  misc_feature (3)..(258): Homolog of NCBI NO: 15227867 NR Description: esterase, putative [Arabidopsis thaliana]
  misc_feature (3)..(257): Homolog of NCBI NO: 14279437 NR Description: ethylene-induced esterase [Citrus sinensis]
  misc_feature (1)..(259): Homolog of NCBI NO: 6651393 NR Description: polyneuridine aldehyde esterase [Rauvolfia
  misc_feature (3)..(261): Homolog of NCBI NO: 40549303 NR Description: salicylic acid-binding protein 2 [Nicotiana
  misc_feature (3)..(257): Homolog of NCBI NO: 2498778 NR Description: PIR7A PROTEIN
  misc_feature (3)..(257): Homolog of NCBI NO: 34907178 NR Description: pir7a protein (Pseudomonas inducible protein)
  misc_feature (3)..(258): Homolog of NCBI NO: 498747 NR Description: Pir7b [Oryza sativa]
  misc_feature (1)..(258): Homolog of NCBI NO: 34907176 NR Description: pir7b protein (Pseudomonas inducible protein)
MNHFILVHGLCHGAWCWYKVVAALQAAGHRVTAVDLAASGAHPARIDEVHSFEEYSQPLLDVVAAAPEGDGERLILVGHSHGGLSLALAMERFPGKVAAAVFAAAGMPCVGKHMGVTTEEFMRRTSSEGLMDCKMLPINNNHGAGVAMIMGPNFLAHKNYQQSSPEDLALAKMLVRPGNLFMEDPVMKDASLLTDTNYGSVKKVYVVAKADGSSTEEMQRWMVLLSPGTEAEEIAGADHAIMSSRPRELCDALVKIADSLNTC

SEQ ID NO: 52050 - DNA, 1035 bp, Glycine max
  misc_feature (1)..(1035): Ceres Seq. ID no. 13638595
ccagtcatcctcagttacttcaccacggtgctaactacctagcgctgcaccaaccaaccagtagtcaattaagcagcgcttgaccatggcgcccaagcagctccccgctgtcctcctcgccgcctgcgccaccgtcctggccctcgccgcgccattgctcgccggcgaccccgacatgctccaggacttctgcgtcgccgactacaaatccctcgacggcccattgcggttgaacgggttcccgtgcaagaggccggagaacgtgacggcggacgacttcttctcctccgcgctggcactcccgggcaacaccggcaaccccgtcgggtctgcggtcacggcggcgaacgtggagaagctcccggggctcaacacgctgggcgtctccatgtcccgcgtggactacgcgccctggggcgtgaacccgccgcacacccacccacgtgccaccgagatcatctacgtgcttgagggctccctcgacgtcggcttcgtcaccactgccggcaagctcttcgcccgcaccgtctgcaagggcgagctcttcgtctttccccgcggcctcgtccactaccagaagaacaacggcggcgcgccggccatggcgatctcggcattcaacagtcagcttccgggcacgcagtccctcgccgtggcgatgttcggtgcctcaccaccggtgcccaccgacgtgctggccagggcgctccagatcgacggcggcctggtggagaccatcaagtccaagttcccgccaaagtaactagccttgcatttgcatgcatgaggttggttgggtctgttctacgtgcgtacgtgctgctaataatgacgacgaccaagtgcagtttcaattcatttgcttgacaatatcttttgtaccatactctgatcgattcctttgtgtcggtgcatgtttagtgaagggtgtcgcctgttttactgttaattgttgctttttgttcacgaatgagctaccggtgattaatttgtatgtgtccattattgctgaaaatgaatgtgccttattgcttt

SEQ ID NO: 52051 - protein, 225 aa, Glycine max
  peptide (1)..(225): Ceres Seq. ID no. 13638596
  misc_feature (74)..(216): Pfam Name: Cupin Pfam Description: Cupin
  misc_feature (26)..(224): Homolog of NCBI NO: 27805638 NR Description: Nectarin 1 precursor (Superoxide dismutase [Mn])
  misc_feature (24)..(225): Homolog of NCBI NO: 1934730 NR Description: germin-like protein [Arabidopsis thaliana]
  misc_feature (5)..(225): Homolog of NCBI NO: 18203442 NR Description: Rhicadhesin receptor precursor (Germin-like
  misc_feature (26)..(225): Homolog of NCBI NO: 15217561 NR Description: germin-like protein (GLP4) (GLP5) [Arabidopsis
  misc_feature (16)..(225): Homolog of NCBI NO: 15228673 NR Description: germin-like protein (GLP10) [Arabidopsis
  misc_feature (8)..(225): Homolog of NCBI NO: 34904670 NR Description: putative germin protein [Oryza sativa (japonica
  misc_feature (12)..(222): Homolog of NCBI NO: 34902528 NR Description: probable germin protein 4
  misc_feature (1)..(225): Homolog of NCBI NO: 34906614 NR Description: germin(oxalate oxidase)-like protein
  misc_feature (9)..(225): Homolog of NCBI NO: 31712108 NR Description: germin-like protein [Oryza sativa (japonica
  misc_feature (9)..(225): Homolog of NCBI NO: 34906612 NR Description: germin(oxalate oxidase)-like protein
MAPKQLPAVLLAACATVLALAAPLLAGDPDMLQDFCVADYKSLDGPLRLNGFPCKRPENVTADDFFSSALALPGNTGNPVGSAVTAANVEKLPGLNTLGVSMSRVDYAPWGVNPPHTHPRATEIIYVLEGSLDVGFVTTAGKLFARTVCKGELFVFPRGLVHYQKNNGGAPAMAISAFNSQLPGTQSLAVAMFGASPPVPTDVLARALQIDGGLVETIKSKFPPK

SEQ ID NO: 52052 - protein, 195 aa, Glycine max
  peptide (1)..(195): Ceres Seq. ID no. 13638597
  misc_feature (44)..(186): Pfam Name: Cupin Pfam Description: Cupin
  misc_feature (1)..(194): Homolog of NCBI NO: 27805638 NR Description: Nectarin 1 precursor (Superoxide dismutase [Mn])
  misc_feature (1)..(195): Homolog of NCBI NO: 1934730 NR Description: germin-like protein [Arabidopsis thaliana]
  misc_feature (1)..(195): Homolog of NCBI NO: 18203442 NR Description: Rhicadhesin receptor precursor (Germin-like
  misc_feature (1)..(195): Homolog of NCBI NO: 15217561 NR Description: germin-like protein (GLP4) (GLP5) [Arabidopsis
  misc_feature (1)..(195): Homolog of NCBI NO: 15228673 NR Description: germin-like protein (GLP10) [Arabidopsis
  misc_feature (1)..(195): Homolog of NCBI NO: 34904670 NR Description: putative germin protein [Oryza sativa (japonica
  misc_feature (1)..(192): Homolog of NCBI NO: 34902528 NR Description: probable germin protein 4
  misc_feature (1)..(195): Homolog of NCBI NO: 34906614 NR Description: germin(oxalate oxidase)-like protein
  misc_feature (1)..(195): Homolog of NCBI NO: 31712108 NR Description: germin-like protein [Oryza sativa (japonica
  misc_feature (1)..(195): Homolog of NCBI NO: 34906612 NR Description: germin(oxalate oxidase)-like protein
MLQDFCVADYKSLDGPLRLNGFPCKRPENVTADDFFSSALALPGNTGNPVGSAVTAANVEKLPGLNTLGVSMSRVDYAPWGVNPPHTHPRATEIIYVLEGSLDVGFVTTAGKLFARTVCKGELFVFPRGLVHYQKNNGGAPAMAISAFNSQLPGTQSLAVAMFGASPPVPTDVLARALQIDGGLVETIKSKFPPK

SEQ ID NO: 52053 - protein, 124 aa, Glycine max
  peptide (1)..(124): Ceres Seq. ID no. 13638598
  misc_feature (1)..(115): Pfam Name: Cupin Pfam Description: Cupin
  misc_feature (1)..(123): Homolog of NCBI NO: 27805638 NR Description: Nectarin 1 precursor (Superoxide dismutase [Mn])
  misc_feature (1)..(124): Homolog of NCBI NO: 1934730 NR Description: germin-like protein [Arabidopsis thaliana]
  misc_feature (1)..(124): Homolog of NCBI NO: 18203442 NR Description: Rhicadhesin receptor precursor (Germin-like
  misc_feature (1)..(124): Homolog of NCBI NO: 15217561 NR Description: germin-like protein (GLP4) (GLP5) [Arabidopsis
  misc_feature (1)..(124): Homolog of NCBI NO: 15228673 NR Description: germin-like protein (GLP10) [Arabidopsis
  misc_feature (1)..(124): Homolog of NCBI NO: 34904670 NR Description: putative germin protein [Oryza sativa (japonica
  misc_feature (1)..(121): Homolog of NCBI NO: 34902528 NR Description: probable germin protein 4
  misc_feature (1)..(124): Homolog of NCBI NO: 34906614 NR Description: germin(oxalate oxidase)-like protein
  misc_feature (1)..(124): Homolog of NCBI NO: 31712108 NR Description: germin-like protein [Oryza sativa (japonica
  misc_feature (1)..(124): Homolog of NCBI NO: 34906612 NR Description: germin(oxalate oxidase)-like protein
MSRVDYAPWGVNPPHTHPRATEIIYVLEGSLDVGFVTTAGKLFARTVCKGELFVFPRGLVHYQKNNGGAPAMAISAFNSQLPGTQSLAVAMFGASPPVPTDVLARALQIDGGLVETIKSKFPPK

SEQ ID NO: 52054 - DNA, 748 bp, Glycine max
  misc_feature (1)..(748): Ceres Seq. ID no. 13594904
atccaccacaacgaaagcaacagccagcgatcgagacagcagcaagaggctcacttagctactgccactagtcgcgatcacatagccactcgatcgacatggcctgcaagtcggcgtccctgctgatcctcgcggcgctggtggcggccgcggcgtgcgcgggctcggcaacggcgcgcgacgtcccggccgggaaggaggatgcggtgaagcggccggagacgttccaggaggggacggtgctgatcccggggatcgggcggtacgagctgggcagccactacaggccggacatcggcgggctggaccacagcatcccggtcgccgccagggcgcagttcatccccggcgccgacgacacctgggtgcccaaccccggcttcgaggtgcccaaccccttccgccccgcagccaccacggagtccccctgatgcatggatcgagtcggccggccaacgcgtccacgttacgcctatcgatcaatgggtagctagcctgctacaattcaatttccgctagcttttggttgctacaataaaatagctgctatgcataggcaaggcatgcgtatgcatgtatcagcgactgcgtgcgagcgcgctgtcgacgttttttgtgtgtgattggagagtgtacctgtatggggtatgcatggatgcgtaggaaggaagcatccatcgcatatctcgctttgctttgttgttgccaagtaatgtgtagttcaatgtatttttctttttagttcggt

SEQ ID NO: 52055 - protein, 110 aa, Glycine max
  peptide (1)..(110): Ceres Seq. ID no. 13594905
  misc_feature (1)..(96): Homolog of NCBI NO: 34899778 NR Description: OJ1773_H01.12 [Oryza sativa (japonica
  misc_feature (1)..(107): Homolog of NCBI NO: 33146757 NR Description: unknown protein [Oryza sativa (japonica
MACKSASLLILAALVAAAACAGSATARDVPAGKEDAVKRPETFQEGTVLIPGIGRYELGSHYRPDIGGLDHSIPVAARAQFIPGADDTWVPNPGFEVPNPFRPAATTESP

SEQ ID NO: 52056 - DNA, 700 bp, Glycine max
  misc_feature (1)..(700): Ceres Seq. ID no. 12609863
gattagcccactttgcttggcttaggattgttcttgcatcatcttaaaaaaatggcttcgctttctttactcagcggcggtgctctccaggctcgttgcgcaagacatgcacatgttagcccacgcgcggcgcatgctaccaaagccgcgcctccgtcctactctctaaccggcgcctctcgcaggaacctgctgttttccctgacggcagcgacggtggtgacgggactgcagcctgcatcaatggcggagactattccgttattcgggatcagaaagaagctgaagaaggcagaagaagaagcggtggagatcgtgaaggaaggcttcgagacggcggagaaaggactagagacggcggagaaaggaatagaggcggcggagaagggagtagagacggcggagaaagaaatcgagacggcggttagttacaacggattgacacaggcgggagcagtcgtggctgctgagttcgtgggagttcttgtcgcaacttcggtcgtcaacggcattttaggacctgaagcccagaagtcgtagacttttatcatttcaagactgaaagacatttgatctttaagtgtaatattgtgtctaaaagtgttgttcattacgcgttgaacgtatcgtaattttgtttgagttttatatataatatattttaaatttattttcatttggaataagtgaactcgtgtgg

SEQ ID NO: 52057 - protein, 162 aa, Glycine max
  peptide (1)..(162): Ceres Seq. ID no. 12609864
  misc_feature (3)..(162): Homolog of NCBI NO: 21554083 NR Description: unknown [Arabidopsis thaliana]
  misc_feature (3)..(162): Homolog of NCBI NO: 18400342 NR Description: expressed protein
MASLSLLSGGALQARCARHAHVSPRAAHATKAAPPSYSLTGASRRNLLFSLTAATVVTGLQPASMAETIPLFGIRKKLKKAEEEAVEIVKEGFETAEKGLETAEKGIEAAEKGVETAEKEIETAVSYNGLTQAGAVVAAEFVGVLVATSVVNGILGPEAQKS

SEQ ID NO: 52058 - protein, 98 aa, Glycine max
  peptide (1)..(98): Ceres Seq. ID no. 12609865
  misc_feature (1)..(98): Homolog of NCBI NO: 21554083 NR Description: unknown [Arabidopsis thaliana]
  misc_feature (1)..(98): Homolog of NCBI NO: 18400342 NR Description: expressed protein
MAETIPLFGIRKKLKKAEEEAVEIVKEGFETAEKGLETAEKGIEAAEKGVETAEKEIETAVSYNGLTQAGAVVAAEFVGVLVATSVVNGILGPEAQKS

SEQ ID NO: 52059 - DNA, 1071 bp, Glycine max
  misc_feature (1)..(1071): Ceres Seq. ID no. 12609352
atcgaaacctccaccaactctgacgctcgttgattgagcgagagccacttggatcaccatgaccgccacctcgcggccacagcatcccaacgggagcctagccccggcctccgacggcggcgagtccttcgccaagttcttcgagtgctggatcttggagcagtcccgtgacctggccgcgctccgcgccgcggccacggcgcggcccgacgacgctgacctccggcgcctcgtcgatcgtgtcctcggccactacgagcactactaccgcgccaagtccgcggccgcctccgccgatgtgctccccatgttcgcgccctcgtggatctccgccaccgagagcctctacctctggtgcggcggctggcgccccacttccgcgatccagctgctctactccaagtccggcctgcagctcgaggcccagctcccggccttcctcgacggcggcagcctcggggacggtgacctgggcggcctctccgcggagcagctccaggccgccgaccagctgcagcgccgcaccatccggagggaacgggagatcgaggaggccgccgccggcgcgcaggagtcgttggcgacgacgaagatggtggagcttgccggaaagggagggatggacgcggcggaggggatggagctggagatggatgccaaggcggaggcgatgaagcgcgtgctggagatggcggacgggctgaggctggagacgctgcgcggcgtggtggggctgctccggcctgcccaggccgtgcacttcctcgtggccgccgcggagctccacctcgccgtgcacaagttcggccggcgcaaggacggcgccgcggcggcggagtgagcctgcaggctgctggtggcgcgcgcaagtggttgctctgctccgcgcaacgctcgtcgtctagctagctccgagctgccttcgttttgcctggtcaacgcgaggtgtcgcgataagctttgaccgtgatccccttctgtttggtcagcatgtgcgttctgcacattgtgtgaaacctgtggtaacttgtacgaagtgggctagctacttgtgtatgtataatgcacaag

SEQ ID NO: 52060 - protein, 260 aa, Glycine max
  peptide (1)..(260): Ceres Seq. ID no. 12609353
  misc_feature (22)..(253): Homolog of NCBI NO: 30684489 NR Description: expressed protein [Arabidopsis thaliana]
  misc_feature (22)..(253): Homolog of NCBI NO: 7486277 NR Description: hypothetical protein F28A21.60 - Arabidopsis
  misc_feature (35)..(254): Homolog of NCBI NO: 15233977 NR Description: putative protein; protein id: At4g18680.1
  misc_feature (33)..(254): Homolog of NCBI NO: 9758930 NR Description: tumor-related protein-like [Arabidopsis thaliana]
  misc_feature (33)..(254): Homolog of NCBI NO: 30694832 NR Description: tumor-related protein-like [Arabidopsis thaliana]
  misc_feature (17)..(260): Homolog of NCBI NO: 15233979 NR Description: putative protein; protein id: At4g18690.1
  misc_feature (23)..(260): Homolog of NCBI NO: 8777471 NR Description: tumor-related protein-like [Arabidopsis thaliana]
  misc_feature (23)..(260): Homolog of NCBI NO: 15231945 NR Description: hypothetical protein; protein id: At3g14880.1
  misc_feature (22)..(258): Homolog of NCBI NO: 688423 NR Description: tumor-related protein [Nicotiana glauca x
  misc_feature (7)..(259): Homolog of NCBI NO: 34896008 NR Description: ESTs AU057825(S21823),AU057072(S21123) correspond a region of the predicted gene.~Similar to Nicotiana glauca X
MTATSRPQHPNGSLAPASDGGESFAKFFECWILEQSRDLAALRAAATARPDDADLRRLVDRVLGHYEHYYRAKSAAASADVLPMFAPSWISATESLYLWCGGWRPTSAIQLLYSKSGLQLEAQLPAFLDGGSLGDGDLGGLSAEQLQAADQLQRRTIRREREIEEAAAGAQESLATTKMVELAGKGGMDAAEGMELEMDAKAEAMKRVLEMADGLRLETLRGVVGLLRPAQAVHFLVAAAELHLAVHKFGRRKDGAAAAE

SEQ ID NO: 52061 - protein, 177 aa, Glycine max
  peptide (1)..(177): Ceres Seq. ID no. 12609354
  misc_feature (1)..(170): Homolog of NCBI NO: 30684489 NR Description: expressed protein [Arabidopsis thaliana]
  misc_feature (1)..(170): Homolog of NCBI NO: 7486277 NR Description: hypothetical protein F28A21.60 - Arabidopsis
  misc_feature (1)..(171): Homolog of NCBI NO: 15233977 NR Description: putative protein; protein id: At4g18680.1
  misc_feature (1)..(171): Homolog of NCBI NO: 9758930 NR Description: tumor-related protein-like [Arabidopsis thaliana]
  misc_feature (1)..(171): Homolog of NCBI NO: 30694832 NR Description: tumor-related protein-like [Arabidopsis thaliana]
  misc_feature (1)..(177): Homolog of NCBI NO: 15233979 NR Description: putative protein; protein id: At4g18690.1
  misc_feature (1)..(177): Homolog of NCBI NO: 8777471 NR Description: tumor-related protein-like [Arabidopsis thaliana]
  misc_feature (1)..(177): Homolog of NCBI NO: 15231945 NR Description: hypothetical protein; protein id: At3g14880.1
  misc_feature (1)..(175): Homolog of NCBI NO: 688423 NR Description: tumor-related protein [Nicotiana glauca x
  misc_feature (1)..(176): Homolog of NCBI NO: 34896008 NR Description: ESTs AU057825(S21823),AU057072(S21123) correspond a region of the predicted gene.~Similar to Nicotiana glauca X
MFAPSWISATESLYLWCGGWRPTSAIQLLYSKSGLQLEAQLPAFLDGGSLGDGDLGGLSAEQLQAADQLQRRTIRREREIEEAAAGAQESLATTKMVELAGKGGMDAAEGMELEMDAKAEAMKRVLEMADGLRLETLRGVVGLLRPAQAVHFLVAAAELHLAVHKFGRRKDGAAAAE

SEQ ID NO: 52062 - DNA, 286 bp, Glycine max
  misc_feature (1)..(286): Ceres Seq. ID no. 13594684
aaatcgccattgttgctgcaccactctgattcatttcgattgagctttctttttttttcctgctaatggctcgtcggtctggagactgcatgagatgcctggtgatcttcgcggtggtatctgctttagtagtgtgcggacctgctctttactggagattcaacaaaggtttcgttggatccactcgtaaaagctctgtttgtcctccttgcgtctgtgattgcccacctcctgtatccctcctcgagatcgctcctgggcttgcaaatctcaccgttacagattg

SEQ ID NO: 52063 - protein, 73 aa, Glycine max
  peptide (1)..(73): Ceres Seq. ID no. 13594685
  misc_feature (1)..(72): Pfam Name: Protein of unknown function (DUF1068) Pfam Description: Protein of unknown function (DUF1068)
  misc_feature (12)..(72): Homolog of NCBI NO: 27922919 NR Description: unknown protein [Phytophthora sojae]
  misc_feature (1)..(72): Homolog of NCBI NO: 38345038 NR Description: OSJNBa0029H02.22 [Oryza sativa (japonica
  misc_feature (9)..(72): Homolog of NCBI NO: 25364110 NR Description: hypothetical protein At2g24290 [imported] -
  misc_feature (1)..(72): Homolog of NCBI NO: 18400504 NR Description: expressed protein [Arabidopsis thaliana]
  misc_feature (1)..(72): Homolog of NCBI NO: 25407700 NR Description: hypothetical protein AT4g30990 [imported] -
  misc_feature (1)..(72): Homolog of NCBI NO: 18417716 NR Description: expressed protein [Arabidopsis thaliana]
MARRSGDCMRCLVIFAVVSALVVCGPALYWRFNKGFVGSTRKSSVCPPCVCDCPPPVSLLEIAPGLANLTVTD

SEQ ID NO: 52064 - protein, 65 aa, Glycine max
  peptide (1)..(65): Ceres Seq. ID no. 13594686
  misc_feature (1)..(64): Pfam Name: Protein of unknown function (DUF1068) Pfam Description: Protein of unknown function (DUF1068)
  misc_feature (4)..(64): Homolog of NCBI NO: 27922919 NR Description: unknown protein [Phytophthora sojae]
  misc_feature (1)..(64): Homolog of NCBI NO: 38345038 NR Description: OSJNBa0029H02.22 [Oryza sativa (japonica
  misc_feature (1)..(64): Homolog of NCBI NO: 25364110 NR Description: hypothetical protein At2g24290 [imported] -
  misc_feature (1)..(64): Homolog of NCBI NO: 18400504 NR Description: expressed protein [Arabidopsis thaliana]
  misc_feature (1)..(64): Homolog of NCBI NO: 25407700 NR Description: hypothetical protein AT4g30990 [imported] -
  misc_feature (1)..(64): Homolog of NCBI NO: 18417716 NR Description: expressed protein [Arabidopsis thaliana]
MRCLVIFAVVSALVVCGPALYWRFNKGFVGSTRKSSVCPPCVCDCPPPVSLLEIAPGLANLTVTD

SEQ ID NO: 52065 - DNA, 1276 bp, Glycine max
  misc_feature (1)..(1276): Ceres Seq. ID no. 12609869
agaacatcctaatcgaaaactctgaccctctccaccctttttgttcctcgcccctcctcctcggcggccgcctccccgcaccccctccccccacgccgccgccgccatggccatgaagggacccggcctcttcaccgacatcggcaagaaggccaaggatctgctcaccagggactacacctacgaccagaagctctccgtctccaccgtcagctcctccggagtggccgtcacttccacagctgtgaagaagggagggctttattctcttgatgtagcatcagcttacaagtataagaataatcttgttgatgttaaagtggacacagaatcaaatatctctactaccttgactgtcttggatgtcctgccatccacaaagcttgtgacgtctatcaaatttcctgattacaatgctggaaaggtggaggtgcaatacttccacgaccatgcaacttttgctgccgctgttggcatgaagccctctcctgtggtcgatttttctttggtagtaggccctaaaggacttgccttcggtggggaggctgggtttgacacttcttcaggaaagtttaccaagtacactggtggtttcagtgtaaccaagcctgacttccatgcttcagctattctggccgacaaaggtgacaccatcaaagtgtcaggtgtgtatcaccttgatgagaagcagaaggcttcggccgtggctgaatttacccggaagctctcaacgaacgagaacacactgacagttggtggcctgtacaccgtcgaccctcagacagctgtgaaggcaaggctcaacaacactggaaagcttgctgctctcctccagcatgaggttaaaccaaagtcactcttgacgatatctggtgagttcgacaccaaggccttggacagagcacccaagtttgggctgtcactcgcgctcaagccctgatgagatcatacgtggatgatagcgattgaacatcggattctttggttattttttgtgaagctatggccaataatttgttccgcagacatgttctgttaaatctctggaggtttaggtgctctgtgggcaggatccgataggccttcacctggatttttgtccaggcgtttactttttgatgatcgaagtacttccccattgatagatgtatgcagcttgtttctttctactgtgagttccgagtagctttcacggtagtatgttacttgaagaagaagctacacttgatttttcatgcggtgttgattgattttaccgctagttgagatttactgc

SEQ ID NO: 52066 - protein, 277 aa, Glycine max
  peptide (1)..(277): Ceres Seq. ID no. 12609870
  misc_feature (5)..(270): Pfam Name: Eukaryotic porin Pfam Description: Eukaryotic porin
  misc_feature (3)..(277): Homolog of NCBI NO: 629728 NR Description: porin I, 36K - potato
  misc_feature (3)..(277): Homolog of NCBI NO: 1172556 NR Description: 36 kDa outer mitochondrial membrane protein porin
  misc_feature (4)..(277): Homolog of NCBI NO: 1172555 NR Description: 34 kDa outer mitochondrial membrane protein porin
  misc_feature (4)..(277): Homolog of NCBI NO: 7442953 NR Description: porin - common ice plant
  misc_feature (4)..(277): Homolog of NCBI NO: 36957183 NR Description: VDAC1.2 [Lotus corniculatus var. japonicus]
  misc_feature (4)..(277): Homolog of NCBI NO: 36957170 NR Description: VDAC1.1 [Lotus corniculatus var. japonicus]
  misc_feature (4)..(277): Homolog of NCBI NO: 15240765 NR Description: porin-like protein
  misc_feature (4)..(277): Homolog of NCBI NO: 36957216 NR Description: VDAC2.1 [Lotus corniculatus var. japonicus]
  misc_feature (1)..(277): Homolog of NCBI NO: 31249532 NR Description: PgPOR29 [Pennisetum glaucum]
  misc_feature (1)..(277): Homolog of NCBI NO: 29367429 NR Description: porin-like protein [Oryza sativa (japonica
MAMKGPGLFTDIGKKAKDLLTRDYTYDQKLSVSTVSSSGVAVTSTAVKKGGLYSLDVASAYKYKNNLVDVKVDTESNISTTLTVLDVLPSTKLVTSIKFPDYNAGKVEVQYFHDHATFAAAVGMKPSPVVDFSLVVGPKGLAFGGEAGFDTSSGKFTKYTGGFSVTKPDFHASAILADKGDTIKVSGVYHLDEKQKASAVAEFTRKLSTNENTLTVGGLYTVDPQTAVKARLNNTGKLAALLQHEVKPKSLLTISGEFDTKALDRAPKFGLSLALKP

SEQ ID NO: 52067 - protein, 275 aa, Glycine max
  peptide (1)..(275): Ceres Seq. ID no. 12609871
  misc_feature (3)..(268): Pfam Name: Eukaryotic porin Pfam Description: Eukaryotic porin
  misc_feature (1)..(275): Homolog of NCBI NO: 629728 NR Description: porin I, 36K - potato
  misc_feature (1)..(275): Homolog of NCBI NO: 1172556 NR Description: 36 kDa outer mitochondrial membrane protein porin
  misc_feature (2)..(275): Homolog of NCBI NO: 1172555 NR Description: 34 kDa outer mitochondrial membrane protein porin
  misc_feature (2)..(275): Homolog of NCBI NO: 7442953 NR Description: porin - common ice plant
  misc_feature (2)..(275): Homolog of NCBI NO: 36957183 NR Description: VDAC1.2 [Lotus corniculatus var. japonicus]
  misc_feature (2)..(275): Homolog of NCBI NO: 36957170 NR Description: VDAC1.1 [Lotus corniculatus var. japonicus]
  misc_feature (2)..(275): Homolog of NCBI NO: 15240765 NR Description: porin-like protein
  misc_feature (2)..(275): Homolog of NCBI NO: 36957216 NR Description: VDAC2.1 [Lotus corniculatus var. japonicus]
  misc_feature (1)..(275): Homolog of NCBI NO: 31249532 NR Description: PgPOR29 [Pennisetum glaucum]
  misc_feature (1)..(275): Homolog of NCBI NO: 29367429 NR Description: porin-like protein [Oryza sativa (japonica
MKGPGLFTDIGKKAKDLLTRDYTYDQKLSVSTVSSSGVAVTSTAVKKGGLYSLDVASAYKYKNNLVDVKVDTESNISTTLTVLDVLPSTKLVTSIKFPDYNAGKVEVQYFHDHATFAAAVGMKPSPVVDFSLVVGPKGLAFGGEAGFDTSSGKFTKYTGGFSVTKPDFHASAILADKGDTIKVSGVYHLDEKQKASAVAEFTRKLSTNENTLTVGGLYTVDPQTAVKARLNNTGKLAALLQHEVKPKSLLTISGEFDTKALDRAPKFGLSLALKP

SEQ ID NO: 52068 - protein, 154 aa, Glycine max
  peptide (1)..(154): Ceres Seq. ID no. 12609872
  misc_feature (1)..(147): Pfam Name: Eukaryotic porin Pfam Description: Eukaryotic porin
  misc_feature (1)..(154): Homolog of NCBI NO: 629728 NR Description: porin I, 36K - potato
  misc_feature (1)..(154): Homolog of NCBI NO: 1172556 NR Description: 36 kDa outer mitochondrial membrane protein porin
  misc_feature (1)..(154): Homolog of NCBI NO: 1172555 NR Description: 34 kDa outer mitochondrial membrane protein porin
  misc_feature (1)..(154): Homolog of NCBI NO: 7442953 NR Description: porin - common ice plant
  misc_feature (1)..(154): Homolog of NCBI NO: 36957183 NR Description: VDAC1.2 [Lotus corniculatus var. japonicus]
  misc_feature (1)..(154): Homolog of NCBI NO: 36957170 NR Description: VDAC1.1 [Lotus corniculatus var. japonicus]
  misc_feature (1)..(154): Homolog of NCBI NO: 15240765 NR Description: porin-like protein
  misc_feature (1)..(154): Homolog of NCBI NO: 36957216 NR Description: VDAC2.1 [Lotus corniculatus var. japonicus]
  misc_feature (1)..(154): Homolog of NCBI NO: 31249532 NR Description: PgPOR29 [Pennisetum glaucum]
  misc_feature (1)..(154): Homolog of NCBI NO: 29367429 NR Description: porin-like protein [Oryza sativa (japonica
MKPSPVVDFSLVVGPKGLAFGGEAGFDTSSGKFTKYTGGFSVTKPDFHASAILADKGDTIKVSGVYHLDEKQKASAVAEFTRKLSTNENTLTVGGLYTVDPQTAVKARLNNTGKLAALLQHEVKPKSLLTISGEFDTKALDRAPKFGLSLALKP

SEQ ID NO: 52069 - DNA, 1024 bp, Glycine max
  misc_feature (1)..(1024): Ceres Seq. ID no. 13594687
aaaattcctcttgccctcccagcttcgctgatttcttcgtttggaggataccctcaaaggtgttctactgtgaaagttagccaattttgaagatgaattgttataatcttcagaagaatgccttctcagcctgtgaagagatgagaggctctcttcccattgctgatcagaatggacctgtcttttgccctaagccacgccgagctggggttttaatgaacttgcctattcgaccagtaaaatggcatttaggtcaacaagctgaggggtctgattcaaaagttggggcagaactacttgacattgttctcaagagggacattgttcttaagagggagagttatggggaagaatttgcaaatcagataccttcatctcctccatatttttgtggttctcctccagttcgggcttctaatcccttaatccaagatgctcgatttggagacgaagagtactctcttatatcaacaatttcatcgccttcaggtttactgtctccatcttcagcatctcgcaaagcaggatgtgctaggatgaagtttggacttaaaccggctgcagttagagtagaaggatttgattgcctcagcagggattgccagaattccggcatccctgctgttgcttaaactccattcatagaagtgtatatagaagaagccaagtgccattacttataaaacgtgacttaactagagagagttttgaatgtttcggagggaagtaagaaattcagttagttgtgtatatagcaaatgcttttttgtatggtgaggtgaatcatctcattgtgagtatccgtggcaagtttagggagctgcagaaaaagcaaaccttctgttcttgaagtttgatgtgtagagagcatgtctttttgtaatataaggaggttgtatcggagtgtcttttaaaccttttaggctatcaccgtaagagtgttctgtataggaattggtgattttggttgtcgtccctgtaaatatatggcttctcgtgccggcttatcgataccgtcgacctc

SEQ ID NO: 52070 - protein, 179 aa, Glycine max
  peptide (1)..(179): Ceres Seq. ID no. 15221403
  misc_feature (1)..(179): Homolog of NCBI NO: 15222278 NR Description: expressed protein [Arabidopsis thaliana]
  misc_feature (43)..(179): Homolog of NCBI NO: 18396232 NR Description: expressed protein [Arabidopsis thaliana]
  misc_feature (1)..(179): Homolog of NCBI NO: 18409044 NR Description: expressed protein [Arabidopsis thaliana]
  misc_feature (1)..(179): Homolog of NCBI NO: 11762168 NR Description: AT5g16110 [Arabidopsis thaliana]
  misc_feature (1)..(179): Homolog of NCBI NO: 30685676 NR Description: expressed protein [Arabidopsis thaliana]
MNCYNLQKNAFSACEEMRGSLPIADQNGPVFCPKPRRAGVLMNLPIRPVKWHLGQQAEGSDSKVGAELLDIVLKRDIVLKRESYGEEFANQIPSSPPYFCGSPPVRASNPLIQDARFGDEEYSLISTISSPSGLLSPSSASRKAGCARMKFGLKPAAVRVEGFDCLSRDCQNSGIPAVA

SEQ ID NO: 52071 - protein, 163 aa, Glycine max
  peptide (1)..(163): Ceres Seq. ID no. 15221404
  misc_feature (1)..(163): Homolog of NCBI NO: 15222278 NR Description: expressed protein [Arabidopsis thaliana]
  misc_feature (27)..(163): Homolog of NCBI NO: 18396232 NR Description: expressed protein [Arabidopsis thaliana]
  misc_feature (1)..(163): Homolog of NCBI NO: 18409044 NR Description: expressed protein [Arabidopsis thaliana]
  misc_feature (1)..(163): Homolog of NCBI NO: 11762168 NR Description: AT5g16110 [Arabidopsis thaliana]
  misc_feature (1)..(163): Homolog of NCBI NO: 30685676 NR Description: expressed protein [Arabidopsis thaliana]
MRGSLPIADQNGPVFCPKPRRAGVLMNLPIRPVKWHLGQQAEGSDSKVGAELLDIVLKRDIVLKRESYGEEFANQIPSSPPYFCGSPPVRASNPLIQDARFGDEEYSLISTISSPSGLLSPSSASRKAGCARMKFGLKPAAVRVEGFDCLSRDCQNSGIPAVA

SEQ ID NO: 52072 - protein, 138 aa, Glycine max
  peptide (1)..(138): Ceres Seq. ID no. 15221405
  misc_feature (1)..(138): Homolog of NCBI NO: 15222278 NR Description: expressed protein [Arabidopsis thaliana]
  misc_feature (2)..(138): Homolog of NCBI NO: 18396232 NR Description: expressed protein [Arabidopsis thaliana]
  misc_feature (1)..(138): Homolog of NCBI NO: 18409044 NR Description: expressed protein [Arabidopsis thaliana]
  misc_feature (1)..(138): Homolog of NCBI NO: 11762168 NR Description: AT5g16110 [Arabidopsis thaliana]
  misc_feature (1)..(138): Homolog of NCBI NO: 30685676 NR Description: expressed protein [Arabidopsis thaliana]
MNLPIRPVKWHLGQQAEGSDSKVGAELLDIVLKRDIVLKRESYGEEFANQIPSSPPYFCGSPPVRASNPLIQDARFGDEEYSLISTISSPSGLLSPSSASRKAGCARMKFGLKPAAVRVEGFDCLSRDCQNSGIPAVA

SEQ ID NO: 52073 - DNA, 987 bp, Glycine max
  misc_feature (1)..(987): Ceres Seq. ID no. 13638855
gcaccgctcgcttccgcccctccccaacctgcgtaccctcccccccaccgccgcgccgcccgcctcggctgaacgacggccgggccctctcggcggcggcgatcgacgatggtggtggccacggaggaaatggcggtctactgcttcgacaccctcgtcgcccactacagcggcgagcagccgccgccgcccgccttcgaggagggcgtccacccactgtttgtcacctggaagaaggctaccaatggttccgagccacgcctaaggggatgcattggaactttggagccccgtcagattgtaagtggcttcaaggattatgcgctgacaagtgccctgagggatcggcgcttttctccgatacagtccaaagagctgccatatttggaatgcacagtttctatattgactgaatacgaaactgcactcaaccaccttgattgggaggttggaaagcatggtttaattattgagttcaccgatcctgactataatgtaagacggagtggaacttatttacctgaggttgctgcccatgaaggatggacacaactagagaccattgactcgctcatgaggaaggctggctacaatggcaccatcactgagtctttgaggaagaaaatccgcgtcacccgctaccagagtaccctgtacaccatgcactatggtgaatatactgcatatgtcaagaagaacagaggttaaattaacggggaacccatagttaatggattcaaaccaggccagtgatttatctgtactgtagcaggtactacaactatttataatttggcttggaaggaattggcgtgagaattagtttaaaacaaatcaattctagtcattgatctgccatcatgccatttcattccaaagaatgtggggtgccatgtcaacagccctcgtgtcattctgggacacaaattaaatggtgatggttatgtatctgtaagcatatgcactttgattacaaataattgtgtg

SEQ ID NO: 52074 - protein, 199 aa, Glycine max
  peptide (1)..(199): Ceres Seq. ID no. 13638856
  misc_feature (4)..(187): Pfam Name: AMMECR1 Pfam Description: AMMECR1
  misc_feature (1)..(199): Homolog of NCBI NO: 17535669 NR Description: Putative cytoplasmic protein of ancient origin
  misc_feature (1)..(196): Homolog of NCBI NO: 31203679 NR Description: ENSANGP00000015575 [Anopheles gambiae]
  misc_feature (3)..(196): Homolog of NCBI NO: 24649478 NR Description: CG5902-PA [Drosophila melanogaster]
  misc_feature (1)..(193): Homolog of NCBI NO: 9506383 NR Description: AMMECR1 protein [Mus musculus]
  misc_feature (1)..(193): Homolog of NCBI NO: 7669554 NR Description: AMMECR1 protein [Homo sapiens]
  misc_feature (1)..(193): Homolog of NCBI NO: 34784081 NR Description: Similar to AMMECR1 protein [Danio rerio]
  misc_feature (2)..(199): Homolog of NCBI NO: 34878672 NR Description: similar to hypothetical protein MGC32132 [Rattus
  misc_feature (1)..(199): Homolog of NCBI NO: 23943793 NR Description: hypothetical protein MGC32132 [Mus musculus]
  misc_feature (1)..(199): Homolog of NCBI NO: 18404840 NR Description: expressed protein [Arabidopsis thaliana]
  misc_feature (1)..(199): Homolog of NCBI NO: 37537060 NR Description: unknown protein [Oryza sativa (japonica
MVVATEEMAVYCFDTLVAHYSGEQPPPPAFEEGVHPLFVTWKKATNGSEPRLRGCIGTLEPRQIVSGFKDYALTSALRDRRFSPIQSKELPYLECTVSILTEYETALNHLDWEVGKHGLIIEFTDPDYNVRRSGTYLPEVAAHEGWTQLETIDSLMRKAGYNGTITESLRKKIRVTRYQSTLYTMHYGEYTAYVKKNRG

SEQ ID NO: 52075 - protein, 192 aa, Glycine max
  peptide (1)..(192): Ceres Seq. ID no. 13638857
  misc_feature (1)..(180): Pfam Name: AMMECR1 Pfam Description: AMMECR1
  misc_feature (1)..(192): Homolog of NCBI NO: 17535669 NR Description: Putative cytoplasmic protein of ancient origin
  misc_feature (1)..(189): Homolog of NCBI NO: 31203679 NR Description: ENSANGP00000015575 [Anopheles gambiae]
  misc_feature (1)..(189): Homolog of NCBI NO: 24649478 NR Description: CG5902-PA [Drosophila melanogaster]
  misc_feature (1)..(186): Homolog of NCBI NO: 9506383 NR Description: AMMECR1 protein [Mus musculus]
  misc_feature (1)..(186): Homolog of NCBI NO: 7669554 NR Description: AMMECR1 protein [Homo sapiens]
  misc_feature (1)..(186): Homolog of NCBI NO: 34784081 NR Description: Similar to AMMECR1 protein [Danio rerio]
  misc_feature (1)..(192): Homolog of NCBI NO: 34878672 NR Description: similar to hypothetical protein MGC32132 [Rattus
  misc_feature (1)..(192): Homolog of NCBI NO: 23943793 NR Description: hypothetical protein MGC32132 [Mus musculus]
  misc_feature (1)..(192): Homolog of NCBI NO: 18404840 NR Description: expressed protein [Arabidopsis thaliana]
  misc_feature (1)..(192): Homolog of NCBI NO: 37537060 NR Description: unknown protein [Oryza sativa (japonica
MAVYCFDTLVAHYSGEQPPPPAFEEGVHPLFVTWKKATNGSEPRLRGCIGTLEPRQIVSGFKDYALTSALRDRRFSPIQSKELPYLECTVSILTEYETALNHLDWEVGKHGLIIEFTDPDYNVRRSGTYLPEVAAHEGWTQLETIDSLMRKAGYNGTITESLRKKIRVTRYQSTLYTMHYGEYTAYVKKNRG

SEQ ID NO: 52076 - protein, 136 aa, Glycine max
  peptide (1)..(136): Ceres Seq. ID no. 13638858
TARFRPSPTCVPSPPPPRRPPRLNDGRALSAAAIDDGGGHGGNGGLLLRHPRRPLQRRAAAAARLRGGRPPTVCHLEEGYQWFRATPKGMHWNFGAPSDCKWLQGLCADKCPEGSALFSDTVQRAAIFGMHSFYID

SEQ ID NO: 52077 - DNA, 937 bp, Glycine max
  misc_feature (1)..(937): Ceres Seq. ID no. 12609419
ccggtaaatctgggttttgacaaactacttgaaattgatcaagggaatgaggatcgttggactgacgggtggaatagcgtctggaaagagcaccgtttccaatctgttcaagtcccatgatgttcccattgtagatgctgacgttgtcgctcgcgaggtgttaatgaaagggagtggtggttggaagaaagtcgttgcagcttttggggacgaaattcttcttgaaaatggagaagtcaatagacccaggcttggccaaattgtcttctccgatccggataagcgtcaatttctcaaccgattgctagctccttacatatcacgtgggatattttggaaggttttgaagctatggatgaagggatacaaggtcattgttcttgatgtgcctttgttattcgaggccaagatggacaagttcacaaagcccattattgttgtatgggttgatcctgagacgcagattcagcggctcttggcgagagacaagtccagtgaggaggatgctcggaataggattaatgctcaaatgtcactggatgttaaaaggggtaaagctgatatagttatagataacactggttcattggatgacttgaatcaacagtttcagaaggtttttgttgaggtcacaagaccattgacatggactgagtttttgcgctccaggcagggagtcttcgccattcttgcttccttcacctcaggtgttgttctgtttatgaagacattcaacaatcatacccacatttcatagccacctgtgttctacacatttgttaatgtattatttacattccctctaaagccctaaacccatgagttcttttgtgtatctcttttcaaattccccaacaaatcctgctgttcaaagttgattaatttaaatttgaagatacaacttcaagttttaaataaccatgatattatatttccc

SEQ ID NO: 52078 - protein, 236 aa, Glycine max
  peptide (1)..(236): Ceres Seq. ID no. 12609420
  misc_feature (2)..(183): Pfam Name: Dephospho-CoA kinase Pfam Description: Dephospho-CoA kinase
  misc_feature (1)..(232): Homolog of NCBI NO: 31209483 NR Description: ENSANGP00000017632 [Anopheles gambiae]
  misc_feature (1)..(228): Homolog of NCBI NO: 17390295 NR Description: hypothetical protein FLJ22955 [Homo sapiens]
  misc_feature (2)..(194): Homolog of NCBI NO: 16800666 NR Description: similar to unknown proteins [Listeria innocua]
  misc_feature (1)..(205): Homolog of NCBI NO: 17554944 NR Description: Dephospho-CoA kinase (27.4 kD) [Caenorhabditis
  misc_feature (1)..(205): Homolog of NCBI NO: 25325227 NR Description: protein T05G5.5 [imported] - Caenorhabditis
  misc_feature (1)..(205): Homolog of NCBI NO: 39590766 NR Description: Hypothetical protein CBG10005 [Caenorhabditis
  misc_feature (1)..(230): Homolog of NCBI NO: 24644728 NR Description: CG1939-PA [Drosophila melanogaster]
  misc_feature (1)..(230): Homolog of NCBI NO: 20151879 NR Description: RH63365p [Drosophila melanogaster]
  misc_feature (1)..(227): Homolog of NCBI NO: 14587322 NR Description: P0460H02.3 [Oryza sativa (japonica
  misc_feature (1)..(222): Homolog of NCBI NO: 15225886 NR Description: unknown protein; protein id: At2g27490.1
MRIVGLTGGIASGKSTVSNLFKSHDVPIVDADVVAREVLMKGSGGWKKVVAAFGDEILLENGEVNRPRLGQIVFSDPDKRQFLNRLLAPYISRGIFWKVLKLWMKGYKVIVLDVPLLFEAKMDKFTKPIIVVWVDPETQIQRLLARDKSSEEDARNRINAQMSLDVKRGKADIVIDNTGSLDDLNQQFQKVFVEVTRPLTWTEFLRSRQGVFAILASFTSGVVLFMKTFNNHTHIS

SEQ ID NO: 52079 - protein, 197 aa, Glycine max
  peptide (1)..(197): Ceres Seq. ID no. 12609421
  misc_feature (1)..(144): Pfam Name: Dephospho-CoA kinase Pfam Description: Dephospho-CoA kinase
  misc_feature (1)..(193): Homolog of NCBI NO: 31209483 NR Description: ENSANGP00000017632 [Anopheles gambiae]
  misc_feature (1)..(189): Homolog of NCBI NO: 17390295 NR Description: hypothetical protein FLJ22955 [Homo sapiens]
  misc_feature (1)..(155): Homolog of NCBI NO: 16800666 NR Description: similar to unknown proteins [Listeria innocua]
  misc_feature (1)..(166): Homolog of NCBI NO: 17554944 NR Description: Dephospho-CoA kinase (27.4 kD) [Caenorhabditis
  misc_feature (1)..(166): Homolog of NCBI NO: 25325227 NR Description: protein T05G5.5 [imported] - Caenorhabditis
  misc_feature (1)..(166): Homolog of NCBI NO: 39590766 NR Description: Hypothetical protein CBG10005 [Caenorhabditis
  misc_feature (1)..(191): Homolog of NCBI NO: 24644728 NR Description: CG1939-PA [Drosophila melanogaster]
  misc_feature (1)..(191): Homolog of NCBI NO: 20151879 NR Description: RH63365p [Drosophila melanogaster]
  misc_feature (1)..(188): Homolog of NCBI NO: 14587322 NR Description: P0460H02.3 [Oryza sativa (japonica
  misc_feature (1)..(183): Homolog of NCBI NO: 15225886 NR Description: unknown protein; protein id: At2g27490.1
MKGSGGWKKVVAAFGDEILLENGEVNRPRLGQIVFSDPDKRQFLNRLLAPYISRGIFWKVLKLWMKGYKVIVLDVPLLFEAKMDKFTKPIIVVWVDPETQIQRLLARDKSSEEDARNRINAQMSLDVKRGKADIVIDNTGSLDDLNQQFQKVFVEVTRPLTWTEFLRSRQGVFAILASFTSGVVLFMKTFNNHTHIS

SEQ ID NO: 52080 - protein, 133 aa, Glycine max
  peptide (1)..(133): Ceres Seq. ID no. 12609422
  misc_feature (1)..(80): Pfam Name: Dephospho-CoA kinase Pfam Description: Dephospho-CoA kinase
  misc_feature (1)..(129): Homolog of NCBI NO: 31209483 NR Description: ENSANGP00000017632 [Anopheles gambiae]
  misc_feature (1)..(125): Homolog of NCBI NO: 17390295 NR Description: hypothetical protein FLJ22955 [Homo sapiens]
  misc_feature (1)..(91): Homolog of NCBI NO: 16800666 NR Description: similar to unknown proteins [Listeria innocua]
  misc_feature (1)..(102): Homolog of NCBI NO: 17554944 NR Description: Dephospho-CoA kinase (27.4 kD) [Caenorhabditis
  misc_feature (1)..(102): Homolog of NCBI NO: 25325227 NR Description: protein T05G5.5 [imported] - Caenorhabditis
  misc_feature (1)..(102): Homolog of NCBI NO: 39590766 NR Description: Hypothetical protein CBG10005 [Caenorhabditis
  misc_feature (1)..(127): Homolog of NCBI NO: 24644728 NR Description: CG1939-PA [Drosophila melanogaster]
  misc_feature (1)..(127): Homolog of NCBI NO: 20151879 NR Description: RH63365p [Drosophila melanogaster]
  misc_feature (1)..(124): Homolog of NCBI NO: 14587322 NR Description: P0460H02.3 [Oryza sativa (japonica
  misc_feature (1)..(119): Homolog of NCBI NO: 15225886 NR Description: unknown protein; protein id: At2g27490.1
MKGYKVIVLDVPLLFEAKMDKFTKPIIVVWVDPETQIQRLLARDKSSEEDARNRINAQMSLDVKRGKADIVIDNTGSLDDLNQQFQKVFVEVTRPLTWTEFLRSRQGVFAILASFTSGVVLFMKTFNNHTHIS

SEQ ID NO: 52081 - DNA, 834 bp, Glycine max
  misc_feature (1)..(834): Ceres Seq. ID no. 12609388
aatttctgtaagatcatcaaaagttgatacaccaagctgatttataaacctctacacactcaatttctagcatacaaaaataaaagaaatgggaacagagatggtaatgattcacgaggttccttttcctccacagatcatcacttccaagcccttctctcttcttggccaaggcatcactgacatcgagatccatttccttcaagtgaagttcacggccataggagtttacttagatccttcagatgttaaaacccatcttgacaaatggaaaggcaagaccggaaaggatcttgccggtgatgacgacttcttcgacgccctggcctccggggagattgaaaaggttataagagtggtggtgataaaggaaataaaaggagctcagtacggtgtgcagctagagaattcggtgagagatcgtttggctgctgaggataagtacgaggaagaagaagaaaacgagctcgagaaagttgtaggattttttcagtctaagtacttcaagactcattccatcatcacttaccgtttctcagccaaagatggtatctgcgagattggatttgaaacggaaggtaaagaagaggacaaattgaaagtagagaatgcgaatgtggtagggatgatgcagaaatggtacttgtctggaagtcgaggagtttcaccgtccaccatcgtctccctcgccgattctctgtccgcagttttaacctaaaactccttatataagcctatatcatctatgtgtgtgttttatgttgttgtattatgtcgttcttaagtgagacatcgtgtttggttatctttataaaatgttgaatggttgtcttt

SEQ ID NO: 52082 - protein, 209 aa, Glycine max
  peptide (1)..(209): Ceres Seq. ID no. 12609389
  misc_feature (1)..(209): Pfam Name: Chalcone-flavanone isomerase Pfam Description: Chalcone-flavanone isomerase
  misc_feature (6)..(208): Homolog of NCBI NO: 116134 NR Description: CHALCONE--FLAVONONE ISOMERASE 1 (CHALCONE
  misc_feature (3)..(209): Homolog of NCBI NO: 5921722 NR Description: Chalcone--flavonone isomerase (Chalcone
  misc_feature (6)..(208): Homolog of NCBI NO: 3041652 NR Description: CHALCONE--FLAVONONE ISOMERASE (CHALCONE
  misc_feature (3)..(208): Homolog of NCBI NO: 4126399 NR Description: chalcone isomerase [Citrus sinensis]
  misc_feature (5)..(209): Homolog of NCBI NO: 10176739 NR Description: contains similarity to chalcone-flavonone
  misc_feature (1)..(209): Homolog of NCBI NO: 18414838 NR Description: putative protein; protein id: At5g05270.1
MGTEMVMIHEVPFPPQIITSKPFSLLGQGITDIEIHFLQVKFTAIGVYLDPSDVKTHLDKWKGKTGKDLAGDDDFFDALASGEIEKVIRVVVIKEIKGAQYGVQLENSVRDRLAAEDKYEEEEENELEKVVGFFQSKYFKTHSIITYRFSAKDGICEIGFETEGKEEDKLKVENANVVGMMQKWYLSGSRGVSPSTIVSLADSLSAVLT

SEQ ID NO: 52083 - protein, 205 aa, Glycine max
  peptide (1)..(205): Ceres Seq. ID no. 12609390
  misc_feature (1)..(205): Pfam Name: Chalcone-flavanone isomerase Pfam Description: Chalcone-flavanone isomerase
  misc_feature (2)..(204): Homolog of NCBI NO: 116134 NR Description: CHALCONE--FLAVONONE ISOMERASE 1 (CHALCONE
  misc_feature (1)..(205): Homolog of NCBI NO: 5921722 NR Description: Chalcone--flavonone isomerase (Chalcone
  misc_feature (2)..(204): Homolog of NCBI NO: 3041652 NR Description: CHALCONE--FLAVONONE ISOMERASE (CHALCONE
  misc_feature (1)..(204): Homolog of NCBI NO: 4126399 NR Description: chalcone isomerase [Citrus sinensis]
  misc_feature (1)..(205): Homolog of NCBI NO: 10176739 NR Description: contains similarity to chalcone-flavonone
  misc_feature (1)..(205): Homolog of NCBI NO: 18414838 NR Description: putative protein; protein id: At5g05270.1
MVMIHEVPFPPQIITSKPFSLLGQGITDIEIHFLQVKFTAIGVYLDPSDVKTHLDKWKGKTGKDLAGDDDFFDALASGEIEKVIRVVVIKEIKGAQYGVQLENSVRDRLAAEDKYEEEEENELEKVVGFFQSKYFKTHSIITYRFSAKDGICEIGFETEGKEEDKLKVENANVVGMMQKWYLSGSRGVSPSTIVSLADSLSAVLT

SEQ ID NO: 52084 - protein, 203 aa, Glycine max
  peptide (1)..(203): Ceres Seq. ID no. 12609391
  misc_feature (1)..(203): Pfam Name: Chalcone-flavanone isomerase Pfam Description: Chalcone-flavanone isomerase
  misc_feature (1)..(202): Homolog of NCBI NO: 116134 NR Description: CHALCONE--FLAVONONE ISOMERASE 1 (CHALCONE
  misc_feature (1)..(203): Homolog of NCBI NO: 5921722 NR Description: Chalcone--flavonone isomerase (Chalcone
  misc_feature (1)..(202): Homolog of NCBI NO: 3041652 NR Description: CHALCONE--FLAVONONE ISOMERASE (CHALCONE
  misc_feature (1)..(202): Homolog of NCBI NO: 4126399 NR Description: chalcone isomerase [Citrus sinensis]
  misc_feature (1)..(203): Homolog of NCBI NO: 10176739 NR Description: contains similarity to chalcone-flavonone
  misc_feature (1)..(203): Homolog of NCBI NO: 18414838 NR Description: putative protein; protein id: At5g05270.1
MIHEVPFPPQIITSKPFSLLGQGITDIEIHFLQVKFTAIGVYLDPSDVKTHLDKWKGKTGKDLAGDDDFFDALASGEIEKVIRVVVIKEIKGAQYGVQLENSVRDRLAAEDKYEEEEENELEKVVGFFQSKYFKTHSIITYRFSAKDGICEIGFETEGKEEDKLKVENANVVGMMQKWYLSGSRGVSPSTIVSLADSLSAVLT

SEQ ID NO: 52085 - DNA, 1048 bp, Glycine max
  misc_feature (1)..(1048): Ceres Seq. ID no. 15177067
atagatcttcttcttcgccaccggagagctcagccgtcgcactgaatcaaatcaacctagaaagcaatctctagatctgttgtctccttcacatcttcttccagagatgtataataacatgggacctcagcctgggatgcctatgcctcaggcagttcctcagcctaacccttttgggaatgccttctctggtcccggctctggacttatcagaagtggcttgggagcttatggggagaagattttcggatccagctctgagtatgtgcagagcaacataactcgttacttctccgatcctcaatactattttcaagtgaatgaccagtatgtgaggaacaagttgaaggttgttctgcttcctttccttcataggggacactggactagaatctcagagccagttgggggtaggctttcatacaagcccccgatatatgatattaatgcaccagacttatacattccgcttatggcattcggcacatacgttgttcttgctggtttgtctctaggactctatgggaagttttctccggaagctctgaactggctttttgtgaaaggaatggttggctggttcttgcaagtcatgctgctgaagataacattgctttcattgggtagcggcgaagcacccctcttggatatcgtggcgtatgctggctatactttcacgggtctctgcttagctgttcttggcaagatcatctggggatactcttactatgctctccttccgtggacctgcttgtgcagcggggtcttcctagtgaagacgatgaagcgagttctctatgcggaagctaggagttctgactcgagcaggcatcactacctcttgatctttgtagcgttagctcagtttcctcttttgatctggcttggtaacattagtgtcaattggctcttttgaattgcattatgtttaagatgttgtgaaaagaaacacctctgatgttatgttagcagaatttaagtttttatttatttcttggtttagacttttgtcaaacataaatatatgatgaaagaaaagtgttatccc

SEQ ID NO: 52086 - protein, 269 aa, Glycine max
  peptide (1)..(269): Ceres Seq. ID no. 15177068
  misc_feature (41)..(260): Homolog of NCBI NO: 25282409 NR Description: Yip1p-interacting factor
  misc_feature (13)..(260): Homolog of NCBI NO: 28277968 NR Description: Similar to Yip1p-interacting factor [Danio rerio]
  misc_feature (10)..(260): Homolog of NCBI NO: 39795597 NR Description: Unknown (protein for MGC:76182) [Silurana
  misc_feature (129)..(263): Homolog of NCBI NO: 10241632 NR Description: putative protein [Oryza sativa (indica
  misc_feature (1)..(263): Homolog of NCBI NO: 38346458 NR Description: OSJNBa0019G23.6 [Oryza sativa (japonica
  misc_feature (1)..(268): Homolog of NCBI NO: 9755388 NR Description: F17F8.24 [Arabidopsis thaliana]
  misc_feature (1)..(268): Homolog of NCBI NO: 18397705 NR Description: expressed protein [Arabidopsis thaliana]
  misc_feature (11)..(269): Homolog of NCBI NO: 33589682 NR Description: At3g59500 [Arabidopsis thaliana]
  misc_feature (11)..(269): Homolog of NCBI NO: 11282553 NR Description: hypothetical protein T16L24.50 - Arabidopsis
  misc_feature (1)..(269): Homolog of NCBI NO: 30695009 NR Description: expressed protein [Arabidopsis thaliana]
MYNNMGPQPGMPMPQAVPQPNPFGNAFSGPGSGLIRSGLGAYGEKIFGSSSEYVQSNITRYFSDPQYYFQVNDQYVRNKLKVVLLPFLHRGHWTRISEPVGGRLSYKPPIYDINAPDLYIPLMAFGTYVVLAGLSLGLYGKFSPEALNWLFVKGMVGWFLQVMLLKITLLSLGSGEAPLLDIVAYAGYTFTGLCLAVLGKIIWGYSYYALLPWTCLCSGVFLVKTMKRVLYAEARSSDSSRHHYLLIFVALAQFPLLIWLGNISVNWLF

SEQ ID NO: 52087 - protein, 265 aa, Glycine max
  peptide (1)..(265): Ceres Seq. ID no. 15177069
  misc_feature (37)..(256): Homolog of NCBI NO: 25282409 NR Description: Yip1p-interacting factor
  misc_feature (9)..(256): Homolog of NCBI NO: 28277968 NR Description: Similar to Yip1p-interacting factor [Danio rerio]
  misc_feature (6)..(256): Homolog of NCBI NO: 39795597 NR Description: Unknown (protein for MGC:76182) [Silurana
  misc_feature (125)..(259): Homolog of NCBI NO: 10241632 NR Description: putative protein [Oryza sativa (indica
  misc_feature (1)..(259): Homolog of NCBI NO: 38346458 NR Description: OSJNBa0019G23.6 [Oryza sativa (japonica
  misc_feature (1)..(264): Homolog of NCBI NO: 9755388 NR Description: F17F8.24 [Arabidopsis thaliana]
  misc_feature (1)..(264): Homolog of NCBI NO: 18397705 NR Description: expressed protein [Arabidopsis thaliana]
  misc_feature (7)..(265): Homolog of NCBI NO: 33589682 NR Description: At3g59500 [Arabidopsis thaliana]
  misc_feature (7)..(265): Homolog of NCBI NO: 11282553 NR Description: hypothetical protein T16L24.50 - Arabidopsis
  misc_feature (1)..(265): Homolog of NCBI NO: 30695009 NR Description: expressed protein [Arabidopsis thaliana]
MGPQPGMPMPQAVPQPNPFGNAFSGPGSGLIRSGLGAYGEKIFGSSSEYVQSNITRYFSDPQYYFQVNDQYVRNKLKVVLLPFLHRGHWTRISEPVGGRLSYKPPIYDINAPDLYIPLMAFGTYVVLAGLSLGLYGKFSPEALNWLFVKGMVGWFLQVMLLKITLLSLGSGEAPLLDIVAYAGYTFTGLCLAVLGKIIWGYSYYALLPWTCLCSGVFLVKTMKRVLYAEARSSDSSRHHYLLIFVALAQFPLLIWLGNISVNWLF

SEQ ID NO: 52088 - protein, 259 aa, Glycine max
  peptide (1)..(259): Ceres Seq. ID no. 15177070
  misc_feature (31)..(250): Homolog of NCBI NO: 25282409 NR Description: Yip1p-interacting factor
  misc_feature (3)..(250): Homolog of NCBI NO: 28277968 NR Description: Similar to Yip1p-interacting factor [Danio rerio]
  misc_feature (1)..(250): Homolog of NCBI NO: 39795597 NR Description: Unknown (protein for MGC:76182) [Silurana
  misc_feature (119)..(253): Homolog of NCBI NO: 10241632 NR Description: putative protein [Oryza sativa (indica
  misc_feature (1)..(253): Homolog of NCBI NO: 38346458 NR Description: OSJNBa0019G23.6 [Oryza sativa (japonica
  misc_feature (1)..(258): Homolog of NCBI NO: 9755388 NR Description: F17F8.24 [Arabidopsis thaliana]
  misc_feature (1)..(258): Homolog of NCBI NO: 18397705 NR Description: expressed protein [Arabidopsis thaliana]
  misc_feature (1)..(259): Homolog of NCBI NO: 33589682 NR Description: At3g59500 [Arabidopsis thaliana]
  misc_feature (1)..(259): Homolog of NCBI NO: 11282553 NR Description: hypothetical protein T16L24.50 - Arabidopsis
  misc_feature (1)..(259): Homolog of NCBI NO: 30695009 NR Description: expressed protein [Arabidopsis thaliana]
MPMPQAVPQPNPFGNAFSGPGSGLIRSGLGAYGEKIFGSSSEYVQSNITRYFSDPQYYFQVNDQYVRNKLKVVLLPFLHRGHWTRISEPVGGRLSYKPPIYDINAPDLYIPLMAFGTYVVLAGLSLGLYGKFSPEALNWLFVKGMVGWFLQVMLLKITLLSLGSGEAPLLDIVAYAGYTFTGLCLAVLGKIIWGYSYYALLPWTCLCSGVFLVKTMKRVLYAEARSSDSSRHHYLLIFVALAQFPLLIWLGNISVNWLF

SEQ ID NO: 52089 - DNA, 965 bp, Glycine max
  misc_feature (1)..(965): Ceres Seq. ID no. 12609130
acacaaagtcacaagctcaacgtcggtcactgttgaggaagctagctagcttgccaggcatccgccatggccgccccgcatggcaccgtgctcgggggagccgactcgttctcccagctcccgctcgtccgagtcgccgcccagcagccggccgactccaccatccgcctcttcggctgcgacttctccaacgacgccgtcgctgccggcgaccagctgcccaaggcggacgccgcggcggcggccggggagggggagacccgcaagttcgagtgccactactgctgccgcaacttcccgacgtcgcaggcgctgggaggacaccagaacgcgcacaagcgggagcggcagcacgcgcgccgggcgcacctcgaggcctccctcgccgccgcctacctcccggccggcgcgcacgtctacggtgccctgttcggcggctatggccaccaccaggccgctccgatgccgccgccgcagtacccggtgtggccggggatgtacggcagcgtggcgcggtccgcggcatacggcggcatgaccgtgccggggatggtgtggaggccgacgccagtgggtgctgatgcttttggtgccgccggccggcacgatgaagcgacggcggccgttgctggcaccggagaggtgcctggtaagggtgggcacaatgcggtgatgagcgtggtggcgacgctgccgtcgtgcctcaccggcgggtcgcccacggagatcggtaggtccgaaatgatggggcagaaggagggcgttgtaagcttggacctctgtctgtagttcgttgcaattactgtcgatctaggtgttatctttaccggaattgttcaggtcaatcaccatgtttagtcttatataattactgttaccatctgtaaccgagggcgttcatttgtttttaaaattagaatgcatattaagttggcatgcatttaatttgaataatgtgtactcct

SEQ ID NO: 52090 - protein, 240 aa, Glycine max
  peptide (1)..(240): Ceres Seq. ID no. 12609131
  misc_feature (68)..(90): Pfam Name: Zinc finger, C2H2 type Pfam Description: Zinc finger, C2H2 type
  misc_feature (66)..(99): Homolog of NCBI NO: 15230939 NR Description: zinc finger-like protein; protein id: At3g58070.1
  misc_feature (66)..(99): Homolog of NCBI NO: 11357220 NR Description: CCHH finger protein T10K17.280 - Arabidopsis
  misc_feature (61)..(109): Homolog of NCBI NO: 15221378 NR Description: putative zinc finger protein; protein id:
  misc_feature (58)..(114): Homolog of NCBI NO: 34895596 NR Description: OSJNBa0083M16.8 [Oryza sativa (japonica
  misc_feature (31)..(147): Homolog of NCBI NO: 15219811 NR Description: zinc finger protein (ZFP6)
  misc_feature (21)..(117): Homolog of NCBI NO: 15240118 NR Description: zinc finger-like protein; protein id: At5g06650.1
  misc_feature (66)..(156): Homolog of NCBI NO: 15227472 NR Description: putative C2H2-type zinc finger protein
  misc_feature (66)..(156): Homolog of NCBI NO: 1362020 NR Description: zinc finger protein 8 - Arabidopsis thaliana
  misc_feature (66)..(156): Homolog of NCBI NO: 790687 NR Description: zinc finger protein
  misc_feature (31)..(208): Homolog of NCBI NO: 18390109 NR Description: putative zinc finger protein [Sorghum bicolor]
MAAPHGTVLGGADSFSQLPLVRVAAQQPADSTIRLFGCDFSNDAVAAGDQLPKADAAAAAGEGETRKFECHYCCRNFPTSQALGGHQNAHKRERQHARRAHLEASLAAAYLPAGAHVYGALFGGYGHHQAAPMPPPQYPVWPGMYGSVARSAAYGGMTVPGMVWRPTPVGADAFGAAGRHDEATAAVAGTGEVPGKGGHNAVMSVVATLPSCLTGGSPTEIGRSEMMGQKEGVVSLDLCL

SEQ ID NO: 52091 - protein, 192 aa, Glycine max
  peptide (1)..(192): Ceres Seq. ID no. 12609132
TKSQAQRRSLLRKLASLPGIRHGRPAWHRARGSRLVLPAPARPSRRPAAGRLHHPPLRLRLLQRRRRCRRPAAQGGRRGGGRGGGDPQVRVPLLLPQLPDVAGAGRTPERAQAGAAARAPGAPRGLPRRRLPPGRRARLRCPVRRLWPPPGRSDAAAAVPGVAGDVRQRGAVRGIRRHDRAGDGVEADASGC

SEQ ID NO: 52092 - protein, 152 aa, Glycine max
  peptide (1)..(152): Ceres Seq. ID no. 12609133
  misc_feature (17)..(135): Pfam Name: Cupin Pfam Description: Cupin
  misc_feature (1)..(126): Homolog of NCBI NO: 32420163 NR Description: predicted protein [Neurospora crassa]
  misc_feature (1)..(124): Homolog of NCBI NO: 31203551 NR Description: ENSANGP00000010257 [Anopheles gambiae]
  misc_feature (1)..(126): Homolog of NCBI NO: 38175466 NR Description: putative high-affinity potassium transporter
  misc_feature (1)..(152): Homolog of NCBI NO: 11360318 NR Description: probable mucin DKFZp434C196.1 - human (fragment)
MAPCSGEPTRSPSSRSSESPPSSRPTPPSASSAATSPTTPSLPATSCPRRTPRRRPGRGRPASSSATTAAATSRRRRRWEDTRTRTSGSGSTRAGRTSRPPSPPPTSRPARTSTVPCSAAMATTRPLRCRRRSTRCGRGCTAAWRGPRHTAA

SEQ ID NO: 52093 - DNA, 699 bp, Glycine max
  misc_feature (1)..(699): Ceres Seq. ID no. 14301998
aaatccttaacagcatccacgatctaagcgtgtgcacgtacgccgcagctccagaaccaggacacgcccactgtatacgcagtcgcacagctcgatcgcaatggcgtcgctcgtcgccgtccagccggtcgccgtgaggggcctggccggcagctccatctccggccgcaagctcgccgtccggccctcctccgccgccgtctcccgctccacccgcagggctcgcggggcggcggtggtggccaagtacggggagaagagcgtctacttcgacctggacgacatcgccaacacgacggggcagtgggacctgtacggcagcgacgccgcgtcgccctacaacggcctgcagagcaagttcttcaacaccttcgccgcgcccttcaccaagcgggggctgctgctcaaggtgctgctgctcggcggcggctcgctgctcgcctacgtcagcgccaccgcctcccccgacctgctccccatcaagaaggggccccagctgccgcccaccccgggaccacgcggcaagatctaaagctctgcaatcaaggccttcttcctcctcccgcctcgcctcgtgcttgtgtaccatggatctcgtcgattccccccttatctatgtgcttgctctgttgatacttgatctttgtactttgtatcagtaattggaaagatgctgcgtgcatggtgcatgcaattatc

SEQ ID NO: 52094 - protein, 143 aa, Glycine max
  peptide (1)..(143): Ceres Seq. ID no. 14301999
  misc_feature (3)..(143): Pfam Name: Photosystem I reaction centre subunit VI Pfam Description: Photosystem I reaction centre subunit VI
  misc_feature (1)..(143): Homolog of NCBI NO: 7443140 NR Description: photosystem I psaH precursor - wood tobacco
  misc_feature (1)..(143): Homolog of NCBI NO: 33520419 NR Description: photosystem I psaH protein [Trifolium pratense]
  misc_feature (1)..(143): Homolog of NCBI NO: 131199 NR Description: Photosystem I reaction center subunit VI,
  misc_feature (1)..(143): Homolog of NCBI NO: 7443138 NR Description: photosystem I protein psaH precursor - wood
  misc_feature (1)..(143): Homolog of NCBI NO: 7443139 NR Description: photosystem I protein psaH precursor - wood
  misc_feature (1)..(143): Homolog of NCBI NO: 3914465 NR Description: Photosystem I reaction center subunit VI,
  misc_feature (1)..(143): Homolog of NCBI NO: 72679 NR Description: photosystem I protein psaH precursor - rice
  misc_feature (1)..(143): Homolog of NCBI NO: 17380533 NR Description: Photosystem I reaction center subunit VI, precursor (PSI-H) (Light-harvesting complex I 11 kDa protein)
  misc_feature (1)..(143): Homolog of NCBI NO: 3885894 NR Description: photosystem-1 H subunit GOS5 [Oryza sativa]
  misc_feature (1)..(143): Homolog of NCBI NO: 131196 NR Description: Photosystem I reaction center subunit VI,
MASLVAVQPVAVRGLAGSSISGRKLAVRPSSAAVSRSTRRARGAAVVAKYGEKSVYFDLDDIANTTGQWDLYGSDAASPYNGLQSKFFNTFAAPFTKRGLLLKVLLLGGGSLLAYVSATASPDLLPIKKGPQLPPTPGPRGKI

SEQ ID NO: 52095 - DNA, 970 bp, Glycine max
  misc_feature (1)..(970): Ceres Seq. ID no. 12609394
acaaacacatttcttcttttaacaacttacaaacacattcttaatataggcaacgatggcagaaactacgcagaggaagagggaggtgtttgcgaccaagaatgaattgtcggtagcattggctaagtacactgctcatctctcggccaagttctgcaaggagaaaggaattttcaccgttgttctctccggctgtggcctcatcgattggctcggcaagttgttggaatcaccatacaaagaatcagtcgaatggtcaaagtggcacgtcttttgggtggacgagagggtctgttcacatgaagatcaaaacagcaactacaaactcgccatggatggttttatctccaaggttgggattccgaaggagaacatctacgcaatcgacaaacaatgtgccgctgatggtgacgcggagcgttgtgcgacgctctacgaggagtgcttgaggaacctggtgaaggaaaagatactcccactatgtccaaatggccaatttcctcagttcgatctccagctccaagggatgggtcctgatggccacatggcgtctctcttcccggaacgtcctcagatcaatgtgacggacaaatgggtcactcacattaccgactccccaaaaccgccaccaaggagaatcacattgactttaccggtcatcaactcgtctttgtacaatcttgtggccgtttgcgacgacaacacagagcaatgtgcacgctccatcgctgatatctttaagcacaacaatctcgccttacctgctgctcatcttactgcccaagtcgaacaaatgtggtaccttgacaaagcagctgcttcattgctttagagagctaaacacattaataaatggtgtcctttatatgaataataaaataatctctccaagtcatgctttgtggagcgtgttgttggagtttgcttgcttgcatgtgtgtcgaataaccggctaataatgcattttgcg

SEQ ID NO: 52096 - protein, 258 aa, Glycine max
  peptide (1)..(258): Ceres Seq. ID no. 12609395
  misc_feature (3)..(258): Homolog of NCBI NO: 28140256 NR Description: putative 6-phosphogluconolactonase [Elaeis
  misc_feature (6)..(258): Homolog of NCBI NO: 18420789 NR Description: 6-phosphogluconolactonase-like protein
  misc_feature (6)..(258): Homolog of NCBI NO: 10177901 NR Description: 6-phosphogluconolactonase-like protein
  misc_feature (6)..(258): Homolog of NCBI NO: 21554291 NR Description: 6-phosphogluconolactonase-like protein
  misc_feature (8)..(258): Homolog of NCBI NO: 21536675 NR Description: 6-phosphogluconolactonase-like protein
  misc_feature (8)..(258): Homolog of NCBI NO: 15229127 NR Description: 6-phosphogluconolactonase - like protein
  misc_feature (1)..(256): Homolog of NCBI NO: 15238523 NR Description: 6-phosphogluconolactonase-like protein; protein
  misc_feature (6)..(258): Homolog of NCBI NO: 15238526 NR Description: 6-phosphogluconolactonase-like protein
  misc_feature (6)..(258): Homolog of NCBI NO: 21537412 NR Description: 6-phosphogluconolactonase-like protein
  misc_feature (1)..(258): Homolog of NCBI NO: 14009294 NR Description: putative 6-phosphogluconolactonase [Brassica
MAETTQRKREVFATKNELSVALAKYTAHLSAKFCKEKGIFTVVLSGCGLIDWLGKLLESPYKESVEWSKWHVFWVDERVCSHEDQNSNYKLAMDGFISKVGIPKENIYAIDKQCAADGDAERCATLYEECLRNLVKEKILPLCPNGQFPQFDLQLQGMGPDGHMASLFPERPQINVTDKWVTHITDSPKPPPRRITLTLPVINSSLYNLVAVCDDNTEQCARSIADIFKHNNLALPAAHLTAQVEQMWYLDKAAASLL

SEQ ID NO: 52097 - protein, 166 aa, Glycine max
  peptide (1)..(166): Ceres Seq. ID no. 12609396
  misc_feature (1)..(166): Homolog of NCBI NO: 28140256 NR Description: putative 6-phosphogluconolactonase [Elaeis
  misc_feature (1)..(166): Homolog of NCBI NO: 18420789 NR Description: 6-phosphogluconolactonase-like protein
  misc_feature (1)..(166): Homolog of NCBI NO: 10177901 NR Description: 6-phosphogluconolactonase-like protein
  misc_feature (1)..(166): Homolog of NCBI NO: 21554291 NR Description: 6-phosphogluconolactonase-like protein
  misc_feature (1)..(166): Homolog of NCBI NO: 21536675 NR Description: 6-phosphogluconolactonase-like protein
  misc_feature (1)..(166): Homolog of NCBI NO: 15229127 NR Description: 6-phosphogluconolactonase - like protein
  misc_feature (1)..(164): Homolog of NCBI NO: 15238523 NR Description: 6-phosphogluconolactonase-like protein; protein
  misc_feature (1)..(166): Homolog of NCBI NO: 15238526 NR Description: 6-phosphogluconolactonase-like protein
  misc_feature (1)..(166): Homolog of NCBI NO: 21537412 NR Description: 6-phosphogluconolactonase-like protein
  misc_feature (1)..(166): Homolog of NCBI NO: 14009294 NR Description: putative 6-phosphogluconolactonase [Brassica
MDGFISKVGIPKENIYAIDKQCAADGDAERCATLYEECLRNLVKEKILPLCPNGQFPQFDLQLQGMGPDGHMASLFPERPQINVTDKWVTHITDSPKPPPRRITLTLPVINSSLYNLVAVCDDNTEQCARSIADIFKHNNLALPAAHLTAQVEQMWYLDKAAASLL

SEQ ID NO: 52098 - DNA, 877 bp, Glycine max
  misc_feature (1)..(877): Ceres Seq. ID no. 13594696
attcattcattctctcacagccatcgatccatctaaactaggtggagcagtacatacacaacaaagcaaggcataatggcctcaggagtgtttggtacccccatttcggagaagacggtgctagccactggagagtataaggaaccaattactcaaaaggatgttgcagactataccatgaagatgatcaacgccggtggtaaagatattaacgcacaaaccttcgtcgacaacctcaaggagaggtacggtaacggaatatctgtaaaatgcctcatctacaatgccaccggtgccactttgaacttggctaactacaaagattggcacggccatatctacgatacaccctacccatcagatattcagaatgggcaatggggggcatttctccacgtccacccaagtggtgctgcggttggttcagctggtgccgttgtgtatcgtaccaaggtcccctccagcaggagctcctgcgattggttgttctcctggaccgtcccctacattggtgccaatgggatctacaccgaaatccgtgaggaagggcactatccaagtgtgggaagctgggattatatctatgatgtgaagctggaaaatgcagatctcaactctactgataaaaactatggatatgtttccaagactaacatcggtgaaggctctaccatgaacgcccgtggagttttccagtttccctactagatctctttgcgagcatcgaggggttattgtggtcttcaaagtcttttgtggcgaggacgtttggagatattattttcctttactgtctttgtggtgcatttcctaatattcggtgttcatgaataatcaaggaagaagacaataaaagagatgtaatgtgcaattttat

SEQ ID NO: 52099 - protein, 210 aa, Glycine max
  peptide (1)..(210): Ceres Seq. ID no. 13594697
  misc_feature (27)..(202): Homolog of NCBI NO: 38347187 NR Description: OSJNBa0024J22.15 [Oryza sativa (japonica
  misc_feature (25)..(199): Homolog of NCBI NO: 38567934 NR Description: OSJNBa0033H08.11 [Oryza sativa (japonica
  misc_feature (6)..(199): Homolog of NCBI NO: 38347186 NR Description: OSJNBa0024J22.14 [Oryza sativa (japonica
  misc_feature (1)..(149): Homolog of NCBI NO: 7489427 NR Description: probable jasmonate-induced protein 1 - barley
  misc_feature (1)..(210): Homolog of NCBI NO: 400094 NR Description: 23 KD JASMONATE-INDUCED PROTEIN
MASGVFGTPISEKTVLATGEYKEPITQKDVADYTMKMINAGGKDINAQTFVDNLKERYGNGISVKCLIYNATGATLNLANYKDWHGHIYDTPYPSDIQNGQWGAFLHVHPSGAAVGSAGAVVYRTKVPSSRSSCDWLFSWTVPYIGANGIYTEIREEGHYPSVGSWDYIYDVKLENADLNSTDKNYGYVSKTNIGEGSTMNARGVFQFPY

SEQ ID NO: 52100 - protein, 176 aa, Glycine max
  peptide (1)..(176): Ceres Seq. ID no. 13594698
  misc_feature (1)..(168): Homolog of NCBI NO: 38347187 NR Description: OSJNBa0024J22.15 [Oryza sativa (japonica
  misc_feature (1)..(165): Homolog of NCBI NO: 38567934 NR Description: OSJNBa0033H08.11 [Oryza sativa (japonica
  misc_feature (1)..(165): Homolog of NCBI NO: 38347186 NR Description: OSJNBa0024J22.14 [Oryza sativa (japonica
  misc_feature (1)..(115): Homolog of NCBI NO: 7489427 NR Description: probable jasmonate-induced protein 1 - barley
  misc_feature (1)..(176): Homolog of NCBI NO: 400094 NR Description: 23 KD JASMONATE-INDUCED PROTEIN
MKMINAGGKDINAQTFVDNLKERYGNGISVKCLIYNATGATLNLANYKDWHGHIYDTPYPSDIQNGQWGAFLHVHPSGAAVGSAGAVVYRTKVPSSRSSCDWLFSWTVPYIGANGIYTEIREEGHYPSVGSWDYIYDVKLENADLNSTDKNYGYVSKTNIGEGSTMNARGVFQFPY

SEQ ID NO: 52101 - protein, 174 aa, Glycine max
  peptide (1)..(174): Ceres Seq. ID no. 13594699
  misc_feature (1)..(166): Homolog of NCBI NO: 38347187 NR Description: OSJNBa0024J22.15 [Oryza sativa (japonica
  misc_feature (1)..(163): Homolog of NCBI NO: 38567934 NR Description: OSJNBa0033H08.11 [Oryza sativa (japonica
  misc_feature (1)..(163): Homolog of NCBI NO: 38347186 NR Description: OSJNBa0024J22.14 [Oryza sativa (japonica
  misc_feature (1)..(113): Homolog of NCBI NO: 7489427 NR Description: probable jasmonate-induced protein 1 - barley
  misc_feature (1)..(174): Homolog of NCBI NO: 400094 NR Description: 23 KD JASMONATE-INDUCED PROTEIN
MINAGGKDINAQTFVDNLKERYGNGISVKCLIYNATGATLNLANYKDWHGHIYDTPYPSDIQNGQWGAFLHVHPSGAAVGSAGAVVYRTKVPSSRSSCDWLFSWTVPYIGANGIYTEIREEGHYPSVGSWDYIYDVKLENADLNSTDKNYGYVSKTNIGEGSTMNARGVFQFPY

SEQ ID NO: 52102 - DNA, 1072 bp, Glycine max
  misc_feature (1)..(1072): Ceres Seq. ID no. 15172803
gatccacttcccccacttccgccgcctcccaccgaatgggccgcaagaggagggctagggtttcctgcgacagcgacggcgacgacgtcgagatgaacggcgatgagcccgcccccgccgccgcggagagcaagagcctctacgagatattaggggttgagagcacagcttcacaacaggagataaaaaaggcatatcacaagttggccttgcgtcttcacccagataagaatcctggagatgaggaagccaacgaaaaatttcagcagctgcagaaggtgatatctattcttggagaccaggagaaaagggcattgtatgatgagactggaattactgatgatgatgcactggttggagaagctgcagacaatctccaagcgtacttcagaacagtgtacagaaaggtcacagaggctgacattgaagaatttgaagctaagtacagagggtcagactctgagaaaaaggatttaaaggaactgtacacaaaatttaagggcaacatgaacagacttttctgctctatgatttgctcagatgccaagcttgattctcaccgcttcaaagatataattgatcaggcaattgctgaaggcgagctgaagtccaccaaagtgtatgcgaagtgggctaaaaagatttctgagatagaaccacccacaaacccattggagaggagagtgaagaaaaagaagagccaggagagcgacctcatcctggcgatctcgcagcgcagggaacagaggaaggagcggtttgactctgttctgtcatctataatgtccaagtgtgacgacaacaaggcgggcagctcagagcccacggaggaggagtttgagcgcgctcggcagaggcttgagaagaagcgcaccaaggggcgcaaatgatatgaatcttgacatgcatgcgcaaatgatatgaatcttgacatgcatgcaggcccttcgagaaaaaaatgggtgttgagtggactggagtggaggggttgtgtcgcaactctagtgtcgctttgttttatgagtgggcgtgtgtaagtaactgaatgcaagtgtggtgtggttttagatgt

SEQ ID NO: 52103 - protein, 295 aa, Glycine max
  peptide (1)..(295): Ceres Seq. ID no. 15172804
  misc_feature (45)..(110): Pfam Name: DnaJ domain Pfam Description: DnaJ domain
  misc_feature (46)..(278): Homolog of NCBI NO: 23956266 NR Description: DnaJ homolog, subfamily C, member 9 [Mus
  misc_feature (43)..(290): Homolog of NCBI NO: 31210751 NR Description: ENSANGP00000013114 [Anopheles gambiae]
  misc_feature (46)..(278): Homolog of NCBI NO: 34868976 NR Description: similar to J domain of DnaJ-like-protein 1 - rat
  misc_feature (46)..(273): Homolog of NCBI NO: 27597059 NR Description: DnaJ homolog, subfamily C, member 9; DnaJ protein
  misc_feature (43)..(273): Homolog of NCBI NO: 39794528 NR Description: Unknown (protein for MGC:76175) [Silurana
  misc_feature (46)..(294): Homolog of NCBI NO: 32398706 NR Description: DNAJ protein-like, possible [Cryptosporidium
  misc_feature (41)..(183): Homolog of NCBI NO: 12322012 NR Description: DnaJ protein, putative, 3' partial; 1110-1
  misc_feature (41)..(295): Homolog of NCBI NO: 15230424 NR Description: DnaJ protein family [Arabidopsis thaliana]
  misc_feature (12)..(295): Homolog of NCBI NO: 2689720 NR Description: DnaJ homologue [Arabidopsis thaliana]
  misc_feature (12)..(295): Homolog of NCBI NO: 15240212 NR Description: DnaJ protein family [Arabidopsis thaliana]
STSPTSAASHRMGRKRRARVSCDSDGDDVEMNGDEPAPAAAESKSLYEILGVESTASQQEIKKAYHKLALRLHPDKNPGDEEANEKFQQLQKVISILGDQEKRALYDETGITDDDALVGEAADNLQAYFRTVYRKVTEADIEEFEAKYRGSDSEKKDLKELYTKFKGNMNRLFCSMICSDAKLDSHRFKDIIDQAIAEGELKSTKVYAKWAKKISEIEPPTNPLERRVKKKKSQESDLILAISQRREQRKERFDSVLSSIMSKCDDNKAGSSEPTEEEFERARQRLEKKRTKGRK

SEQ ID NO: 52104 - protein, 284 aa, Glycine max
  peptide (1)..(284): Ceres Seq. ID no. 15172805
  misc_feature (34)..(99): Pfam Name: DnaJ domain Pfam Description: DnaJ domain
  misc_feature (35)..(267): Homolog of NCBI NO: 23956266 NR Description: DnaJ homolog, subfamily C, member 9 [Mus
  misc_feature (32)..(279): Homolog of NCBI NO: 31210751 NR Description: ENSANGP00000013114 [Anopheles gambiae]
  misc_feature (35)..(267): Homolog of NCBI NO: 34868976 NR Description: similar to J domain of DnaJ-like-protein 1 - rat
  misc_feature (35)..(262): Homolog of NCBI NO: 27597059 NR Description: DnaJ homolog, subfamily C, member 9; DnaJ protein
  misc_feature (32)..(262): Homolog of NCBI NO: 39794528 NR Description: Unknown (protein for MGC:76175) [Silurana
  misc_feature (35)..(283): Homolog of NCBI NO: 32398706 NR Description: DNAJ protein-like, possible [Cryptosporidium
  misc_feature (30)..(172): Homolog of NCBI NO: 12322012 NR Description: DnaJ protein, putative, 3' partial; 1110-1
  misc_feature (30)..(284): Homolog of NCBI NO: 15230424 NR Description: DnaJ protein family [Arabidopsis thaliana]
  misc_feature (1)..(284): Homolog of NCBI NO: 2689720 NR Description: DnaJ homologue [Arabidopsis thaliana]
  misc_feature (1)..(284): Homolog of NCBI NO: 15240212 NR Description: DnaJ protein family [Arabidopsis thaliana]
MGRKRRARVSCDSDGDDVEMNGDEPAPAAAESKSLYEILGVESTASQQEIKKAYHKLALRLHPDKNPGDEEANEKFQQLQKVISILGDQEKRALYDETGITDDDALVGEAADNLQAYFRTVYRKVTEADIEEFEAKYRGSDSEKKDLKELYTKFKGNMNRLFCSMICSDAKLDSHRFKDIIDQAIAEGELKSTKVYAKWAKKISEIEPPTNPLERRVKKKKSQESDLILAISQRREQRKERFDSVLSSIMSKCDDNKAGSSEPTEEEFERARQRLEKKRTKGRK

SEQ ID NO: 52105 - protein, 265 aa, Glycine max
  peptide (1)..(265): Ceres Seq. ID no. 15172806
  misc_feature (15)..(80): Pfam Name: DnaJ domain Pfam Description: DnaJ domain
  misc_feature (16)..(248): Homolog of NCBI NO: 23956266 NR Description: DnaJ homolog, subfamily C, member 9 [Mus
  misc_feature (13)..(260): Homolog of NCBI NO: 31210751 NR Description: ENSANGP00000013114 [Anopheles gambiae]
  misc_feature (16)..(248): Homolog of NCBI NO: 34868976 NR Description: similar to J domain of DnaJ-like-protein 1 - rat
  misc_feature (16)..(243): Homolog of NCBI NO: 27597059 NR Description: DnaJ homolog, subfamily C, member 9; DnaJ protein
  misc_feature (13)..(243): Homolog of NCBI NO: 39794528 NR Description: Unknown (protein for MGC:76175) [Silurana
  misc_feature (16)..(264): Homolog of NCBI NO: 32398706 NR Description: DNAJ protein-like, possible [Cryptosporidium
  misc_feature (11)..(153): Homolog of NCBI NO: 12322012 NR Description: DnaJ protein, putative, 3' partial; 1110-1
  misc_feature (11)..(265): Homolog of NCBI NO: 15230424 NR Description: DnaJ protein family [Arabidopsis thaliana]
  misc_feature (1)..(265): Homolog of NCBI NO: 2689720 NR Description: DnaJ homologue [Arabidopsis thaliana]
  misc_feature (1)..(265): Homolog of NCBI NO: 15240212 NR Description: DnaJ protein family [Arabidopsis thaliana]
MNGDEPAPAAAESKSLYEILGVESTASQQEIKKAYHKLALRLHPDKNPGDEEANEKFQQLQKVISILGDQEKRALYDETGITDDDALVGEAADNLQAYFRTVYRKVTEADIEEFEAKYRGSDSEKKDLKELYTKFKGNMNRLFCSMICSDAKLDSHRFKDIIDQAIAEGELKSTKVYAKWAKKISEIEPPTNPLERRVKKKKSQESDLILAISQRREQRKERFDSVLSSIMSKCDDNKAGSSEPTEEEFERARQRLEKKRTKGRK

SEQ ID NO: 52106 - DNA, 1109 bp, Glycine max
  misc_feature (1)..(1109): Ceres Seq. ID no. 13594604
agttaggtcaactattaggcatgggctcgtccttgtcgaatctcaacgacggggagacgaatgattcctccatggggcctagcctcggcgatataccggaaagctgcatcgccgccgtgttcatgtacctgactcccccggagatttgcaacctcgccggtcttaaccgttcgtttcgcggcgcggcttcgtcggatttcgtctgggagaagaagctcccgccgaattaccaggatctgctcgatttgttgccgccggagagggttcttggtctctcgaagaaggatatcttcgctgtgctctctcgtcctatccccttcgacggtgataacaaggagctgtggattgatagagttacgggacgggtttgtatggcgatttctgcgaggggaatggctattactgggattgaagaccggagatattggaattggattccgaccaatgagtccaggttccatgttgtagcctacttacagcagatttggtggtttgaagtcgatgggacagtgacattccatctcccaccgggtatctactctctatcattcagaatccatctaggcggattcgcaaagaagtcggggagacgtgtgtgcaactacgaacacactcacggctgggatttgaagcctgttaggttttcgctttcgacttctgatggtcaagaggcatcatgtgagtattacttggatgatgtaaagagagaagaatcaaccgggcaccacaagcgcggtttctggatcgattataaggttggggagttcgtagtgactggatcagaaccatctactgagatcaaatggtccatgaaacagattgactgcacccactcgaaaggcgggctatgtgttgattcagtcttcattaacccaattggtgatttgaaagattacagaacgaaatctttttgtgaaatagattgaagaaagaagattcttttgaaggtaattttcattttattgttgtgcatttcatggagttgagttttgtttttttttacttcatactcgtttttgctacatagtttaggcgagaggactctctttgtgcattttcacatgtttataagtttggatgactatgatgtatccaaccaaagttaatct

SEQ ID NO: 52107 - protein, 307 aa, Glycine max
  peptide (1)..(307): Ceres Seq. ID no. 13594605
  misc_feature (106)..(297): Homolog of NCBI NO: 27754673 NR Description: unknown protein [Arabidopsis thaliana]
  misc_feature (7)..(301): Homolog of NCBI NO: 15242282 NR Description: F-box protein (SKP1 interacting partner
  misc_feature (5)..(297): Homolog of NCBI NO: 15221677 NR Description: F-box protein (SKP1 interacting partner
  misc_feature (7)..(303): Homolog of NCBI NO: 15222051 NR Description: F-box protein (SKP1 interacting partner
  misc_feature (28)..(291): Homolog of NCBI NO: 23397334 NR Description: unknown protein [Arabidopsis thaliana]
  misc_feature (31)..(82): Homolog of NCBI NO: 38567911 NR Description: OSJNBa0088I22.7 [Oryza sativa (japonica
  misc_feature (93)..(293): Homolog of NCBI NO: 38567911 NR Description: OSJNBa0088I22.7 [Oryza sativa (japonica
  misc_feature (7)..(291): Homolog of NCBI NO: 30695337 NR Description: F-box protein (lectin-related) [Arabidopsis
  misc_feature (4)..(302): Homolog of NCBI NO: 37536186 NR Description: unknown protein [Oryza sativa (japonica
  misc_feature (7)..(302): Homolog of NCBI NO: 15231726 NR Description: F-box protein (SKP1 interacting partner
LGQLLGMGSSLSNLNDGETNDSSMGPSLGDIPESCIAAVFMYLTPPEICNLAGLNRSFRGAASSDFVWEKKLPPNYQDLLDLLPPERVLGLSKKDIFAVLSRPIPFDGDNKELWIDRVTGRVCMAISARGMAITGIEDRRYWNWIPTNESRFHVVAYLQQIWWFEVDGTVTFHLPPGIYSLSFRIHLGGFAKKSGRRVCNYEHTHGWDLKPVRFSLSTSDGQEASCEYYLDDVKREESTGHHKRGFWIDYKVGEFVVTGSEPSTEIKWSMKQIDCTHSKGGLCVDSVFINPIGDLKDYRTKSFCEID

SEQ ID NO: 52108 - protein, 301 aa, Glycine max
  peptide (1)..(301): Ceres Seq. ID no. 13594606
  misc_feature (100)..(291): Homolog of NCBI NO: 27754673 NR Description: unknown protein [Arabidopsis thaliana]
  misc_feature (1)..(295): Homolog of NCBI NO: 15242282 NR Description: F-box protein (SKP1 interacting partner
  misc_feature (1)..(291): Homolog of NCBI NO: 15221677 NR Description: F-box protein (SKP1 interacting partner
  misc_feature (1)..(297): Homolog of NCBI NO: 15222051 NR Description: F-box protein (SKP1 interacting partner
  misc_feature (22)..(285): Homolog of NCBI NO: 23397334 NR Description: unknown protein [Arabidopsis thaliana]
  misc_feature (25)..(76): Homolog of NCBI NO: 38567911 NR Description: OSJNBa0088I22.7 [Oryza sativa (japonica
  misc_feature (87)..(287): Homolog of NCBI NO: 38567911 NR Description: OSJNBa0088I22.7 [Oryza sativa (japonica
  misc_feature (1)..(285): Homolog of NCBI NO: 30695337 NR Description: F-box protein (lectin-related) [Arabidopsis
  misc_feature (1)..(296): Homolog of NCBI NO: 37536186 NR Description: unknown protein [Oryza sativa (japonica
  misc_feature (1)..(296): Homolog of NCBI NO: 15231726 NR Description: F-box protein (SKP1 interacting partner
MGSSLSNLNDGETNDSSMGPSLGDIPESCIAAVFMYLTPPEICNLAGLNRSFRGAASSDFVWEKKLPPNYQDLLDLLPPERVLGLSKKDIFAVLSRPIPFDGDNKELWIDRVTGRVCMAISARGMAITGIEDRRYWNWIPTNESRFHVVAYLQQIWWFEVDGTVTFHLPPGIYSLSFRIHLGGFAKKSGRRVCNYEHTHGWDLKPVRFSLSTSDGQEASCEYYLDDVKREESTGHHKRGFWIDYKVGEFVVTGSEPSTEIKWSMKQIDCTHSKGGLCVDSVFINPIGDLKDYRTKSFCEID

SEQ ID NO: 52109 - protein, 284 aa, Glycine max
  peptide (1)..(284): Ceres Seq. ID no. 13594607
  misc_feature (83)..(274): Homolog of NCBI NO: 27754673 NR Description: unknown protein [Arabidopsis thaliana]
  misc_feature (1)..(278): Homolog of NCBI NO: 15242282 NR Description: F-box protein (SKP1 interacting partner
  misc_feature (1)..(274): Homolog of NCBI NO: 15221677 NR Description: F-box protein (SKP1 interacting partner
  misc_feature (1)..(280): Homolog of NCBI NO: 15222051 NR Description: F-box protein (SKP1 interacting partner
  misc_feature (5)..(268): Homolog of NCBI NO: 23397334 NR Description: unknown protein [Arabidopsis thaliana]
  misc_feature (8)..(59): Homolog of NCBI NO: 38567911 NR Description: OSJNBa0088I22.7 [Oryza sativa (japonica
  misc_feature (70)..(270): Homolog of NCBI NO: 38567911 NR Description: OSJNBa0088I22.7 [Oryza sativa (japonica
  misc_feature (1)..(268): Homolog of NCBI NO: 30695337 NR Description: F-box protein (lectin-related) [Arabidopsis
  misc_feature (1)..(279): Homolog of NCBI NO: 37536186 NR Description: unknown protein [Oryza sativa (japonica
  misc_feature (1)..(279): Homolog of NCBI NO: 15231726 NR Description: F-box protein (SKP1 interacting partner
MGPSLGDIPESCIAAVFMYLTPPEICNLAGLNRSFRGAASSDFVWEKKLPPNYQDLLDLLPPERVLGLSKKDIFAVLSRPIPFDGDNKELWIDRVTGRVCMAISARGMAITGIEDRRYWNWIPTNESRFHVVAYLQQIWWFEVDGTVTFHLPPGIYSLSFRIHLGGFAKKSGRRVCNYEHTHGWDLKPVRFSLSTSDGQEASCEYYLDDVKREESTGHHKRGFWIDYKVGEFVVTGSEPSTEIKWSMKQIDCTHSKGGLCVDSVFINPIGDLKDYRTKSFCEID

SEQ ID NO: 52110 - DNA, 849 bp, Glycine max
  misc_feature (1)..(849): Ceres Seq. ID no. 13638609
acccacactgatagcaacaaacatccacctaaaatgaagctgcacgtagccttcttcctcctggtagccatggccgcgacggcccgggccgtgacgttcgacgcgtcgaacacggcgtcgggcaccaccggcggcaagcgcttcgacaacgccgtcggcctcgcgtactcaaagcaggtcctctccgacgcctccaccttcatctggagcaccttcaaccagcgcgccgctgccgaccgcaagcccgtcgacgcggtcaccctcgtcgtggaggacatcgacggcgtcgccttcaccagcggcaacggcatccacctcagcgctagctacgtcggcggctacacctccggcgacgtcaagaaggaggtgaccggcgtgctgtaccacgaggcgacgcacgtgtggcagtggaacgggcagggcgcggcgaacggcggcctcatcgaggggatcgccgactacgtgcggctcaaggccgggctcgcgcctgggcactggaggccgcgggggagcggcagccggtgggatgaggggtacgacatcacggcgaggttcctcgactactgcgactcgctcaagcctgggttcgtcgcgcagctcaacgccaagatgaagagcgggtacagcgacgacttcttcgcgcagattctcggcaagaacgtgcagcagctgtggcaggactacaaagccaagttcggaggctgaatgggcttttgccttttagtcatctctcttgcacggtgtgatggcatagcaccctatacatattgaaataatcaacaagacatgtgctttacgttgtaatgaaatttaaataaaggattttgctaattcgaattgacgcgattg

SEQ ID NO: 52111 - protein, 234 aa, Glycine max
  peptide (1)..(234): Ceres Seq. ID no. 13638610
  misc_feature (16)..(234): Pfam Name: Plant Basic Secretory Protein Pfam Description: Plant Basic Secretory Protein
  misc_feature (12)..(233): Homolog of NCBI NO: 37535610 NR Description: putative basic secretory protein
  misc_feature (17)..(232): Homolog of NCBI NO: 14329814 NR Description: putative NtPRp27-like protein [Atropa belladonna]
  misc_feature (11)..(232): Homolog of NCBI NO: 7489380 NR Description: hypothetical protein pBH6-12 - barley
  misc_feature (17)..(233): Homolog of NCBI NO: 27803890 NR Description: NtPRp27-like protein [Solanum tuberosum]
  misc_feature (11)..(232): Homolog of NCBI NO: 5360263 NR Description: NtPRp27 [Nicotiana tabacum]
  misc_feature (9)..(233): Homolog of NCBI NO: 37535606 NR Description: putative secretory protein
  misc_feature (49)..(234): Homolog of NCBI NO: 37535608 NR Description: putative secretory protein
  misc_feature (20)..(232): Homolog of NCBI NO: 7489663 NR Description: benzothiadiazole-induced protein (clone WCI-5) -
  misc_feature (12)..(234): Homolog of NCBI NO: 5669008 NR Description: secretory protein [Triticum aestivum]
  misc_feature (16)..(234): Homolog of NCBI NO: 7489381 NR Description: hypothetical protein pBH6-17 - barley
THTDSNKHPPKMKLHVAFFLLVAMAATARAVTFDASNTASGTTGGKRFDNAVGLAYSKQVLSDASTFIWSTFNQRAAADRKPVDAVTLVVEDIDGVAFTSGNGIHLSASYVGGYTSGDVKKEVTGVLYHEATHVWQWNGQGAANGGLIEGIADYVRLKAGLAPGHWRPRGSGSRWDEGYDITARFLDYCDSLKPGFVAQLNAKMKSGYSDDFFAQILGKNVQQLWQDYKAKFGG

SEQ ID NO: 52112 - protein, 223 aa, Glycine max
  peptide (1)..(223): Ceres Seq. ID no. 13638611
  misc_feature (5)..(223): Pfam Name: Plant Basic Secretory Protein Pfam Description: Plant Basic Secretory Protein
  misc_feature (1)..(222): Homolog of NCBI NO: 37535610 NR Description: putative basic secretory protein
  misc_feature (6)..(221): Homolog of NCBI NO: 14329814 NR Description: putative NtPRp27-like protein [Atropa belladonna]
  misc_feature (1)..(221): Homolog of NCBI NO: 7489380 NR Description: hypothetical protein pBH6-12 - barley
  misc_feature (6)..(222): Homolog of NCBI NO: 27803890 NR Description: NtPRp27-like protein [Solanum tuberosum]
  misc_feature (1)..(221): Homolog of NCBI NO: 5360263 NR Description: NtPRp27 [Nicotiana tabacum]
  misc_feature (1)..(222): Homolog of NCBI NO: 37535606 NR Description: putative secretory protein
  misc_feature (38)..(223): Homolog of NCBI NO: 37535608 NR Description: putative secretory protein
  misc_feature (9)..(221): Homolog of NCBI NO: 7489663 NR Description: benzothiadiazole-induced protein (clone WCI-5) -
  misc_feature (1)..(223): Homolog of NCBI NO: 5669008 NR Description: secretory protein [Triticum aestivum]
  misc_feature (5)..(223): Homolog of NCBI NO: 7489381 NR Description: hypothetical protein pBH6-17 - barley
MKLHVAFFLLVAMAATARAVTFDASNTASGTTGGKRFDNAVGLAYSKQVLSDASTFIWSTFNQRAAADRKPVDAVTLVVEDIDGVAFTSGNGIHLSASYVGGYTSGDVKKEVTGVLYHEATHVWQWNGQGAANGGLIEGIADYVRLKAGLAPGHWRPRGSGSRWDEGYDITARFLDYCDSLKPGFVAQLNAKMKSGYSDDFFAQILGKNVQQLWQDYKAKFGG

SEQ ID NO: 52113 - protein, 211 aa, Glycine max
  peptide (1)..(211): Ceres Seq. ID no. 13638612
  misc_feature (1)..(211): Pfam Name: Plant Basic Secretory Protein Pfam Description: Plant Basic Secretory Protein
  misc_feature (1)..(210): Homolog of NCBI NO: 37535610 NR Description: putative basic secretory protein
  misc_feature (1)..(209): Homolog of NCBI NO: 14329814 NR Description: putative NtPRp27-like protein [Atropa belladonna]
  misc_feature (1)..(209): Homolog of NCBI NO: 7489380 NR Description: hypothetical protein pBH6-12 - barley
  misc_feature (1)..(210): Homolog of NCBI NO: 27803890 NR Description: NtPRp27-like protein [Solanum tuberosum]
  misc_feature (1)..(209): Homolog of NCBI NO: 5360263 NR Description: NtPRp27 [Nicotiana tabacum]
  misc_feature (1)..(210): Homolog of NCBI NO: 37535606 NR Description: putative secretory protein
  misc_feature (26)..(211): Homolog of NCBI NO: 37535608 NR Description: putative secretory protein
  misc_feature (1)..(209): Homolog of NCBI NO: 7489663 NR Description: benzothiadiazole-induced protein (clone WCI-5) -
  misc_feature (1)..(211): Homolog of NCBI NO: 5669008 NR Description: secretory protein [Triticum aestivum]
  misc_feature (1)..(211): Homolog of NCBI NO: 7489381 NR Description: hypothetical protein pBH6-17 - barley
MAATARAVTFDASNTASGTTGGKRFDNAVGLAYSKQVLSDASTFIWSTFNQRAAADRKPVDAVTLVVEDIDGVAFTSGNGIHLSASYVGGYTSGDVKKEVTGVLYHEATHVWQWNGQGAANGGLIEGIADYVRLKAGLAPGHWRPRGSGSRWDEGYDITARFLDYCDSLKPGFVAQLNAKMKSGYSDDFFAQILGKNVQQLWQDYKAKFGG

SEQ ID NO: 52114 - DNA, 941 bp, Glycine max
  misc_feature (1)..(941): Ceres Seq. ID no. 13594748
catcccgtcatccaccacagcttagcagcagcaacaaccagtgtctaagacactctccatcaacaaactctagctgatcactcctagctaagctttgcatagcaagcaatggggtactccaaaaccctagcggctggcctgtttgccacgctgctcctagctccagtcgtcctggctaccgaccctgaccctctccaggacttctgtgtcgccgacctcgacggcaaggcggtctcggtgaacgggcatccgtgcaagcccatgtcgaaggccggcgatgacttcctcttctcgtccaagctggccaaggctggcaacacgtcgaccccgaacggctcggccgtgacggagcttgacgtggctgagtggcctggaacgaacacgttgggcgtgtcgatgaaccgcgtggacttcgctccaggaggcaccaacccgccgcacatccacccccgtgccaccgagatcggcatcgtgatgaaaggtgagctcctcgtgggaatcctcggcagcctcgactccgggaacaagctttactcgagggtggtgcgcgctggagagacgttcctcatcccacggggcctcatgcacttgcagttcaacgtcggtaagaccgaggcatccatggtagtctccttcaacagccagaaccccggtatcgtcttcgtgccattgacactcttcagctccaacccacccatcccgacgccggtcctcaccaaggcgcttcgggtggaggccggggtcgtggaacttctcaagtccaagttcgccgatgggttttaattatgggagccttccctgaaatgagcaatatgtaattcaatatatgcatgctagaaaattttaataattctcagcagaagacttgtattcaagtttcaggttaatctcgcatgcagttgtaataagattggagaagttagcctcctggtttagcctcc

SEQ ID NO: 52115 - protein, 224 aa, Glycine max
  peptide (1)..(224): Ceres Seq. ID no. 13594749
  misc_feature (63)..(214): Pfam Name: Cupin Pfam Description: Cupin
  misc_feature (1)..(210): Homolog of NCBI NO: 7447342 NR Description: germin homolog Ger1 - wheat
  misc_feature (1)..(224): Homolog of NCBI NO: 21912430 NR Description: oxalate oxidase 4 [Lolium perenne]
  misc_feature (1)..(223): Homolog of NCBI NO: 121131 NR Description: Oxalate oxidase GF-3.8 precursor (Germin GF-3.8)
  misc_feature (1)..(224): Homolog of NCBI NO: 21912428 NR Description: oxalate oxidase 2 [Lolium perenne]
  misc_feature (1)..(224): Homolog of NCBI NO: 22138786 NR Description: oxalate oxidase [Lolium perenne]
  misc_feature (1)..(223): Homolog of NCBI NO: 7447343 NR Description: germin homolog Ger3 - wheat
  misc_feature (1)..(223): Homolog of NCBI NO: 2266668 NR Description: oxalate oxidase [Hordeum vulgare]
  misc_feature (1)..(224): Homolog of NCBI NO: 11967814 NR Description: oxalate oxidase [Lolium perenne]
  misc_feature (1)..(224): Homolog of NCBI NO: 121129 NR Description: Oxalate oxidase GF-2.8 precursor (Germin GF-2.8)
  misc_feature (1)..(224): Homolog of NCBI NO: 1171937 NR Description: Oxalate oxidase 2 precursor (Germin)
MGYSKTLAAGLFATLLLAPVVLATDPDPLQDFCVADLDGKAVSVNGHPCKPMSKAGDDFLFSSKLAKAGNTSTPNGSAVTELDVAEWPGTNTLGVSMNRVDFAPGGTNPPHIHPRATEIGIVMKGELLVGILGSLDSGNKLYSRVVRAGETFLIPRGLMHLQFNVGKTEASMVVSFNSQNPGIVFVPLTLFSSNPPIPTPVLTKALRVEAGVVELLKSKFADGF

SEQ ID NO: 52116 - protein, 173 aa, Glycine max
  peptide (1)..(173): Ceres Seq. ID no. 13594750
  misc_feature (12)..(163): Pfam Name: Cupin Pfam Description: Cupin
  misc_feature (1)..(159): Homolog of NCBI NO: 7447342 NR Description: germin homolog Ger1 - wheat
  misc_feature (1)..(173): Homolog of NCBI NO: 21912430 NR Description: oxalate oxidase 4 [Lolium perenne]
  misc_feature (1)..(172): Homolog of NCBI NO: 121131 NR Description: Oxalate oxidase GF-3.8 precursor (Germin GF-3.8)
  misc_feature (1)..(173): Homolog of NCBI NO: 21912428 NR Description: oxalate oxidase 2 [Lolium perenne]
  misc_feature (1)..(173): Homolog of NCBI NO: 22138786 NR Description: oxalate oxidase [Lolium perenne]
  misc_feature (1)..(172): Homolog of NCBI NO: 7447343 NR Description: germin homolog Ger3 - wheat
  misc_feature (1)..(172): Homolog of NCBI NO: 2266668 NR Description: oxalate oxidase [Hordeum vulgare]
  misc_feature (1)..(173): Homolog of NCBI NO: 11967814 NR Description: oxalate oxidase [Lolium perenne]
  misc_feature (1)..(173): Homolog of NCBI NO: 121129 NR Description: Oxalate oxidase GF-2.8 precursor (Germin GF-2.8)
  misc_feature (1)..(173): Homolog of NCBI NO: 1171937 NR Description: Oxalate oxidase 2 precursor (Germin)
MSKAGDDFLFSSKLAKAGNTSTPNGSAVTELDVAEWPGTNTLGVSMNRVDFAPGGTNPPHIHPRATEIGIVMKGELLVGILGSLDSGNKLYSRVVRAGETFLIPRGLMHLQFNVGKTEASMVVSFNSQNPGIVFVPLTLFSSNPPIPTPVLTKALRVEAGVVELLKSKFADGF

SEQ ID NO: 52117 - protein, 128 aa, Glycine max
  peptide (1)..(128): Ceres Seq. ID no. 13594751
  misc_feature (1)..(118): Pfam Name: Cupin Pfam Description: Cupin
  misc_feature (1)..(114): Homolog of NCBI NO: 7447342 NR Description: germin homolog Ger1 - wheat
  misc_feature (1)..(128): Homolog of NCBI NO: 21912430 NR Description: oxalate oxidase 4 [Lolium perenne]
  misc_feature (1)..(127): Homolog of NCBI NO: 121131 NR Description: Oxalate oxidase GF-3.8 precursor (Germin GF-3.8)
  misc_feature (1)..(128): Homolog of NCBI NO: 21912428 NR Description: oxalate oxidase 2 [Lolium perenne]
  misc_feature (1)..(128): Homolog of NCBI NO: 22138786 NR Description: oxalate oxidase [Lolium perenne]
  misc_feature (1)..(127): Homolog of NCBI NO: 7447343 NR Description: germin homolog Ger3 - wheat
  misc_feature (1)..(127): Homolog of NCBI NO: 2266668 NR Description: oxalate oxidase [Hordeum vulgare]
  misc_feature (1)..(128): Homolog of NCBI NO: 11967814 NR Description: oxalate oxidase [Lolium perenne]
  misc_feature (1)..(128): Homolog of NCBI NO: 121129 NR Description: Oxalate oxidase GF-2.8 precursor (Germin GF-2.8)
  misc_feature (1)..(128): Homolog of NCBI NO: 1171937 NR Description: Oxalate oxidase 2 precursor (Germin)
MNRVDFAPGGTNPPHIHPRATEIGIVMKGELLVGILGSLDSGNKLYSRVVRAGETFLIPRGLMHLQFNVGKTEASMVVSFNSQNPGIVFVPLTLFSSNPPIPTPVLTKALRVEAGVVELLKSKFADGF

SEQ ID NO: 52118 - DNA, 1177 bp, Glycine max
  misc_feature (1)..(1177): Ceres Seq. ID no. 12609146
cgatttctcctcttccttccttatttacgagcgccgaggccgcctgggaccattggttcttcttcttccctcgtcgctgcctgccatcaccggccgtgctgcgcttgcgcgttgaagaggaatccggccggccgtcgtcctcgaccgatacatggggcaccggggggacaccaagcctgtcagtggcggcgggttcagtgagaatggcaagtttagctatggttatgcgagcagtctagggaaaagatcttccatggaggacttccacgagacgagaatcgatggcgtcgatggagagaccgtcggattgttcggtgttttcgacggccatggtggagctcgagccgcggagttcgtcaagcagaaccttttcagcaacttaatcaagcacccaaagttcttcaccgataccaagtctgctattgctgaaactttcacccatacggattcagagctcctgaaggccgataccacccacaaccgagatgcagggtcgacggcctccacggccattctcgttggcgatcgcctggtggtggcaaacgttggggactctagggcggtcatttgtaggggtggtgatgccatagccgtgtcaagggaccataagcctgaccagacagatgaaaggcagaggatagaggacgccggaggtttcgtgatgtgggcaggtacatggcgtgggggcggcgtgcttgctgtttctcgggcatttggtgacaaactgttgaagcagtacgtggttgccgatccagagatcaaggaggaggtagtcgacagctccctggagttcctcatcctggcgagcgacgggctgtgggacgtcgtctccaacgaggaagccgtggccatggtgaagccgatcgtggactcgcaggaggcggccaagaagctcctcgtcgaggcaacgcggaggggaagcgccgacaacatcacctgcgtcgtcgtccgtttcctggaccagcagcccccggcggcggccaccaacggatccccagcccctgccgcagcgagcaagtgaacatttcctcctcgaagcgcgtaggtgttcacagggcaatgtgttgtgcaagcaatgtgtctgatgacgttgcccttcgcatgcgtgtttatttgcttcactccagtttacccatgcctgtactgatcatgtatgttctcagctgttctcatttcg

SEQ ID NO: 52119 - protein, 289 aa, Glycine max
  peptide (1)..(289): Ceres Seq. ID no. 12609147
  misc_feature (21)..(261): Pfam Name: Protein phosphatase 2C Pfam Description: Protein phosphatase 2C
  misc_feature (1)..(268): Homolog of NCBI NO: 30693757 NR Description: protein phosphatase 2C (PP2C), putative
  misc_feature (35)..(272): Homolog of NCBI NO: 19387276 NR Description: putative protein phosphatase 2C
  misc_feature (9)..(289): Homolog of NCBI NO: 11358728 NR Description: protein phosphatase 2C-like protein - Arabidopsis
  misc_feature (6)..(272): Homolog of NCBI NO: 38345197 NR Description: OSJNBa0015K02.7 [Oryza sativa (japonica
  misc_feature (193)..(284): Homolog of NCBI NO: 7486331 NR Description: hypothetical protein F28M20.60 - Arabidopsis
  misc_feature (15)..(204): Homolog of NCBI NO: 7486331 NR Description: hypothetical protein F28M20.60 - Arabidopsis
  misc_feature (9)..(289): Homolog of NCBI NO: 18416366 NR Description: protein phosphatase 2C -like protein
  misc_feature (9)..(289): Homolog of NCBI NO: 15238651 NR Description: Protein phosphatase 2C-like protein; protein id:
  misc_feature (6)..(284): Homolog of NCBI NO: 30689144 NR Description: protein phosphatase 2C (PP2C), putative
  misc_feature (6)..(279): Homolog of NCBI NO: 20146110 NR Description: protein phosphatase 2C [Mesembryanthemum
MGHRGDTKPVSGGGFSENGKFSYGYASSLGKRSSMEDFHETRIDGVDGETVGLFGVFDGHGGARAAEFVKQNLFSNLIKHPKFFTDTKSAIAETFTHTDSELLKADTTHNRDAGSTASTAILVGDRLVVANVGDSRAVICRGGDAIAVSRDHKPDQTDERQRIEDAGGFVMWAGTWRGGGVLAVSRAFGDKLLKQYVVADPEIKEEVVDSSLEFLILASDGLWDVVSNEEAVAMVKPIVDSQEAAKKLLVEATRRGSADNITCVVVRFLDQQPPAAATNGSPAPAAASK

SEQ ID NO: 52120 - protein, 255 aa, Glycine max
  peptide (1)..(255): Ceres Seq. ID no. 12609148
  misc_feature (1)..(227): Pfam Name: Protein phosphatase 2C Pfam Description: Protein phosphatase 2C
  misc_feature (1)..(234): Homolog of NCBI NO: 30693757 NR Description: protein phosphatase 2C (PP2C), putative
  misc_feature (1)..(238): Homolog of NCBI NO: 19387276 NR Description: putative protein phosphatase 2C
  misc_feature (1)..(255): Homolog of NCBI NO: 11358728 NR Description: protein phosphatase 2C-like protein - Arabidopsis
  misc_feature (1)..(238): Homolog of NCBI NO: 38345197 NR Description: OSJNBa0015K02.7 [Oryza sativa (japonica
  misc_feature (159)..(250): Homolog of NCBI NO: 7486331 NR Description: hypothetical protein F28M20.60 - Arabidopsis
  misc_feature (1)..(170): Homolog of NCBI NO: 7486331 NR Description: hypothetical protein F28M20.60 - Arabidopsis
  misc_feature (1)..(255): Homolog of NCBI NO: 18416366 NR Description: protein phosphatase 2C -like protein
  misc_feature (1)..(255): Homolog of NCBI NO: 15238651 NR Description: Protein phosphatase 2C-like protein; protein id:
  misc_feature (1)..(250): Homolog of NCBI NO: 30689144 NR Description: protein phosphatase 2C (PP2C), putative
  misc_feature (1)..(245): Homolog of NCBI NO: 20146110 NR Description: protein phosphatase 2C [Mesembryanthemum
MEDFHETRIDGVDGETVGLFGVFDGHGGARAAEFVKQNLFSNLIKHPKFFTDTKSAIAETFTHTDSELLKADTTHNRDAGSTASTAILVGDRLVVANVGDSRAVICRGGDAIAVSRDHKPDQTDERQRIEDAGGFVMWAGTWRGGGVLAVSRAFGDKLLKQYVVADPEIKEEVVDSSLEFLILASDGLWDVVSNEEAVAMVKPIVDSQEAAKKLLVEATRRGSADNITCVVVRFLDQQPPAAATNGSPAPAAASK

SEQ ID NO: 52121 - DNA, 976 bp, Glycine max
  misc_feature (1)..(976): Ceres Seq. ID no. 13594608
aatcgataaactatcctcatcattcacaacaaacccaaaaaccaaacctcctccttcctatcttgaacaaccgccgagagacctccccgtcgccgtcgccgcaaatggagctgctcaacgtggttccggcggacgccatggccttccccctctactccctccccgcggcggccaacaccgtcgcctcgctcttcgcctggctcgtcgcggccctcgccgccgccgtcggcctctggcgcatccgcgcggccggctcctccaacaaactacccggcgccggcgcccgcagcagcaccctcttggacgacaatcagcagccgcaggccgtttcgtcgtctgccgccgacgagccacggcccgcactcgccgtgccggtggagccgtcctccccgattagcgagccaagctcgccgtccaaggtccggttcacggcatactacggcggggccggagctgacgatggggtagtggacggcgtcaggaaatgcgcggacagggacgaggacgaggacggcgtgcccgtcgtcgacgaccagagcgagacacagccgagacggacggcgtcgatgaggatcaggtcggcagcctcgacggcggtgccctgctgggagaagagggagatggccgtgaggaggcggggagatttgggctggtaccgccaccttgacacggcggtgcttgacggcaccgttgtaaggctgtgggacggcgaggtcaccgcggcggtggcgtcgccgagggcgcggcggcggagggcaggattgaaaccgcgcctgtcactatagagatgtgtgtataatgtggttaggattattggattgttattaggtgggtatgacgattttgtccttcaatttgggcatgtcatatgtatgtgtatcgtctaagagggccgaggctgaaaaaatgaacagccttcgtctcagctctcaggagaaacgaaaatttggcaaataatggcagagtattcttgctc

SEQ ID NO: 52122 - protein, 260 aa, Glycine max
  peptide (1)..(260): Ceres Seq. ID no. 13594609
  misc_feature (66)..(244): Homolog of NCBI NO: 18420313 NR Description: expressed protein [Arabidopsis thaliana]
SINYPHHSQQTQKPNLLLPILNNRRETSPSPSPQMELLNVVPADAMAFPLYSLPAAANTVASLFAWLVAALAAAVGLWRIRAAGSSNKLPGAGARSSTLLDDNQQPQAVSSSAADEPRPALAVPVEPSSPISEPSSPSKVRFTAYYGGAGADDGVVDGVRKCADRDEDEDGVPVVDDQSETQPRRTASMRIRSAASTAVPCWEKREMAVRRRGDLGWYRHLDTAVLDGTVVRLWDGEVTAAVASPRARRRRAGLKPRLSL

SEQ ID NO: 52123 - protein, 226 aa, Glycine max
  peptide (1)..(226): Ceres Seq. ID no. 13594610
  misc_feature (32)..(210): Homolog of NCBI NO: 18420313 NR Description: expressed protein [Arabidopsis thaliana]
MELLNVVPADAMAFPLYSLPAAANTVASLFAWLVAALAAAVGLWRIRAAGSSNKLPGAGARSSTLLDDNQQPQAVSSSAADEPRPALAVPVEPSSPISEPSSPSKVRFTAYYGGAGADDGVVDGVRKCADRDEDEDGVPVVDDQSETQPRRTASMRIRSAASTAVPCWEKREMAVRRRGDLGWYRHLDTAVLDGTVVRLWDGEVTAAVASPRARRRRAGLKPRLSL

SEQ ID NO: 52124 - protein, 215 aa, Glycine max
  peptide (1)..(215): Ceres Seq. ID no. 13594611
  misc_feature (21)..(199): Homolog of NCBI NO: 18420313 NR Description: expressed protein [Arabidopsis thaliana]
MAFPLYSLPAAANTVASLFAWLVAALAAAVGLWRIRAAGSSNKLPGAGARSSTLLDDNQQPQAVSSSAADEPRPALAVPVEPSSPISEPSSPSKVRFTAYYGGAGADDGVVDGVRKCADRDEDEDGVPVVDDQSETQPRRTASMRIRSAASTAVPCWEKREMAVRRRGDLGWYRHLDTAVLDGTVVRLWDGEVTAAVASPRARRRRAGLKPRLSL

SEQ ID NO: 52125 - DNA, 1123 bp, Glycine max
  misc_feature (1)..(1123): Ceres Seq. ID no. 13594713
atcgaacggcctgggcttctctgcgcctacacagccctccctcctacgccgtcttctgcttcgtccagcataacccccaaaaccacctcacccgagagaacaggcggcggcggcggcggcggcatcgggcaagatgatcaagaggcgctacttcaggcaagaccacggcgacaatagcgcctcctcgtcctcctcctcgtcgggttcagattcggaccgcgaccccgcggaagaagaggtctcggaggaggaagtagaagaggatcaagaacaagtaaaagaagaagaagatgatgatgaagaagcggaggtggagtcgggggaagaacaggaaacggaagtagatgagcaggcggaagatgagggttcaggataccaaagtgaggatagctctggacatcatgttgatagtccttgtgcagatgagaacagcagtctggtgtatgaacaataccaagcaatcagtttgcctgttaagaaagcatcaagtggtgatgctgattctgccaaaggtgctgttaacaaggatgacgctgttgaggtcgatttcagtaactacattctgaagtgcaaatctgtgtataagtgcaagctttgtcccagaatcatgtgcttaagtgaggagatggtcagggtacatcttgaatcaaagatggtgctcaacagtgatggtgagctggaggaggaggcagagacacatgctgaacgacatgcccgaactatagctcttgctcagcaagtacaaaagcccaagaaggattcaggcaggcagcgacaaaatcggagaagacagaagaggtcgcagaatcgtctcaaggacaaagaccagagacacaactctggaaaggaaggtgcaaggccgaacaatggaactgctgataagaaaataccgaatattgaaactgctgctaagaaaatgccgaatcttgaaactgctgctaagaaaaggcgcaagactgaaaaataagtgggtgctgcagaaatatttcttgcgtgttatttcttcctatattgttgtaatttttaggagctttctgcggttttactgcttctgttttgccttcctttttgatccaagtgtagctgatgaaagctgagagattaaattgaaaggaaatacgac

SEQ ID NO: 52126 - protein, 277 aa, Glycine max
  peptide (1)..(277): Ceres Seq. ID no. 13594714
  misc_feature (1)..(93): Pfam Name: Prothymosin/parathymosin family Pfam Description: Prothymosin/parathymosin family
  misc_feature (1)..(232): Homolog of NCBI NO: 6322676 NR Description: EBNA1-binding protein homolog; Ebp2p
  misc_feature (16)..(85): Homolog of NCBI NO: 39586319 NR Description: Hypothetical protein CBG12079 [Caenorhabditis
  misc_feature (15)..(85): Homolog of NCBI NO: 39586319 NR Description: Hypothetical protein CBG12079 [Caenorhabditis
  misc_feature (15)..(85): Homolog of NCBI NO: 39586319 NR Description: Hypothetical protein CBG12079 [Caenorhabditis
  misc_feature (14)..(85): Homolog of NCBI NO: 39586319 NR Description: Hypothetical protein CBG12079 [Caenorhabditis
  misc_feature (1)..(87): Homolog of NCBI NO: 29251343 NR Description: GLP_574_57226_57648 [Giardia lamblia ATCC 50803]
  misc_feature (53)..(236): Homolog of NCBI NO: 25404282 NR Description: hypothetical protein F8A5.16 [imported] -
  misc_feature (1)..(106): Homolog of NCBI NO: 29251343 NR Description: GLP_574_57226_57648 [Giardia lamblia ATCC 50803]
  misc_feature (53)..(262): Homolog of NCBI NO: 15219776 NR Description: hypothetical protein [Arabidopsis thaliana]
  misc_feature (1)..(234): Homolog of NCBI NO: 13359054 NR Description: P0436D06.15 [Oryza sativa (japonica
MIKRRYFRQDHGDNSASSSSSSSGSDSDRDPAEEEVSEEEVEEDQEQVKEEEDDDEEAEVESGEEQETEVDEQAEDEGSGYQSEDSSGHHVDSPCADENSSLVYEQYQAISLPVKKASSGDADSAKGAVNKDDAVEVDFSNYILKCKSVYKCKLCPRIMCLSEEMVRVHLESKMVLNSDGELEEEAETHAERHARTIALAQQVQKPKKDSGRQRQNRRRQKRSQNRLKDKDQRHNSGKEGARPNNGTADKKIPNIETAAKKMPNLETAAKKRRKTEK

SEQ ID NO: 52127 - DNA, 475 bp, Glycine max
  misc_feature (1)..(475): Ceres Seq. ID no. 13594613
tttttttcgtccccgtgagctctcsacacaagtctcgcccgcagccgccgtcagagcgcaacgcacgcccgcgagcccaccgaagcccaggcgcgcggagaccctagccaagcgagtcctcgccgcagatggcagtccccggcggccgcaacggcctcgtcgaggacgacgacgtcgccgaccacgccggcgccttcgtcgccccctccgacgacgaggaggcgccgctgcctccccacctccaggccctctccgacgccgcccagagcggcgacgtcgacgccctccgcaccgcgctcgataactatggtggcagcattgatgatccagttgaagatggtgatactgtgcttcacctggcatgcttatatggccatctactttgcgtgcagctactgctggaacgtggagcaagcttagagtccaaagatgaagaaggggcaattcctctccatgatgcttgtgctggaggctt

SEQ ID NO: 52128 - protein, 115 aa, Glycine max
  peptide (1)..(115): Ceres Seq. ID no. 13594614
  misc_feature (70)..(102): Pfam Name: Ankyrin repeat Pfam Description: Ankyrin repeat
  misc_feature (26)..(114): Homolog of NCBI NO: 549986 NR Description: possible apospory-associated protein
  misc_feature (45)..(114): Homolog of NCBI NO: 3478700 NR Description: AFT protein [Arabidopsis thaliana]
  misc_feature (45)..(114): Homolog of NCBI NO: 15237008 NR Description: ankyrin repeat-containing protein 2 [Arabidopsis
  misc_feature (45)..(114): Homolog of NCBI NO: 4205079 NR Description: ankyrin repeat-containing protein 2 [Arabidopsis
  misc_feature (45)..(114): Homolog of NCBI NO: 30690372 NR Description: ankyrin repeat-containing protein 2 [Arabidopsis
  misc_feature (7)..(114): Homolog of NCBI NO: 28373837 NR Description: Chain A, 4ank: A Designed Ankyrin Repeat Protein
  misc_feature (1)..(114): Homolog of NCBI NO: 18398673 NR Description: expressed protein [Arabidopsis thaliana]
  misc_feature (1)..(114): Homolog of NCBI NO: 6681330 NR Description: hypothetical protein [Arabidopsis thaliana]
  misc_feature (1)..(89): Homolog of NCBI NO: 27497215 NR Description: Unknown protein [Oryza sativa (japonica
  misc_feature (1)..(114): Homolog of NCBI NO: 15451616 NR Description: Hypothetical protein with similarity to ankyrins
MAVPGGRNGLVEDDDVADHAGAFVAPSDDEEAPLPPHLQALSDAAQSGDVDALRTALDNYGGSIDDPVEDGDTVLHLACLYGHLLCVQLLLERGASLESKDEEGAIPLHDACAGG

SEQ ID NO: 52129 - protein, 100 aa, Glycine max
  peptide (1)..(100): Ceres Seq. ID no. 13594615
  misc_feature (3)..(100): Homolog of NCBI NO: 17506453 NR Description: AT4g02720 T10P11 1 like (59.0 kD) [Caenorhabditis
  misc_feature (3)..(100): Homolog of NCBI NO: 25143299 NR Description: pre-mRNA splicing SR protein related RSR-1 (68.2
  misc_feature (8)..(8): Xaa is any aa, unknown or other
FFRPRELXTQVSPAAAVRAQRTPASPPKPRRAETLAKRVLAADGSPRRPQRPRRGRRRRRPRRRLRRPLRRRGGAAASPPPGPLRRRPERRRRRPPHRAR

SEQ ID NO: 52130 - DNA, 591 bp, Glycine max
  misc_feature (1)..(591): Ceres Seq. ID no. 13581897
acaggagagcaaccaaagctatacgttggagtggaggtgaggggagtgtttgtgtccgagggaacaataaagggcaaacaaacaacaaaacaaaggaaagaaaagatgttacagttcccggcgtatatgacgcagtacccattgtccacgatgaccattccgacgtcgtttctgctacccgctcagtggccccagccccaaaacgaagaactccttctcgccatggaagagtccgatttcgaagaaaagtgcaacgagatcaggaagatgaacagcaacctaattgtgataggaaaaaccactaacgaaaatgataaggaagactttgacaatgaggcagatgacgatgatgctgacaatgcagaggaatctgagggcgaagaatttgagcaagaaactggttgagatagctgcacatcagcaagaacctgttagtatgtttttggactgctaggccaaatctatgtattgagtttttcttctattmatmttttggacctastattgagtattgacttgtcattcatatcaamctttgtattrtwtctgctcttttattatrcytaataaaatatttacaacctttaagtg

SEQ ID NO: 52131 - protein, 134 aa, Glycine max
  peptide (1)..(134): Ceres Seq. ID no. 15222743
  misc_feature (36)..(134): Homolog of NCBI NO: 18424670 NR Description: expressed protein [Arabidopsis thaliana]
TGEQPKLYVGVEVRGVFVSEGTIKGKQTTKQRKEKMLQFPAYMTQYPLSTMTIPTSFLLPAQWPQPQNEELLLAMEESDFEEKCNEIRKMNSNLIVIGKTTNENDKEDFDNEADDDDADNAEESEGEEFEQETG

SEQ ID NO: 52132 - protein, 100 aa, Glycine max
  peptide (1)..(100): Ceres Seq. ID no. 15222744
RRATKAIRWSGGEGSVCVRGNNKGQTNNKTKERKDVTVPGVYDAVPIVHDDHSDVVSATRSVAPAPKRRTPSRHGRVRFRRKVQRDQEDEQQPNCDRKNH

SEQ ID NO: 52133 - protein, 99 aa, Glycine max
  peptide (1)..(99): Ceres Seq. ID no. 15222745
  misc_feature (1)..(99): Homolog of NCBI NO: 18424670 NR Description: expressed protein [Arabidopsis thaliana]
MLQFPAYMTQYPLSTMTIPTSFLLPAQWPQPQNEELLLAMEESDFEEKCNEIRKMNSNLIVIGKTTNENDKEDFDNEADDDDADNAEESEGEEFEQETG

SEQ ID NO: 52134 - DNA, 1112 bp, Glycine max
  misc_feature (1)..(1112): Ceres Seq. ID no. 15172792
accgcagcccaaccaacccccaacccgagcgtagcgagggatacagccgcgcggttggaaggggaggttcccggccatggatttcctacaggggcagagcgtcgagaccatggtggccgtcgccgtcgcggtcgtcgccgtcgccgtgggcggcgcgctcctcctccgccgatccaagaggcccaagggctgcttggatcctgagaacttcaagaagtttaaacttgtggaaaagacacaaataagccataatgttgccaaattccgatttgctcttccaacccctacctctgtgttaggccttccaattggtcaacatatcagttgcaggggtcaagatgctaccggtgaagaagtaatcaagccttacacacctactacattggattctgatctaggaaattttcagcttgttataaagatgtaccctcaaggaagaatgtcgcatcacttccgtgaaatgaaagttggtgattatatgtctgtgaagggacctaagggtcgtttcaagtaccaagtaggacaagtgagagctttcggaatgctggctggtggatctggcattactccgatgttccaagttgcaagggcaattcttgagaaccctaatgacaaaacgaaggttcatctagtctatgcaaatgtcacacctgaagacattcttctgaaggaagagctggacagcctggccgaagaatatcctgaccgcttcaagatcttctacgtgttgaatcagcctcctgaagtctggaatggtggtgttgggtttgtgtcccaggacatgatcaagacccactgtccagcacctgctgaggatattcagatcttgagatgcggccctcctccgatgaacaaggcgatggctgcgcacctcgaggagctcggatacacaaaggagatgcagttccagttctaagtttccggagtacagaaaaataagccccccacgctctacattatccagcatggggactgtccgacccctcttgatatcttacagaagcaatgcatttttagtcttgtagtacctccattttcgtggccaaatgttagctgcacaccttggcagaggcccaaatttctttcgactccacttttatcattattggttg

SEQ ID NO: 52135 - protein, 279 aa, Glycine max
  peptide (1)..(279): Ceres Seq. ID no. 15172793
  misc_feature (151)..(265): Pfam Name: Oxidoreductase NAD-binding domain Pfam Description: Oxidoreductase NAD-binding domain
  misc_feature (26)..(146): Homolog of NCBI NO: 21312524 NR Description: cytochrome b5 reductase 1 (B5R.1) [Mus musculus]
  misc_feature (120)..(279): Homolog of NCBI NO: 21312524 NR Description: cytochrome b5 reductase 1 (B5R.1) [Mus musculus]
  misc_feature (26)..(146): Homolog of NCBI NO: 27712062 NR Description: similar to RIKEN cDNA 1500005G05
  misc_feature (120)..(279): Homolog of NCBI NO: 27712062 NR Description: similar to RIKEN cDNA 1500005G05
  misc_feature (17)..(273): Homolog of NCBI NO: 6070342 NR Description: NADH-cytochrome b5 reductase [Mortierella alpina]
  misc_feature (13)..(273): Homolog of NCBI NO: 40739560 NR Description: hypothetical protein AN6366.2 [Aspergillus
  misc_feature (116)..(279): Homolog of NCBI NO: 16648905 NR Description: NADH-cytochrome b5 reductase [Arabidopsis
  misc_feature (2)..(279): Homolog of NCBI NO: 15238025 NR Description: NADH-cytochrome b5 reductase [Arabidopsis
  misc_feature (1)..(279): Homolog of NCBI NO: 17221690 NR Description: cytochrome b5 reductase isoform II [Zea mays]
  misc_feature (1)..(279): Homolog of NCBI NO: 4336205 NR Description: cytochrome b5 reductase [Zea mays]
MDFLQGQSVETMVAVAVAVVAVAVGGALLLRRSKRPKGCLDPENFKKFKLVEKTQISHNVAKFRFALPTPTSVLGLPIGQHISCRGQDATGEEVIKPYTPTTLDSDLGNFQLVIKMYPQGRMSHHFREMKVGDYMSVKGPKGRFKYQVGQVRAFGMLAGGSGITPMFQVARAILENPNDKTKVHLVYANVTPEDILLKEELDSLAEEYPDRFKIFYVLNQPPEVWNGGVGFVSQDMIKTHCPAPAEDIQILRCGPPPMNKAMAAHLEELGYTKEMQFQF

SEQ ID NO: 52136 - protein, 268 aa, Glycine max
  peptide (1)..(268): Ceres Seq. ID no. 15172794
  misc_feature (140)..(254): Pfam Name: Oxidoreductase NAD-binding domain Pfam Description: Oxidoreductase NAD-binding domain
  misc_feature (15)..(135): Homolog of NCBI NO: 21312524 NR Description: cytochrome b5 reductase 1 (B5R.1) [Mus musculus]
  misc_feature (109)..(268): Homolog of NCBI NO: 21312524 NR Description: cytochrome b5 reductase 1 (B5R.1) [Mus musculus]
  misc_feature (15)..(135): Homolog of NCBI NO: 27712062 NR Description: similar to RIKEN cDNA 1500005G05
  misc_feature (109)..(268): Homolog of NCBI NO: 27712062 NR Description: similar to RIKEN cDNA 1500005G05
  misc_feature (6)..(262): Homolog of NCBI NO: 6070342 NR Description: NADH-cytochrome b5 reductase [Mortierella alpina]
  misc_feature (2)..(262): Homolog of NCBI NO: 40739560 NR Description: hypothetical protein AN6366.2 [Aspergillus
  misc_feature (105)..(268): Homolog of NCBI NO: 16648905 NR Description: NADH-cytochrome b5 reductase [Arabidopsis
  misc_feature (1)..(268): Homolog of NCBI NO: 15238025 NR Description: NADH-cytochrome b5 reductase [Arabidopsis
  misc_feature (1)..(268): Homolog of NCBI NO: 17221690 NR Description: cytochrome b5 reductase isoform II [Zea mays]
  misc_feature (1)..(268): Homolog of NCBI NO: 4336205 NR Description: cytochrome b5 reductase [Zea mays]
MVAVAVAVVAVAVGGALLLRRSKRPKGCLDPENFKKFKLVEKTQISHNVAKFRFALPTPTSVLGLPIGQHISCRGQDATGEEVIKPYTPTTLDSDLGNFQLVIKMYPQGRMSHHFREMKVGDYMSVKGPKGRFKYQVGQVRAFGMLAGGSGITPMFQVARAILENPNDKTKVHLVYANVTPEDILLKEELDSLAEEYPDRFKIFYVLNQPPEVWNGGVGFVSQDMIKTHCPAPAEDIQILRCGPPPMNKAMAAHLEELGYTKEMQFQF

SEQ ID NO: 52137 - protein, 164 aa, Glycine max
  peptide (1)..(164): Ceres Seq. ID no. 15172795
  misc_feature (36)..(150): Pfam Name: Oxidoreductase NAD-binding domain Pfam Description: Oxidoreductase NAD-binding domain
  misc_feature (1)..(31): Homolog of NCBI NO: 21312524 NR Description: cytochrome b5 reductase 1 (B5R.1) [Mus musculus]
  misc_feature (5)..(164): Homolog of NCBI NO: 21312524 NR Description: cytochrome b5 reductase 1 (B5R.1) [Mus musculus]
  misc_feature (1)..(31): Homolog of NCBI NO: 27712062 NR Description: similar to RIKEN cDNA 1500005G05
  misc_feature (5)..(164): Homolog of NCBI NO: 27712062 NR Description: similar to RIKEN cDNA 1500005G05
  misc_feature (1)..(158): Homolog of NCBI NO: 6070342 NR Description: NADH-cytochrome b5 reductase [Mortierella alpina]
  misc_feature (1)..(158): Homolog of NCBI NO: 40739560 NR Description: hypothetical protein AN6366.2 [Aspergillus
  misc_feature (1)..(164): Homolog of NCBI NO: 16648905 NR Description: NADH-cytochrome b5 reductase [Arabidopsis
  misc_feature (1)..(164): Homolog of NCBI NO: 15238025 NR Description: NADH-cytochrome b5 reductase [Arabidopsis
  misc_feature (1)..(164): Homolog of NCBI NO: 17221690 NR Description: cytochrome b5 reductase isoform II [Zea mays]
  misc_feature (1)..(164): Homolog of NCBI NO: 4336205 NR Description: cytochrome b5 reductase [Zea mays]
MYPQGRMSHHFREMKVGDYMSVKGPKGRFKYQVGQVRAFGMLAGGSGITPMFQVARAILENPNDKTKVHLVYANVTPEDILLKEELDSLAEEYPDRFKIFYVLNQPPEVWNGGVGFVSQDMIKTHCPAPAEDIQILRCGPPPMNKAMAAHLEELGYTKEMQFQF

SEQ ID NO: 52138 - DNA, 924 bp, Glycine max
  misc_feature (1)..(924): Ceres Seq. ID no. 14302025
aaccagtcaccgctctctttttcatttacagagatagccctaacttagtcactctctctcacacacactccagttcaaagttcaaacaatggctcctccacagaagctctttctcgccgccattgtcgctgccgtcattgtagccgccaccaccggatatgcacctaatagtgctgcggaagatattgtgcattcctcatgcgtgcacgcgagctatccatcgctatgcgtccgtacactctctacctactctggtccaaccatcacaaaccgtcgcgagctagctcaagccgccgtcaagataagcctctcccacgctcgagcagccgctaagaaactcgcggctgtgagagaaaccgtgggaaagaaacgggtgaaagcggcggttgtggactgcgtggagatgattggagactcggtggacgagctgagccgcacgctaggcgttttaaagcatctacacgtttcgggcgtttcggcgaacgagttcaggtggcagatgagcaacgcgcagacgtgggctagtgcggcgttgacggatgacgacacgtgtctcgatgggtttaaaggggtcgagggtaaggttaaaacggaggtgaagcattggatgacgaaagtggcgagggttacaagcaacgcgctttacatgatcaaccagctagatgaatcacgtggctagccccacgtagtacgttcttgatgttatgatgtgcttgtcctaatggacagttatgatttggtgttagtttttttcgtgtttgcttaattgcgagttatctactatttaaaaatgagaggcattgtccttttaagtagttctgataatggtatactaaataaatggtttatctcttttttcggacggtatgtcattgtatcgtattgtgttgttcccttcggattcgatagcatgtgattttgtct

SEQ ID NO: 52139 - protein, 196 aa, Glycine max
  peptide (1)..(196): Ceres Seq. ID no. 14302026
  misc_feature (7)..(189): Homolog of NCBI NO: 15234982 NR Description: pectinesterase - related [Arabidopsis thaliana]
  misc_feature (9)..(189): Homolog of NCBI NO: 15241799 NR Description: pectinesterase family [Arabidopsis thaliana]
  misc_feature (7)..(190): Homolog of NCBI NO: 15234547 NR Description: pectinesterase - related [Arabidopsis thaliana]
  misc_feature (9)..(189): Homolog of NCBI NO: 21618088 NR Description: ripening-related protein-like [Arabidopsis
  misc_feature (6)..(189): Homolog of NCBI NO: 112717 NR Description: 21 KD PROTEIN PRECURSOR (1.2 PROTEIN)
  misc_feature (1)..(190): Homolog of NCBI NO: 7406663 NR Description: putative ripening-related protein [Vitis vinifera]
  misc_feature (7)..(195): Homolog of NCBI NO: 21618013 NR Description: putative ripening-related protein [Arabidopsis
  misc_feature (7)..(195): Homolog of NCBI NO: 18407657 NR Description: pectinesterase family [Arabidopsis thaliana]
  misc_feature (1)..(196): Homolog of NCBI NO: 15242049 NR Description: pectinesterase - related [Arabidopsis thaliana]
  misc_feature (1)..(196): Homolog of NCBI NO: 21553812 NR Description: ripening-related protein-like [Arabidopsis
MAPPQKLFLAAIVAAVIVAATTGYAPNSAAEDIVHSSCVHASYPSLCVRTLSTYSGPTITNRRELAQAAVKISLSHARAAAKKLAAVRETVGKKRVKAAVVDCVEMIGDSVDELSRTLGVLKHLHVSGVSANEFRWQMSNAQTWASAALTDDDTCLDGFKGVEGKVKTEVKHWMTKVARVTSNALYMINQLDESRG

SEQ ID NO: 52140 - DNA, 1226 bp, Glycine max
  misc_feature (1)..(1226): Ceres Seq. ID no. 15177091
gtaaaccctatcttctcctgttccccttcgtccccggccggcgacgacgccgcgcgcgcagcgaacccagcccctcctccggttgcagtaagcaaggaaggatgagtaggcgctggagccggaccatttacgttgggaacctcccaggggatatcagggagcgggaggtggaggatctgttctacaagtatggacggatagttgaaattgacttgaaggtccccccaaggccacctggctttgcttttgttgagtttgaagatccccgtgatgctgaagatgcgattcatggtcgagatggttacaactttgatgggaatcgtctgcgggttgaacttgcacatggcgggagggccaactcttcatcccttccgaacagctatggtggcggaggacgccgtggtggtgtctctaggcatacagagtatcgtgttctggttactggactaccttcttctgcatcatggcaagatctaaaggatcatatgagaaaggctggtgatgtttgtttctctgaggtgtatcgtgagggtggtggtactattggaattgttgattatacaaactatgatgacatgaagtatgctataaggaagcttgatgatactgaatttaaaaatgcattctctcgagcgcctataagggtgaaggagtatgctggcaaaagcagccgctcctattcacgcagccgtagcagaagccgaagtggcagctacagcaggagtccgagtccaaagaaaaaaccatcacgccgttcagcgtcaagatctcggtcgagatcagtttcttcccattcaaggtcaccgtcaaagggacgctctccatcaagatcaccagcaaaatcccaatcccctgtcgctgcgtcccccgtcgtcaatggtgaagcagcaagccccaagagggacccaagcaagagcccatcacgttcccggtctcctgatgccaaatcagagtaaaacggatgcgaggctaggagcggtgagaggcggagccatggtcttcaaattcttcaaattttgtcttcgccaacttctgcatccgctgttatagtactatctctgtgttcggttattctaggttccttgatgtttctgtaaaaacttgtttggatggattcttgagatttatgtactctcttcattgtcagcatttttacttggattattatctatggtcgttggctcggaagatatttgaatacagtaacattgccgtttgtaatgctg

SEQ ID NO: 52141 - protein, 317 aa, Glycine max
  peptide (1)..(317): Ceres Seq. ID no. 15177092
  misc_feature (34)..(284): Homolog of NCBI NO: 22331714 NR Description: arginine/serine-rich splicing factor (atSRp34),
  misc_feature (34)..(300): Homolog of NCBI NO: 5815236 NR Description: splicing factor SR1B [Arabidopsis thaliana]
  misc_feature (34)..(312): Homolog of NCBI NO: 2129717 NR Description: splicing factor SF-2 homolog - Arabidopsis
  misc_feature (34)..(300): Homolog of NCBI NO: 30678395 NR Description: pre-mRNA splicing factor SF2 (SR1 protein)
  misc_feature (34)..(300): Homolog of NCBI NO: 2443473 NR Description: ASF/SF2 homolog [Arabidopsis thaliana]
  misc_feature (34)..(285): Homolog of NCBI NO: 34894608 NR Description: putative pre-mRNA splicing factor SF2
  misc_feature (34)..(308): Homolog of NCBI NO: 12324445 NR Description: putative splicing factor; 53460-55514
  misc_feature (34)..(312): Homolog of NCBI NO: 5815235 NR Description: splicing factor SR1 [Arabidopsis thaliana]
  misc_feature (34)..(312): Homolog of NCBI NO: 30678391 NR Description: pre-mRNA splicing factor SF2 (SR1 protein)
  misc_feature (31)..(317): Homolog of NCBI NO: 33146854 NR Description: putative pre-mRNA splicing factor SF2
KPYLLLFPFVPGRRRRRARSEPSPSSGCSKQGRMSRRWSRTIYVGNLPGDIREREVEDLFYKYGRIVEIDLKVPPRPPGFAFVEFEDPRDAEDAIHGRDGYNFDGNRLRVELAHGGRANSSSLPNSYGGGGRRGGVSRHTEYRVLVTGLPSSASWQDLKDHMRKAGDVCFSEVYREGGGTIGIVDYTNYDDMKYAIRKLDDTEFKNAFSRAPIRVKEYAGKSSRSYSRSRSRSRSGSYSRSPSPKKKPSRRSASRSRSRSVSSHSRSPSKGRSPSRSPAKSQSPVAASPVVNGEAASPKRDPSKSPSRSRSPDAKSE

SEQ ID NO: 52142 - protein, 284 aa, Glycine max
  peptide (1)..(284): Ceres Seq. ID no. 15177093
  misc_feature (1)..(251): Homolog of NCBI NO: 22331714 NR Description: arginine/serine-rich splicing factor (atSRp34),
  misc_feature (1)..(267): Homolog of NCBI NO: 5815236 NR Description: splicing factor SR1B [Arabidopsis thaliana]
  misc_feature (1)..(279): Homolog of NCBI NO: 2129717 NR Description: splicing factor SF-2 homolog - Arabidopsis
  misc_feature (1)..(267): Homolog of NCBI NO: 30678395 NR Description: pre-mRNA splicing factor SF2 (SR1 protein)
  misc_feature (1)..(267): Homolog of NCBI NO: 2443473 NR Description: ASF/SF2 homolog [Arabidopsis thaliana]
  misc_feature (1)..(252): Homolog of NCBI NO: 34894608 NR Description: putative pre-mRNA splicing factor SF2
  misc_feature (1)..(275): Homolog of NCBI NO: 12324445 NR Description: putative splicing factor; 53460-55514
  misc_feature (1)..(279): Homolog of NCBI NO: 5815235 NR Description: splicing factor SR1 [Arabidopsis thaliana]
  misc_feature (1)..(279): Homolog of NCBI NO: 30678391 NR Description: pre-mRNA splicing factor SF2 (SR1 protein)
  misc_feature (1)..(284): Homolog of NCBI NO: 33146854 NR Description: putative pre-mRNA splicing factor SF2
MSRRWSRTIYVGNLPGDIREREVEDLFYKYGRIVEIDLKVPPRPPGFAFVEFEDPRDAEDAIHGRDGYNFDGNRLRVELAHGGRANSSSLPNSYGGGGRRGGVSRHTEYRVLVTGLPSSASWQDLKDHMRKAGDVCFSEVYREGGGTIGIVDYTNYDDMKYAIRKLDDTEFKNAFSRAPIRVKEYAGKSSRSYSRSRSRSRSGSYSRSPSPKKKPSRRSASRSRSRSVSSHSRSPSKGRSPSRSPAKSQSPVAASPVVNGEAASPKRDPSKSPSRSRSPDAKSE

SEQ ID NO: 52143 - DNA, 799 bp, Glycine max
  misc_feature (1)..(799): Ceres Seq. ID no. 15172783
atcatccctcctcgtagctttccatcagtgtggtgaaattgagaaaaatgagcggagccgggaagaaagtggcggatgtggcgttcaaagcgtcgaggacaatagattgggaagggatggcgaaggtccttgtaaccgatgaggctcgcagagagttctccaacctccgtcgtgctttcgatgaggtcaacacccagctgcagaccaagttcagccaggagcctgaacccattgattgggatttttacagaaagggcattggcgctggcattgttgacatgtacaaggaagcttacgacagcattgagattcctaagtacgtggacaatgttacccctgaatacaagccaaagtttgatgctttgctggtggaactcaaagaagcagaacagacatctctcaaggagtctgaacggctggagaaagaaattattgatgtccaggagataagcaaaaagctcagcacgatgactgcagatgagtactttgagaagcacccagaactcaagaagaagtttgatgacgagatccgtaacgactactggggatactgatcatcatatcttttgtatctccggtctggaaatgaaactctctcctctcttttttcttttgatgtgattttgtgagagtcaatcgtaacataataaggaccactccatttacttaagcagtgtgttgagatatttcattggagatccaatgagacgatgacgataaaacccatttggtttcagttgtcaatgtcacaatattgtttcgttttgttctaaagagaataataagagtttaaatgacc

SEQ ID NO: 52144 - protein, 168 aa, Glycine max
  peptide (1)..(168): Ceres Seq. ID no. 15172784
  misc_feature (15)..(166): Pfam Name: ATP synthase D chain, mitochondrial (ATP5H) Pfam Description: ATP synthase D chain, mitochondrial (ATP5H)
  misc_feature (1)..(168): Homolog of NCBI NO: 32352148 NR Description: hypothetical protein [Oryza sativa (japonica
  misc_feature (24)..(168): Homolog of NCBI NO: 17939851 NR Description: mitochondrial F0 ATP synthase D chain
  misc_feature (1)..(168): Homolog of NCBI NO: 15231176 NR Description: expressed protein [Arabidopsis thaliana]
MSGAGKKVADVAFKASRTIDWEGMAKVLVTDEARREFSNLRRAFDEVNTQLQTKFSQEPEPIDWDFYRKGIGAGIVDMYKEAYDSIEIPKYVDNVTPEYKPKFDALLVELKEAEQTSLKESERLEKEIIDVQEISKKLSTMTADEYFEKHPELKKKFDDEIRNDYWGY

SEQ ID NO: 52145 - protein, 145 aa, Glycine max
  peptide (1)..(145): Ceres Seq. ID no. 15172785
  misc_feature (1)..(143): Pfam Name: ATP synthase D chain, mitochondrial (ATP5H) Pfam Description: ATP synthase D chain, mitochondrial (ATP5H)
  misc_feature (1)..(145): Homolog of NCBI NO: 32352148 NR Description: hypothetical protein [Oryza sativa (japonica
  misc_feature (1)..(145): Homolog of NCBI NO: 17939851 NR Description: mitochondrial F0 ATP synthase D chain
  misc_feature (1)..(145): Homolog of NCBI NO: 15231176 NR Description: expressed protein [Arabidopsis thaliana]
MAKVLVTDEARREFSNLRRAFDEVNTQLQTKFSQEPEPIDWDFYRKGIGAGIVDMYKEAYDSIEIPKYVDNVTPEYKPKFDALLVELKEAEQTSLKESERLEKEIIDVQEISKKLSTMTADEYFEKHPELKKKFDDEIRNDYWGY

SEQ ID NO: 52146 - protein, 103 aa, Glycine max
  peptide (1)..(103): Ceres Seq. ID no. 15172786
MRLAESSPTSVVLSMRSTPSCRPSSARSLNPLIGIFTERALALALLTCTRKLTTALRFLSTWTMLPLNTSQSLMLCWWNSKKQNRHLSRSLNGWRKKLLMSRR

SEQ ID NO: 52147 - DNA, 713 bp, Glycine max
  misc_feature (1)..(713): Ceres Seq. ID no. 13594720
acatcagttttcaattaaagatactgttacactcataaaaaaagatggcaaacttgagtacactcgttggttgcattgccatcatcttcttcactgtcgttgcacctgcctcctcagccactcattctgtcgaatggtcgcttgggaaggactatagctccttggctactggaaaaccttatgccattggcgatacaatcgtgttcaactacggtgcgggtcacacggtggacgaagtgagtgaaagtgactacaaaagttgcacattggggaactcaatttcttcggacagtagcggaacaacaagcatagctctaaagacagctggttctcactacttcatttgcgctatccccggccactgtgccggcggcatgaagctctctgtctacgtaggtgcagaagcctcttcagacggtggcggtgacagtggtgacggtaccacccccaaaactacaccttctccaactgtagagggcaggaaggctgctccttccgcttctgccactgctatgttgaagccgttcaaagctttggttttgacttgtgtagctgcattattatatgctttggctctttcttagttgtttttaatttctcgttgatttggtttggctcgtttgaaaatccaggctagaggcagtgctatgagccctattattattatatgcttcttgttgtgattaattattctatgatattttcctttgttt

SEQ ID NO: 52148 - protein, 179 aa, Glycine max
  peptide (1)..(179): Ceres Seq. ID no. 13594721
  misc_feature (31)..(111): Pfam Name: Plastocyanin-like domain Pfam Description: Plastocyanin-like domain
  misc_feature (1)..(155): Homolog of NCBI NO: 14140127 NR Description: uclacyanin 3-like protein [Oryza sativa]
  misc_feature (11)..(173): Homolog of NCBI NO: 38346158 NR Description: OSJNBa0079A21.5 [Oryza sativa (japonica
  misc_feature (1)..(124): Homolog of NCBI NO: 25282796 NR Description: uclacyanin II [imported] - Arabidopsis thaliana
  misc_feature (1)..(163): Homolog of NCBI NO: 15224960 NR Description: uclacyanin II [Arabidopsis thaliana]
  misc_feature (1)..(160): Homolog of NCBI NO: 25453522 NR Description: blue copper-binding protein II [imported] -
  misc_feature (1)..(160): Homolog of NCBI NO: 25453521 NR Description: blue copper-binding protein II [imported] -
  misc_feature (1)..(163): Homolog of NCBI NO: 21554060 NR Description: phytocyanin [Arabidopsis thaliana]
  misc_feature (1)..(176): Homolog of NCBI NO: 2493318 NR Description: Blue copper protein precursor
  misc_feature (4)..(179): Homolog of NCBI NO: 15219890 NR Description: plastocyanin-like domain containing protein
  misc_feature (1)..(178): Homolog of NCBI NO: 15218396 NR Description: plastocyanin-like domain containing protein
MANLSTLVGCIAIIFFTVVAPASSATHSVEWSLGKDYSSLATGKPYAIGDTIVFNYGAGHTVDEVSESDYKSCTLGNSISSDSSGTTSIALKTAGSHYFICAIPGHCAGGMKLSVYVGAEASSDGGGDSGDGTTPKTTPSPTVEGRKAAPSASATAMLKPFKALVLTCVAALLYALALS

SEQ ID NO: 52149 - DNA, 1112 bp, Glycine max
  misc_feature (1)..(1112): Ceres Seq. ID no. 13638643
atcgattagttcgctacgtctctcactatctctctcaccgcgaaaatgtcgaccggtttaatcggaagattagtcagaaccaaaccgtcgcgattaaccaccgcagcaaggttgatcccatcgcgattcacagcctccgtaaccgaaccggaatcaaaatctccgtcaggcggcggcggcggaaaagcatcgaacttcaaaacattccagatctaccgatggaaccccgacaaccccagcaagcccgagctccaagactacaagatcgacctcaaagactgcggccccatggttctcgacgctctgatcaaaatcaaaaacgagatggatccctctctcaccttccgccgctcctgccgcgaagggatctgcggctcgtgcgcgatgaacatcgacgggtgcaacgggctcgcgtgtctgacgaagatcgaggagggagccaaggagacgacgatcactcccttgcctcacatgttcgtgatcaaggatctggtggtggacatgactaacttttataatcagtacaagagtattgagccgtggctgaagaggaagaatccagcttctgagcctgggaaggagattctgcagagtaagaaggatagggcgaagcttgatgggatgtatgagtgtattctctgtgcttgttgtagcacttcttgtcctagttattggtggaaccctgagtcttaccttggtcctgccgctttgctacacgccaacaggtggataagcgacagtcgtgatgagtacactaaggaaaggcttgaggctattgacgatgagttcaagctttaccgttgtcatacgatcttgaactgtgctcgtgcgtgtcctaagggtttgaacccgggcaagcagatcgcgcacatcaagcaacttcagcgttgaagtattattgtgcggtcacagttaatgtttgaagctaataaatcttcacgaagtctttgattttggatttattcttgtattttgttgttgccgattattagcacctgtgaaagaaactattttggcaagttttccaaagttgatgagctttgtggttgaatcttgctgaaaaaaataatctctcttttaagtaataaaactgaagaacttaaatttcatct

SEQ ID NO: 52150 - protein, 281 aa, Glycine max
  peptide (1)..(281): Ceres Seq. ID no. 15220430
  misc_feature (66)..(129): Pfam Name: 2Fe-2S iron-sulfur cluster binding domain Pfam Description: 2Fe-2S iron-sulfur cluster binding domain
  misc_feature (9)..(227): Homolog of NCBI NO: 28611030 NR Description: chimeric SDH2-RPS14 protein [Triticum aestivum]
  misc_feature (9)..(280): Homolog of NCBI NO: 4803711 NR Description: iron sulfur subunit of succinate dehydrogenase
  misc_feature (9)..(280): Homolog of NCBI NO: 5688947 NR Description: succinate dehydrogenase iron-protein subunit
  misc_feature (9)..(280): Homolog of NCBI NO: 28611029 NR Description: succinate dehydrogenase [Triticum aestivum]
  misc_feature (1)..(281): Homolog of NCBI NO: 21555840 NR Description: succinate dehydrogenase iron-protein subunit,
  misc_feature (1)..(281): Homolog of NCBI NO: 12049598 NR Description: mitochondrial succinate dehydrogenase
  misc_feature (1)..(281): Homolog of NCBI NO: 15232149 NR Description: succinate dehydrogenase, iron-sulphur subunit,
  misc_feature (1)..(281): Homolog of NCBI NO: 15237464 NR Description: succinate dehydrogenase, iron-sulphur subunit,
  misc_feature (1)..(281): Homolog of NCBI NO: 12049600 NR Description: mitochondrial succinate dehydrogenase
  misc_feature (1)..(281): Homolog of NCBI NO: 21593098 NR Description: succinate dehydrogenase iron-protein subunit-like
MSTGLIGRLVRTKPSRLTTAARLIPSRFTASVTEPESKSPSGGGGGKASNFKTFQIYRWNPDNPSKPELQDYKIDLKDCGPMVLDALIKIKNEMDPSLTFRRSCREGICGSCAMNIDGCNGLACLTKIEEGAKETTITPLPHMFVIKDLVVDMTNFYNQYKSIEPWLKRKNPASEPGKEILQSKKDRAKLDGMYECILCACCSTSCPSYWWNPESYLGPAALLHANRWISDSRDEYTKERLEAIDDEFKLYRCHTILNCARACPKGLNPGKQIAHIKQLQR

SEQ ID NO: 52151 - protein, 200 aa, Glycine max
  peptide (1)..(200): Ceres Seq. ID no. 15220431
  misc_feature (1)..(48): Pfam Name: 2Fe-2S iron-sulfur cluster binding domain Pfam Description: 2Fe-2S iron-sulfur cluster binding domain
  misc_feature (1)..(146): Homolog of NCBI NO: 28611030 NR Description: chimeric SDH2-RPS14 protein [Triticum aestivum]
  misc_feature (1)..(199): Homolog of NCBI NO: 4803711 NR Description: iron sulfur subunit of succinate dehydrogenase
  misc_feature (1)..(199): Homolog of NCBI NO: 5688947 NR Description: succinate dehydrogenase iron-protein subunit
  misc_feature (1)..(199): Homolog of NCBI NO: 28611029 NR Description: succinate dehydrogenase [Triticum aestivum]
  misc_feature (1)..(200): Homolog of NCBI NO: 21555840 NR Description: succinate dehydrogenase iron-protein subunit,
  misc_feature (1)..(200): Homolog of NCBI NO: 12049598 NR Description: mitochondrial succinate dehydrogenase
  misc_feature (1)..(200): Homolog of NCBI NO: 15232149 NR Description: succinate dehydrogenase, iron-sulphur subunit,
  misc_feature (1)..(200): Homolog of NCBI NO: 15237464 NR Description: succinate dehydrogenase, iron-sulphur subunit,
  misc_feature (1)..(200): Homolog of NCBI NO: 12049600 NR Description: mitochondrial succinate dehydrogenase
  misc_feature (1)..(200): Homolog of NCBI NO: 21593098 NR Description: succinate dehydrogenase iron-protein subunit-like
MVLDALIKIKNEMDPSLTFRRSCREGICGSCAMNIDGCNGLACLTKIEEGAKETTITPLPHMFVIKDLVVDMTNFYNQYKSIEPWLKRKNPASEPGKEILQSKKDRAKLDGMYECILCACCSTSCPSYWWNPESYLGPAALLHANRWISDSRDEYTKERLEAIDDEFKLYRCHTILNCARACPKGLNPGKQIAHIKQLQR

SEQ ID NO: 52152 - protein, 188 aa, Glycine max
  peptide (1)..(188): Ceres Seq. ID no. 15220432
  misc_feature (1)..(134): Homolog of NCBI NO: 28611030 NR Description: chimeric SDH2-RPS14 protein [Triticum aestivum]
  misc_feature (1)..(187): Homolog of NCBI NO: 4803711 NR Description: iron sulfur subunit of succinate dehydrogenase
  misc_feature (1)..(187): Homolog of NCBI NO: 5688947 NR Description: succinate dehydrogenase iron-protein subunit
  misc_feature (1)..(187): Homolog of NCBI NO: 28611029 NR Description: succinate dehydrogenase [Triticum aestivum]
  misc_feature (1)..(188): Homolog of NCBI NO: 21555840 NR Description: succinate dehydrogenase iron-protein subunit,
  misc_feature (1)..(188): Homolog of NCBI NO: 12049598 NR Description: mitochondrial succinate dehydrogenase
  misc_feature (1)..(188): Homolog of NCBI NO: 15232149 NR Description: succinate dehydrogenase, iron-sulphur subunit,
  misc_feature (1)..(188): Homolog of NCBI NO: 15237464 NR Description: succinate dehydrogenase, iron-sulphur subunit,
  misc_feature (1)..(188): Homolog of NCBI NO: 12049600 NR Description: mitochondrial succinate dehydrogenase
  misc_feature (1)..(188): Homolog of NCBI NO: 21593098 NR Description: succinate dehydrogenase iron-protein subunit-like
MDPSLTFRRSCREGICGSCAMNIDGCNGLACLTKIEEGAKETTITPLPHMFVIKDLVVDMTNFYNQYKSIEPWLKRKNPASEPGKEILQSKKDRAKLDGMYECILCACCSTSCPSYWWNPESYLGPAALLHANRWISDSRDEYTKERLEAIDDEFKLYRCHTILNCARACPKGLNPGKQIAHIKQLQR

SEQ ID NO: 52153 - DNA, 772 bp, Glycine max
  misc_feature (1)..(772): Ceres Seq. ID no. 15178329
cgccgcggaatcccgatatttatttttcttgcgttccggtccccaggcttcgagttatttccctggtctggtgctcgcgcggcggcggcggcggcggagggtttgcgtcggcgctctcgcgagctagggtttcgggccgaggaggaggaggagcgagatggaggaggtgacggagggggtcaagaacctggccgtcacggagccgcacaagaagaaccggatccaggtctccaacacgaagaagccgctcttcttctatgtcaacctcgccaagaggtacatgcagatgcataacgaggtggaactctccgctctcggcatggctatcgccactgtggtgacagttgccgaaattctgaaaaataatggccttgctgttgaaaagaaaatcatgacatccactgttgatgtcaatgatgaatcaaggggccgcccgatgcagaaggctaagattgaaatagtgctgggcaagacggagaacttcgacgagctgatggccgccgccgcggaggagagggaagtcgcagccgccgaggagggcgaggagcagggctaataaactgtcttgagccggctgttgtagcttttatttagtacttgctgctaggttgtgtgttatcttctcttggccagcaagagataggtacttgtgtaaccaaagagttctttgtatttgtttcgtctccgtggtagtttaatgtcgatggtattctggttcactcaaatgatatgccttgtgttttattcgttttattatttggtgctgtttgtc

SEQ ID NO: 52154 - protein, 132 aa, Glycine max
  peptide (1)..(132): Ceres Seq. ID no. 15178330
  misc_feature (22)..(129): Homolog of NCBI NO: 8745040 NR Description: conserved hypothetical protein L6293.01
  misc_feature (22)..(129): Homolog of NCBI NO: 15029401 NR Description: unknown [Leishmania infantum]
  misc_feature (12)..(126): Homolog of NCBI NO: 15229322 NR Description: expressed protein [Arabidopsis thaliana]
  misc_feature (6)..(127): Homolog of NCBI NO: 34910240 NR Description: OSJNBa0089K24.4 [Oryza sativa (japonica
  misc_feature (1)..(126): Homolog of NCBI NO: 18403464 NR Description: expressed protein [Arabidopsis thaliana]
  misc_feature (1)..(127): Homolog of NCBI NO: 18397011 NR Description: expressed protein [Arabidopsis thaliana]
MEEVTEGVKNLAVTEPHKKNRIQVSNTKKPLFFYVNLAKRYMQMHNEVELSALGMAIATVVTVAEILKNNGLAVEKKIMTSTVDVNDESRGRPMQKAKIEIVLGKTENFDELMAAAAEEREVAAAEEGEEQG

SEQ ID NO: 52155 - protein, 97 aa, Glycine max
  peptide (1)..(97): Ceres Seq. ID no. 15178331
RRGIPIFIFLAFRSPGFELFPWSGARAAAAAAEGLRRRSRELGFRAEEEEERDGGGDGGGQEPGRHGAAQEEPDPGLQHEEAALLLCQPRQEVHADA

SEQ ID NO: 52156 - protein, 91 aa, Glycine max
  peptide (1)..(91): Ceres Seq. ID no. 15178332
  misc_feature (1)..(88): Homolog of NCBI NO: 8745040 NR Description: conserved hypothetical protein L6293.01
  misc_feature (1)..(88): Homolog of NCBI NO: 15029401 NR Description: unknown [Leishmania infantum]
  misc_feature (1)..(85): Homolog of NCBI NO: 15229322 NR Description: expressed protein [Arabidopsis thaliana]
  misc_feature (1)..(86): Homolog of NCBI NO: 34910240 NR Description: OSJNBa0089K24.4 [Oryza sativa (japonica
  misc_feature (1)..(85): Homolog of NCBI NO: 18403464 NR Description: expressed protein [Arabidopsis thaliana]
  misc_feature (1)..(86): Homolog of NCBI NO: 18397011 NR Description: expressed protein [Arabidopsis thaliana]
MQMHNEVELSALGMAIATVVTVAEILKNNGLAVEKKIMTSTVDVNDESRGRPMQKAKIEIVLGKTENFDELMAAAAEEREVAAAEEGEEQG

SEQ ID NO: 52157 - DNA, 694 bp, Glycine max
  misc_feature (1)..(694): Ceres Seq. ID no. 13594776
aaatcgacccccgtggccgtgggaagcagggcgtcgcctcggtcaaatccggcggcggcggagggggagtcgtgggccgcaaggctgggctggcctgaccggaccgccgcgcgcgtgacccgcccggtgggatccttcgggccggcgccccaggaggatattcttcgcgctgggggtgcttgatttggatgaaaggagcgcgccgtcggcatgggtaccccctcgcagggctcggctgccgtggcggcggcccgggtcgacctctgcgcgctcgacctcatgcccgtcttcgccaaggagatgattgccggtggggtcgccggtgctttctccaagactgccatcgcgccgctcgagcgcctcaagatattgctacagactagaacaaatgagttcaggtctctcggagttctgaaatccttgaataaactgagaaaacatgatggcgtcttgggattttacaagggaaatggtgccagtgtgttaagaattgttccttatgctgcattacattatatttctttacagagggagtacgtagtaattgtgttgcatacttaccccacctgacatattcttttcgttatattttttcgagttcatttttattttttcaccaacatgtatactttacccactaggtggaatgttgtcactggatagtactatttgatgaagaaattgcagatacgtg

SEQ ID NO: 52158 - protein, 119 aa, Glycine max
  peptide (1)..(119): Ceres Seq. ID no. 13594777
  misc_feature (29)..(106): Homolog of NCBI NO: 127342 NR Description: Grave'S disease carrier protein (GDC)
  misc_feature (29)..(116): Homolog of NCBI NO: 28277902 NR Description: Similar to RIKEN cDNA 3110021G18 gene [Danio
  misc_feature (29)..(112): Homolog of NCBI NO: 27544933 NR Description: solute carrier family 25 , member 16
  misc_feature (29)..(106): Homolog of NCBI NO: 30424808 NR Description: RIKEN cDNA 3110021G18 [Mus musculus]
  misc_feature (1)..(111): Homolog of NCBI NO: 7527717 NR Description: T5E21.6 [Arabidopsis thaliana]
  misc_feature (29)..(112): Homolog of NCBI NO: 27807213 NR Description: solute carrier family 25, member 16
  misc_feature (1)..(102): Homolog of NCBI NO: 34910456 NR Description: P0456F08.3 [Oryza sativa (japonica
  misc_feature (21)..(118): Homolog of NCBI NO: 15236140 NR Description: mitochondrial carrier protein family [Arabidopsis
  misc_feature (1)..(111): Homolog of NCBI NO: 15223820 NR Description: mitochondrial carrier protein family [Arabidopsis
  misc_feature (1)..(117): Homolog of NCBI NO: 20161078 NR Description: putative mitochondrial carrier
MGTPSQGSAAVAAARVDLCALDLMPVFAKEMIAGGVAGAFSKTAIAPLERLKILLQTRTNEFRSLGVLKSLNKLRKHDGVLGFYKGNGASVLRIVPYAALHYISLQREYVVIVLHTYPT

SEQ ID NO: 52159 - protein, 96 aa, Glycine max
  peptide (1)..(96): Ceres Seq. ID no. 13594778
  misc_feature (6)..(83): Homolog of NCBI NO: 127342 NR Description: Grave'S disease carrier protein (GDC)
  misc_feature (6)..(93): Homolog of NCBI NO: 28277902 NR Description: Similar to RIKEN cDNA 3110021G18 gene [Danio
  misc_feature (6)..(89): Homolog of NCBI NO: 27544933 NR Description: solute carrier family 25 , member 16
  misc_feature (6)..(83): Homolog of NCBI NO: 30424808 NR Description: RIKEN cDNA 3110021G18 [Mus musculus]
  misc_feature (1)..(88): Homolog of NCBI NO: 7527717 NR Description: T5E21.6 [Arabidopsis thaliana]
  misc_feature (6)..(89): Homolog of NCBI NO: 27807213 NR Description: solute carrier family 25, member 16
  misc_feature (1)..(79): Homolog of NCBI NO: 34910456 NR Description: P0456F08.3 [Oryza sativa (japonica
  misc_feature (1)..(95): Homolog of NCBI NO: 15236140 NR Description: mitochondrial carrier protein family [Arabidopsis
  misc_feature (1)..(88): Homolog of NCBI NO: 15223820 NR Description: mitochondrial carrier protein family [Arabidopsis
  misc_feature (1)..(94): Homolog of NCBI NO: 20161078 NR Description: putative mitochondrial carrier
MPVFAKEMIAGGVAGAFSKTAIAPLERLKILLQTRTNEFRSLGVLKSLNKLRKHDGVLGFYKGNGASVLRIVPYAALHYISLQREYVVIVLHTYPT

SEQ ID NO: 52160 - protein, 89 aa, Glycine max
  peptide (1)..(89): Ceres Seq. ID no. 13594779
  misc_feature (1)..(76): Homolog of NCBI NO: 127342 NR Description: Grave'S disease carrier protein (GDC)
  misc_feature (1)..(86): Homolog of NCBI NO: 28277902 NR Description: Similar to RIKEN cDNA 3110021G18 gene [Danio
  misc_feature (1)..(82): Homolog of NCBI NO: 27544933 NR Description: solute carrier family 25 , member 16
  misc_feature (1)..(76): Homolog of NCBI NO: 30424808 NR Description: RIKEN cDNA 3110021G18 [Mus musculus]
  misc_feature (1)..(81): Homolog of NCBI NO: 7527717 NR Description: T5E21.6 [Arabidopsis thaliana]
  misc_feature (1)..(82): Homolog of NCBI NO: 27807213 NR Description: solute carrier family 25, member 16
  misc_feature (1)..(72): Homolog of NCBI NO: 34910456 NR Description: P0456F08.3 [Oryza sativa (japonica
  misc_feature (1)..(88): Homolog of NCBI NO: 15236140 NR Description: mitochondrial carrier protein family [Arabidopsis
  misc_feature (1)..(81): Homolog of NCBI NO: 15223820 NR Description: mitochondrial carrier protein family [Arabidopsis
  misc_feature (1)..(87): Homolog of NCBI NO: 20161078 NR Description: putative mitochondrial carrier
MIAGGVAGAFSKTAIAPLERLKILLQTRTNEFRSLGVLKSLNKLRKHDGVLGFYKGNGASVLRIVPYAALHYISLQREYVVIVLHTYPT

SEQ ID NO: 52161 - DNA, 758 bp, Glycine max
  misc_feature (1)..(758): Ceres Seq. ID no. 12609566
ttaaaaaaaaatgcgaaggctgctcgggaagatttctgggttcttgagcaatcgaactacggtgggagtggacaaaacagggaacaaatacttcaccagaaatgaagaggttgatggtatcatgaaagagaaaagatgggtgatatttaagggagaggaggatcctacctctattccagttgaatggatatgttggctgaatgggcagtgtaaaaaggctccaactccagaggaaatgatggaattgaaagcaagacgtgaatgtgttagacagaatgttgctattctcaagaaagaagaagaaaggatagccaaagaaggaagcaaaggaaaacgcgtcagcactggaaaagtcagtggtccagacttgaaaagttttattcagcaatttccagttgcttcagaaggtaaagaggttgaagaatcacctagtgcaatggatggcttaaggaatcctcaggagagcttagccgagaaagaaaaagatgagtctgagtcttcagagccaacaggatctggtgcatcttttagaccaggaacttggcaacctccaacttgagctttcattacaaccaagggccttgctgagcttgtattagccatgcgctgttttgaaaaatccatgcgtgatatatatttctccctcaagaattttgatataattcatgtgttatcaagtttctagaaatcttaattcattgataaacctttttgcttaaagaatatggccaataagacaacctgctttatgcatttgc

SEQ ID NO: 52162 - protein, 182 aa, Glycine max
  peptide (1)..(182): Ceres Seq. ID no. 12609567
  misc_feature (1)..(182): Homolog of NCBI NO: 30687433 NR Description: NADH:ubiquinone oxidoreductase family
MRRLLGKISGFLSNRTTVGVDKTGNKYFTRNEEVDGIMKEKRWVIFKGEEDPTSIPVEWICWLNGQCKKAPTPEEMMELKARRECVRQNVAILKKEEERIAKEGSKGKRVSTGKVSGPDLKSFIQQFPVASEGKEVEESPSAMDGLRNPQESLAEKEKDESESSEPTGSGASFRPGTWQPPT

SEQ ID NO: 52163 - protein, 145 aa, Glycine max
  peptide (1)..(145): Ceres Seq. ID no. 12609568
  misc_feature (1)..(145): Homolog of NCBI NO: 30687433 NR Description: NADH:ubiquinone oxidoreductase family
MKEKRWVIFKGEEDPTSIPVEWICWLNGQCKKAPTPEEMMELKARRECVRQNVAILKKEEERIAKEGSKGKRVSTGKVSGPDLKSFIQQFPVASEGKEVEESPSAMDGLRNPQESLAEKEKDESESSEPTGSGASFRPGTWQPPT

SEQ ID NO: 52164 - protein, 107 aa, Glycine max
  peptide (1)..(107): Ceres Seq. ID no. 12609569
  misc_feature (1)..(107): Homolog of NCBI NO: 30687433 NR Description: NADH:ubiquinone oxidoreductase family
MMELKARRECVRQNVAILKKEEERIAKEGSKGKRVSTGKVSGPDLKSFIQQFPVASEGKEVEESPSAMDGLRNPQESLAEKEKDESESSEPTGSGASFRPGTWQPPT

SEQ ID NO: 52165 - DNA, 1058 bp, Glycine max
  misc_feature (1)..(1058): Ceres Seq. ID no. 12609214
gatccgtagaatggcttcttcgtcttcgtctccgtctcctacggcgatgaaggaaggagactactacccaaactggacggagcttccaccggagctgacgtcatcgattcttcaccgcctcggcgcgatcgagatagtggaaaccgctcggagagtatgcagatcgtggcgtcgcgtctgcaaagacccttcgatgtggcgcaaaatcgacatgcgtaacctcggagaccatggggacatgtactacgaggaattgtgccgtcacgcagttgatcttagccaaggagggttggttgagatcaatctctgccacttcgctactgattctctcctcagctacatcgctgatagttcaagtaacctgagaagccttaaagttgcacaatgctacgaaataacaagcgagggacttatagaagcagctgccaagcttccgttgcttgaagaactcgaggtctcatactgctcattatcagaagagtctctcaaagtcataggcaagtcttgtccaaacctcaagaccttgaagaaaaactgcgtcggttacaggcgtcctcgagacgagtctgatgacgtcgctctagcaatcgccgaaacaatgccaggacttcgccacctccagctcttcggggacaggttaacagacgttggtttaaacgccattctcgacggttgtcctaacctggaacatcttgatctgcgccagtgtttcaacgttgaacttgttgggtatctggagaagcgatgtctcgagagggtcaaagttgtgagacgccctaatgactcggttcatgattacccgttcgatgcaacggttaacgacgtgtcttcatcagacgatggcgacccttatggtttatctgatgttgatataatgtcggaagatgagttttactatgatgacctgtcagaagatgctagtgacaactctgactttgacccgtacgaatattattattaggattggatctgtgtttctaaatgcaatggattcgcatgtaataaaaccttttaaaactccttcacgacctcctctaatcatgcttgtaatttcgttg

SEQ ID NO: 52166 - protein, 319 aa, Glycine max
  peptide (1)..(319): Ceres Seq. ID no. 12609215
  misc_feature (203)..(226): Pfam Name: Leucine Rich Repeat Pfam Description: Leucine Rich Repeat
  misc_feature (85)..(275): Homolog of NCBI NO: 15236356 NR Description: putative nodulin; protein id: At4g03630.1
  misc_feature (24)..(269): Homolog of NCBI NO: 18412949 NR Description: F-box protein family, AtFBL21; protein id:
  misc_feature (3)..(269): Homolog of NCBI NO: 25376523 NR Description: N7-like protein [imported] - Arabidopsis thaliana
  misc_feature (17)..(285): Homolog of NCBI NO: 25376524 NR Description: N7-like protein [imported] - Arabidopsis thaliana
  misc_feature (17)..(278): Homolog of NCBI NO: 18412949 NR Description: F-box protein family, AtFBL21; protein id:
  misc_feature (4)..(247): Homolog of NCBI NO: 30692594 NR Description: predicted protein [Arabidopsis thaliana]
  misc_feature (4)..(312): Homolog of NCBI NO: 18412951 NR Description: F-box protein family, AtFBL22; protein id:
  misc_feature (2)..(265): Homolog of NCBI NO: 18412953 NR Description: F-box protein family, AtFBL9/AtFBL23; protein id:
  misc_feature (6)..(317): Homolog of NCBI NO: 21593361 NR Description: F-box protein family, AtFBL20 [Arabidopsis
  misc_feature (6)..(317): Homolog of NCBI NO: 18412947 NR Description: F-box protein family, AtFBL20
IRRMASSSSSPSPTAMKEGDYYPNWTELPPELTSSILHRLGAIEIVETARRVCRSWRRVCKDPSMWRKIDMRNLGDHGDMYYEELCRHAVDLSQGGLVEINLCHFATDSLLSYIADSSSNLRSLKVAQCYEITSEGLIEAAAKLPLLEELEVSYCSLSEESLKVIGKSCPNLKTLKKNCVGYRRPRDESDDVALAIAETMPGLRHLQLFGDRLTDVGLNAILDGCPNLEHLDLRQCFNVELVGYLEKRCLERVKVVRRPNDSVHDYPFDATVNDVSSSDDGDPYGLSDVDIMSEDEFYYDDLSEDASDNSDFDPYEYYY

SEQ ID NO: 52167 - protein, 316 aa, Glycine max
  peptide (1)..(316): Ceres Seq. ID no. 12609216
  misc_feature (200)..(223): Pfam Name: Leucine Rich Repeat Pfam Description: Leucine Rich Repeat
  misc_feature (82)..(272): Homolog of NCBI NO: 15236356 NR Description: putative nodulin; protein id: At4g03630.1
  misc_feature (21)..(266): Homolog of NCBI NO: 18412949 NR Description: F-box protein family, AtFBL21; protein id:
  misc_feature (1)..(266): Homolog of NCBI NO: 25376523 NR Description: N7-like protein [imported] - Arabidopsis thaliana
  misc_feature (14)..(282): Homolog of NCBI NO: 25376524 NR Description: N7-like protein [imported] - Arabidopsis thaliana
  misc_feature (14)..(275): Homolog of NCBI NO: 18412949 NR Description: F-box protein family, AtFBL21; protein id:
  misc_feature (1)..(244): Homolog of NCBI NO: 30692594 NR Description: predicted protein [Arabidopsis thaliana]
  misc_feature (1)..(309): Homolog of NCBI NO: 18412951 NR Description: F-box protein family, AtFBL22; protein id:
  misc_feature (1)..(262): Homolog of NCBI NO: 18412953 NR Description: F-box protein family, AtFBL9/AtFBL23; protein id:
  misc_feature (3)..(314): Homolog of NCBI NO: 21593361 NR Description: F-box protein family, AtFBL20 [Arabidopsis
  misc_feature (3)..(314): Homolog of NCBI NO: 18412947 NR Description: F-box protein family, AtFBL20
MASSSSSPSPTAMKEGDYYPNWTELPPELTSSILHRLGAIEIVETARRVCRSWRRVCKDPSMWRKIDMRNLGDHGDMYYEELCRHAVDLSQGGLVEINLCHFATDSLLSYIADSSSNLRSLKVAQCYEITSEGLIEAAAKLPLLEELEVSYCSLSEESLKVIGKSCPNLKTLKKNCVGYRRPRDESDDVALAIAETMPGLRHLQLFGDRLTDVGLNAILDGCPNLEHLDLRQCFNVELVGYLEKRCLERVKVVRRPNDSVHDYPFDATVNDVSSSDDGDPYGLSDVDIMSEDEFYYDDLSEDASDNSDFDPYEYYY

SEQ ID NO: 52168 - protein, 304 aa, Glycine max
  peptide (1)..(304): Ceres Seq. ID no. 12609217
  misc_feature (188)..(211): Pfam Name: Leucine Rich Repeat Pfam Description: Leucine Rich Repeat
  misc_feature (70)..(260): Homolog of NCBI NO: 15236356 NR Description: putative nodulin; protein id: At4g03630.1
  misc_feature (9)..(254): Homolog of NCBI NO: 18412949 NR Description: F-box protein family, AtFBL21; protein id:
  misc_feature (1)..(254): Homolog of NCBI NO: 25376523 NR Description: N7-like protein [imported] - Arabidopsis thaliana
  misc_feature (2)..(270): Homolog of NCBI NO: 25376524 NR Description: N7-like protein [imported] - Arabidopsis thaliana
  misc_feature (2)..(263): Homolog of NCBI NO: 18412949 NR Description: F-box protein family, AtFBL21; protein id:
  misc_feature (1)..(232): Homolog of NCBI NO: 30692594 NR Description: predicted protein [Arabidopsis thaliana]
  misc_feature (1)..(297): Homolog of NCBI NO: 18412951 NR Description: F-box protein family, AtFBL22; protein id:
  misc_feature (1)..(250): Homolog of NCBI NO: 18412953 NR Description: F-box protein family, AtFBL9/AtFBL23; protein id:
  misc_feature (1)..(302): Homolog of NCBI NO: 21593361 NR Description: F-box protein family, AtFBL20 [Arabidopsis
  misc_feature (1)..(302): Homolog of NCBI NO: 18412947 NR Description: F-box protein family, AtFBL20
MKEGDYYPNWTELPPELTSSILHRLGAIEIVETARRVCRSWRRVCKDPSMWRKIDMRNLGDHGDMYYEELCRHAVDLSQGGLVEINLCHFATDSLLSYIADSSSNLRSLKVAQCYEITSEGLIEAAAKLPLLEELEVSYCSLSEESLKVIGKSCPNLKTLKKNCVGYRRPRDESDDVALAIAETMPGLRHLQLFGDRLTDVGLNAILDGCPNLEHLDLRQCFNVELVGYLEKRCLERVKVVRRPNDSVHDYPFDATVNDVSSSDDGDPYGLSDVDIMSEDEFYYDDLSEDASDNSDFDPYEYYY

SEQ ID NO: 52169 - DNA, 1229 bp, Glycine max
  misc_feature (1)..(1229): Ceres Seq. ID no. 13594727
attaggcagagaagagaaaaatgggtaaggatttatccaaacgtgtcctcacttttctgatattgatctcgttactggcggtggcaatgaaccttctgtccacggtagaggcacagaacaagaagaagccgaggagagatgttcctctagtgaaaggtctctcatggagcttttaccagaaagcatgtccaaaagtggaaagcatcatcaggaaagagctcaagaaagtcttcaagagagacattggtttagccgcagccatccttcgaatacatttccatgactgcttcgttcagggatgtgaagcatcagtgctgctagatggatcagcgagtggaccaggagagcaatcatcgatcccgaatctgacactccgtcaagccgcctttgtcgtcatcaataaccttcgtgcactcgtccacaagcagtgtggtcaagtcgtctcttgctccgacatcctcgctctcgccgcccgtgactccgtcgtcctttcaggagggccagactatgctgtaccacttggccgacgcgactcactagcattcgcgagccagaacacaacgttaaacaacttgccgccaccattcgccaacgcgagccaactcatcgccgacttcgccaatagaaacctcaacatcaccgacttagttgcactctccggtggtcacaccatcggaatcgcgcattgcccgtctttcacagaccggctctacccgaaccaagacccaacaatgaacaagtccttcgcgaacaacctcaaacgcacttgccccaccgctaactcgagcaacacgcaagtgaatgacataaggagccctgacgtgttcgacaataagtactacgttgatctcatgaaccgacaagggctgttcacatcagaccaggacctgttcacggacaagaggacacgtggtatcgtggagagctttgcgatcgaccagaagctattttttgatcattttgtggtggggatgatcaagatgggccagatgagtgtcttgacggggtcacaaggagagattcgtgcaaactgttccgccagaaacactgaaagtttcatgtctgttttggaagaaggcatactcgaggaggctctttccatgatgtagatgaaaccatataaaatatcgcctcttattttcctttgactttgttttttttagttgacgcacttgtggtttgtggaatgctttaagactatctgataaataagagtgttgttttatctt

SEQ ID NO: 52170 - protein, 362 aa, Glycine max
  peptide (1)..(362): Ceres Seq. ID no. 13594728
  misc_feature (63)..(306): Pfam Name: Peroxidase Pfam Description: Peroxidase
  misc_feature (42)..(362): Homolog of NCBI NO: 34905834 NR Description: putative peroxidase [Oryza sativa (japonica
  misc_feature (11)..(342): Homolog of NCBI NO: 34905838 NR Description: putative peroxidase [Oryza sativa (japonica
  misc_feature (9)..(342): Homolog of NCBI NO: 7433084 NR Description: probable peroxidase (EC 1.11.1.7) prxr1 - spinach
  misc_feature (12)..(345): Homolog of NCBI NO: 1084393 NR Description: peroxidase (EC 1.11.1.7) precursor - parsley
  misc_feature (41)..(360): Homolog of NCBI NO: 7433081 NR Description: probable peroxidase (EC 1.11.1.7) (clone PC42) -
  misc_feature (13)..(362): Homolog of NCBI NO: 1389835 NR Description: peroxidase [Linum usitatissimum]
  misc_feature (9)..(361): Homolog of NCBI NO: 478409 NR Description: peroxidase (EC 1.11.1.7), cationic - adzuki bean
  misc_feature (18)..(357): Homolog of NCBI NO: 14031049 NR Description: peroxidase [Nicotiana tabacum]
  misc_feature (1)..(362): Homolog of NCBI NO: 1402914 NR Description: peroxidase [Arabidopsis thaliana]
  misc_feature (1)..(362): Homolog of NCBI NO: 15217539 NR Description: peroxidase, putative [Arabidopsis thaliana]
MGKDLSKRVLTFLILISLLAVAMNLLSTVEAQNKKKPRRDVPLVKGLSWSFYQKACPKVESIIRKELKKVFKRDIGLAAAILRIHFHDCFVQGCEASVLLDGSASGPGEQSSIPNLTLRQAAFVVINNLRALVHKQCGQVVSCSDILALAARDSVVLSGGPDYAVPLGRRDSLAFASQNTTLNNLPPPFANASQLIADFANRNLNITDLVALSGGHTIGIAHCPSFTDRLYPNQDPTMNKSFANNLKRTCPTANSSNTQVNDIRSPDVFDNKYYVDLMNRQGLFTSDQDLFTDKRTRGIVESFAIDQKLFFDHFVVGMIKMGQMSVLTGSQGEIRANCSARNTESFMSVLEEGILEEALSMM

SEQ ID NO: 52171 - protein, 340 aa, Glycine max
  peptide (1)..(340): Ceres Seq. ID no. 13594729
  misc_feature (41)..(284): Pfam Name: Peroxidase Pfam Description: Peroxidase
  misc_feature (20)..(340): Homolog of NCBI NO: 34905834 NR Description: putative peroxidase [Oryza sativa (japonica
  misc_feature (1)..(320): Homolog of NCBI NO: 34905838 NR Description: putative peroxidase [Oryza sativa (japonica
  misc_feature (1)..(320): Homolog of NCBI NO: 7433084 NR Description: probable peroxidase (EC 1.11.1.7) prxr1 - spinach
  misc_feature (1)..(323): Homolog of NCBI NO: 1084393 NR Description: peroxidase (EC 1.11.1.7) precursor - parsley
  misc_feature (19)..(338): Homolog of NCBI NO: 7433081 NR Description: probable peroxidase (EC 1.11.1.7) (clone PC42) -
  misc_feature (1)..(340): Homolog of NCBI NO: 1389835 NR Description: peroxidase [Linum usitatissimum]
  misc_feature (1)..(339): Homolog of NCBI NO: 478409 NR Description: peroxidase (EC 1.11.1.7), cationic - adzuki bean
  misc_feature (1)..(335): Homolog of NCBI NO: 14031049 NR Description: peroxidase [Nicotiana tabacum]
  misc_feature (1)..(340): Homolog of NCBI NO: 1402914 NR Description: peroxidase [Arabidopsis thaliana]
  misc_feature (1)..(340): Homolog of NCBI NO: 15217539 NR Description: peroxidase, putative [Arabidopsis thaliana]
MNLLSTVEAQNKKKPRRDVPLVKGLSWSFYQKACPKVESIIRKELKKVFKRDIGLAAAILRIHFHDCFVQGCEASVLLDGSASGPGEQSSIPNLTLRQAAFVVINNLRALVHKQCGQVVSCSDILALAARDSVVLSGGPDYAVPLGRRDSLAFASQNTTLNNLPPPFANASQLIADFANRNLNITDLVALSGGHTIGIAHCPSFTDRLYPNQDPTMNKSFANNLKRTCPTANSSNTQVNDIRSPDVFDNKYYVDLMNRQGLFTSDQDLFTDKRTRGIVESFAIDQKLFFDHFVVGMIKMGQMSVLTGSQGEIRANCSARNTESFMSVLEEGILEEALSMM

SEQ ID NO: 52172 - DNA, 660 bp, Glycine max
  misc_feature (1)..(660): Ceres Seq. ID no. 13594789
actgaaactctccacagaagaagaagataacatggcgacaagcgcatctgctttgctcacacccacaactttctcctctacaatctcccagaaacacccgaactccatctcattccacggcctccgtcctctccgcctcggtggctcctcatctgccttacccaagctatccaccacctccggaagaagatcttcctcctccgccgtcgtgagagccgagctcagcccatccgtcgttattagcctcagcacaggtctctccctcttcctaggccggttcgtcttcttcaacttccagagagagaatgtggctaaacaggtgccggagcagaacgggaagacccacttcgaagcgggagatgatcgtgccaaggagtacgtaagcctcttgaaatcgaacgaccctgttggattcaacatcgtggatgttcttgcttggggttctattggtcacatcgttgcttactatgttttggccacttctagcaatggctacgatccaagcttctttggctgattcattcaaactatatctctctcgtttatgtatatgtttgacttgtatggcaagttacccaatctagtcaccaatctttgtttcttctgcttgtttctgcctctgtgggtcttcctttcgtttgaaacatattatatttcgtg

SEQ ID NO: 52173 - protein, 171 aa, Glycine max
  peptide (1)..(171): Ceres Seq. ID no. 13594790
  misc_feature (73)..(167): Pfam Name: Photosystem I psaG / psaK Pfam Description: Photosystem I psaG / psaK
  misc_feature (49)..(158): Homolog of NCBI NO: 12831160 NR Description: PsaG-like protein [Dunaliella salina]
  misc_feature (73)..(110): Homolog of NCBI NO: 131193 NR Description: Photosystem I reaction center subunit V (PSI-G)
  misc_feature (49)..(162): Homolog of NCBI NO: 131191 NR Description: Photosystem I reaction center subunit V, precursor (PSI-G) (Light-harvesting complex I 10 kDa protein)
  misc_feature (64)..(166): Homolog of NCBI NO: 17369611 NR Description: Photosystem I reaction center subunit V,
  misc_feature (44)..(171): Homolog of NCBI NO: 131192 NR Description: Photosystem I reaction center subunit V,
  misc_feature (12)..(170): Homolog of NCBI NO: 131194 NR Description: Photosystem I reaction center subunit V,
  misc_feature (11)..(171): Homolog of NCBI NO: 15222757 NR Description: photosystem I subunit V precursor -related
LKLSTEEEDNMATSASALLTPTTFSSTISQKHPNSISFHGLRPLRLGGSSSALPKLSTTSGRRSSSSAVVRAELSPSVVISLSTGLSLFLGRFVFFNFQRENVAKQVPEQNGKTHFEAGDDRAKEYVSLLKSNDPVGFNIVDVLAWGSIGHIVAYYVLATSSNGYDPSFFG

SEQ ID NO: 52174 - protein, 161 aa, Glycine max
  peptide (1)..(161): Ceres Seq. ID no. 13594791
  misc_feature (63)..(157): Pfam Name: Photosystem I psaG / psaK Pfam Description: Photosystem I psaG / psaK
  misc_feature (39)..(148): Homolog of NCBI NO: 12831160 NR Description: PsaG-like protein [Dunaliella salina]
  misc_feature (63)..(100): Homolog of NCBI NO: 131193 NR Description: Photosystem I reaction center subunit V (PSI-G)
  misc_feature (39)..(152): Homolog of NCBI NO: 131191 NR Description: Photosystem I reaction center subunit V, precursor (PSI-G) (Light-harvesting complex I 10 kDa protein)
  misc_feature (54)..(156): Homolog of NCBI NO: 17369611 NR Description: Photosystem I reaction center subunit V,
  misc_feature (34)..(161): Homolog of NCBI NO: 131192 NR Description: Photosystem I reaction center subunit V,
  misc_feature (2)..(160): Homolog of NCBI NO: 131194 NR Description: Photosystem I reaction center subunit V,
  misc_feature (1)..(161): Homolog of NCBI NO: 15222757 NR Description: photosystem I subunit V precursor -related
MATSASALLTPTTFSSTISQKHPNSISFHGLRPLRLGGSSSALPKLSTTSGRRSSSSAVVRAELSPSVVISLSTGLSLFLGRFVFFNFQRENVAKQVPEQNGKTHFEAGDDRAKEYVSLLKSNDPVGFNIVDVLAWGSIGHIVAYYVLATSSNGYDPSFFG

SEQ ID NO: 52175 - DNA, 828 bp, Glycine max
  misc_feature (1)..(828): Ceres Seq. ID no. 14302000
acttccattgtatcttttctagggtttttaaggtttccgcacgaatcttcaatacacgtatcaatatcatcatgactaccgaagagaaagagatcctcgccgccaaattggaagagcagaagatcgatcttgataagcctgaggttgaggacgctgacgacaacgatgaggatgactccgaagacgatgataaggatgatgatgcagagggacaagatggagagggaggcaagtcaaaacaaagcaggagtgagaagaagagtcgcaaagccatgttgaagcttgggatgaaacccatcactggtgttagccgtgtcaccatcaaaaagagcaagaacatcatgttcgtcatatcgaaacccgatgtgttcaagagccctgcgtcagacacttatgtgatcttcggagaggcaaagattgaggatttgagctctcagatccagtcccaggccgcagagcagttcaaggctccggatctcagcaacgttgtctcgcaaggtgaatcttcgtccagcgctgcagtggttcaagacgatgatgaggagattgacgaggatggtgttgacgcaaaggacgttgagttggtgatgacccaagcgggagtgactaggccaaaggctgtgaaagcgcttaaggctgctgatggagatattgtcactgccatcatggaacttaccacctaaatctaaatcgtttcaactttaaatgtggtgcctgtcaaaaatgagttggaattttgtttttcatgtttcctttgaagtggttttcagtgttgtatcagtataaacctcatagattattgaatttcagtttgatttgattttgaat

SEQ ID NO: 52176 - protein, 226 aa, Glycine max
  peptide (1)..(226): Ceres Seq. ID no. 14302001
  misc_feature (82)..(141): Pfam Name: NAC domain Pfam Description: NAC domain
  misc_feature (27)..(226): Homolog of NCBI NO: 18398710 NR Description: expressed protein [Arabidopsis thaliana]
  misc_feature (24)..(165): Homolog of NCBI NO: 15240731 NR Description: expressed protein [Arabidopsis thaliana]
  misc_feature (33)..(225): Homolog of NCBI NO: 34902238 NR Description: Putative nascent polypeptide associated complex
  misc_feature (22)..(226): Homolog of NCBI NO: 15235122 NR Description: alpha NAC -related [Arabidopsis thaliana]
  misc_feature (27)..(226): Homolog of NCBI NO: 15229149 NR Description: alpha NAC-related protein [Arabidopsis thaliana]
  misc_feature (27)..(226): Homolog of NCBI NO: 13899101 NR Description: alpha NAC-like protein [Arabidopsis thaliana]
  misc_feature (27)..(226): Homolog of NCBI NO: 32352154 NR Description: nascent polypeptide associated complex alpha
  misc_feature (24)..(226): Homolog of NCBI NO: 6752882 NR Description: nascent polypeptide associated complex alpha
  misc_feature (24)..(225): Homolog of NCBI NO: 34907258 NR Description: putative nascent polypeptide associated complex
  misc_feature (24)..(226): Homolog of NCBI NO: 15230476 NR Description: nascent polypeptide associated complex alpha
FHCIFSRVFKVSARIFNTRINIIMTTEEKEILAAKLEEQKIDLDKPEVEDADDNDEDDSEDDDKDDDAEGQDGEGGKSKQSRSEKKSRKAMLKLGMKPITGVSRVTIKKSKNIMFVISKPDVFKSPASDTYVIFGEAKIEDLSSQIQSQAAEQFKAPDLSNVVSQGESSSSAAVVQDDDEEIDEDGVDAKDVELVMTQAGVTRPKAVKALKAADGDIVTAIMELTT

SEQ ID NO: 52177 - protein, 203 aa, Glycine max
  peptide (1)..(203): Ceres Seq. ID no. 14302002
  misc_feature (59)..(118): Pfam Name: NAC domain Pfam Description: NAC domain
  misc_feature (4)..(203): Homolog of NCBI NO: 18398710 NR Description: expressed protein [Arabidopsis thaliana]
  misc_feature (1)..(142): Homolog of NCBI NO: 15240731 NR Description: expressed protein [Arabidopsis thaliana]
  misc_feature (10)..(202): Homolog of NCBI NO: 34902238 NR Description: Putative nascent polypeptide associated complex
  misc_feature (1)..(203): Homolog of NCBI NO: 15235122 NR Description: alpha NAC -related [Arabidopsis thaliana]
  misc_feature (4)..(203): Homolog of NCBI NO: 15229149 NR Description: alpha NAC-related protein [Arabidopsis thaliana]
  misc_feature (4)..(203): Homolog of NCBI NO: 13899101 NR Description: alpha NAC-like protein [Arabidopsis thaliana]
  misc_feature (4)..(203): Homolog of NCBI NO: 32352154 NR Description: nascent polypeptide associated complex alpha
  misc_feature (1)..(203): Homolog of NCBI NO: 6752882 NR Description: nascent polypeptide associated complex alpha
  misc_feature (1)..(202): Homolog of NCBI NO: 34907258 NR Description: putative nascent polypeptide associated complex
  misc_feature (1)..(203): Homolog of NCBI NO: 15230476 NR Description: nascent polypeptide associated complex alpha
MTTEEKEILAAKLEEQKIDLDKPEVEDADDNDEDDSEDDDKDDDAEGQDGEGGKSKQSRSEKKSRKAMLKLGMKPITGVSRVTIKKSKNIMFVISKPDVFKSPASDTYVIFGEAKIEDLSSQIQSQAAEQFKAPDLSNVVSQGESSSSAAVVQDDDEEIDEDGVDAKDVELVMTQAGVTRPKAVKALKAADGDIVTAIMELTT

SEQ ID NO: 52178 - protein, 136 aa, Glycine max
  peptide (1)..(136): Ceres Seq. ID no. 14302003
  misc_feature (1)..(51): Pfam Name: NAC domain Pfam Description: NAC domain
  misc_feature (1)..(136): Homolog of NCBI NO: 18398710 NR Description: expressed protein [Arabidopsis thaliana]
  misc_feature (1)..(75): Homolog of NCBI NO: 15240731 NR Description: expressed protein [Arabidopsis thaliana]
  misc_feature (1)..(135): Homolog of NCBI NO: 34902238 NR Description: Putative nascent polypeptide associated complex
  misc_feature (1)..(136): Homolog of NCBI NO: 15235122 NR Description: alpha NAC -related [Arabidopsis thaliana]
  misc_feature (1)..(136): Homolog of NCBI NO: 15229149 NR Description: alpha NAC-related protein [Arabidopsis thaliana]
  misc_feature (1)..(136): Homolog of NCBI NO: 13899101 NR Description: alpha NAC-like protein [Arabidopsis thaliana]
  misc_feature (1)..(136): Homolog of NCBI NO: 32352154 NR Description: nascent polypeptide associated complex alpha
  misc_feature (1)..(136): Homolog of NCBI NO: 6752882 NR Description: nascent polypeptide associated complex alpha
  misc_feature (1)..(135): Homolog of NCBI NO: 34907258 NR Description: putative nascent polypeptide associated complex
  misc_feature (1)..(136): Homolog of NCBI NO: 15230476 NR Description: nascent polypeptide associated complex alpha
MLKLGMKPITGVSRVTIKKSKNIMFVISKPDVFKSPASDTYVIFGEAKIEDLSSQIQSQAAEQFKAPDLSNVVSQGESSSSAAVVQDDDEEIDEDGVDAKDVELVMTQAGVTRPKAVKALKAADGDIVTAIMELTT

SEQ ID NO: 52179 - DNA, 840 bp, Glycine max
  misc_feature (1)..(840): Ceres Seq. ID no. 13581866
ggattggatcccttccctccctctgattccattccatcggagcctggcgaggcgacggtggagtgaagatcttgacaggactgcctcgctccccacggcggcgaggcgagaccgaccggcgacgcgcggccagccctgaattgaatcagctaccatggcggccttgccattggctacagctgaagtctgcgacgccaactcgcacctcatcaccggcggcgagctgcgcgcgctgcagcccgtcttccagatctacgggaggcggcaggtcttcgcgggccccatcgtgacgctcaaggtgttcgaggacaacgtgctcgtccgcgagttcctggaggagaagggccagggcagggtgctggtggtggacggcggcggcagcctgcggtgcgccatcctgggcggcaaccccgtccagcaggcgcagaacaacgggtgggcggggatcgtggtgaacgggtgcatccgggacgtggacgagatcaacgggtgcgacatcggcgtgcgcgccctcgcctcgcaccccatgaaggccaacaagaaggggatgggcgagaagcacgtcccggtcaccatcgcgggcaccaggatctgcgacggcgagtggctctacgccgacaccgacggcatcctcgtctccaggaccgagctcatcgtgtaggagaggccgccgcctcgttgtccgtgttgttccactatgtggttgtagttgcttgaattgaatgatgttgtatctcaacttgagattcagaagctctgaacttgtaataactgtaagcttaaattgcctgatcaaatggaatgaggaatgggaataaaattatctgttgcatgcctgtc

SEQ ID NO: 52180 - protein, 168 aa, Glycine max
  peptide (1)..(168): Ceres Seq. ID no. 13581867
  misc_feature (4)..(161): Pfam Name: Demethylmenaquinone methyltransferase Pfam Description: Demethylmenaquinone methyltransferase
  misc_feature (1)..(168): Homolog of NCBI NO: 23468849 NR Description: hypothetical protein [Pseudomonas syringae pv.
  misc_feature (4)..(162): Homolog of NCBI NO: 34497095 NR Description: S-adenosylmethionine:2-demethylmenaquinone
  misc_feature (8)..(166): Homolog of NCBI NO: 22978085 NR Description: hypothetical protein [Ralstonia metallidurans]
  misc_feature (1)..(166): Homolog of NCBI NO: 22982141 NR Description: hypothetical protein [Burkholderia fungorum]
  misc_feature (1)..(166): Homolog of NCBI NO: 17546073 NR Description: PROBABLE
  misc_feature (1)..(168): Homolog of NCBI NO: 15241161 NR Description: dimethylmenaquinone methyltransferase family
  misc_feature (6)..(168): Homolog of NCBI NO: 15232963 NR Description: dimethylmenaquinone methyltransferase family
  misc_feature (6)..(168): Homolog of NCBI NO: 21537415 NR Description: S-adenosylmethionine:2-demethylmenaquinone
  misc_feature (6)..(168): Homolog of NCBI NO: 15237348 NR Description: dimethylmenaquinone methyltransferase family
  misc_feature (1)..(168): Homolog of NCBI NO: 34910724 NR Description: S-adenosylmethionine:2-demethylmenaquinone
MAALPLATAEVCDANSHLITGGELRALQPVFQIYGRRQVFAGPIVTLKVFEDNVLVREFLEEKGQGRVLVVDGGGSLRCAILGGNPVQQAQNNGWAGIVVNGCIRDVDEINGCDIGVRALASHPMKANKKGMGEKHVPVTIAGTRICDGEWLYADTDGILVSRTELIV

SEQ ID NO: 52181 - DNA, 685 bp, Glycine max
  misc_feature (1)..(685): Ceres Seq. ID no. 12610177
aatcctccgtccgtagcaaacttttctccggttctcggcaaggaccagagtgatgatgatgaagaacaaagccggtggtgcgggtggcggtatgtccggatccggtgaaggagccggaccaacggccgcagcagccgcggcagcattacagaagcaaaaggcgttattacagagagtagagactgacatcacatctgtcgtcgataacttcacccaaatcgtcaatgtcgcgagggtgagcgatcttccggtgaagaactcgcaagaagcatacatgatggagatgcgagcttctaaaatggttcaagcagctgattctattttgaagctcgtatcggagctgaagcaaacagcgatcttctctggatttgcatcacttaacgaccatgtcgagcaaaggatcgcagagtttgatcaagaggctgagaagacaaatcgattgttggctagaataggggatgatgcatcagcgagtcttaaagagcttgaggcgcactattactcttctgctcagaggttgactccagacgtttaaagggatttagttaaatagcccaaatatttaggccactattcactagtctcggatcaaactctggttttaatgggcttttaacagaatctatttttttatttcaacttgtttcattcgtcaacatagaaggtagatatcaatactcttttt

SEQ ID NO: 52182 - protein, 160 aa, Glycine max
  peptide (1)..(160): Ceres Seq. ID no. 12610178
  misc_feature (26)..(152): Pfam Name: Surfeit locus protein 5 Pfam Description: Surfeit locus protein 5
  misc_feature (33)..(153): Homolog of NCBI NO: 6175073 NR Description: Surfeit locus protein 5
  misc_feature (33)..(156): Homolog of NCBI NO: 28866782 NR Description: Surf5b [Gallus gallus]
  misc_feature (26)..(152): Homolog of NCBI NO: 5803183 NR Description: surfeit 5 isoform a; surfeit locus protein 5
  misc_feature (26)..(152): Homolog of NCBI NO: 6755700 NR Description: surfeit gene 5 [Mus musculus]
  misc_feature (26)..(156): Homolog of NCBI NO: 19557695 NR Description: surfeit 5 isoform b; surfeit locus protein 5
  misc_feature (14)..(159): Homolog of NCBI NO: 34895594 NR Description: unnamed protein product [Oryza sativa (japonica
  misc_feature (3)..(159): Homolog of NCBI NO: 21553439 NR Description: unknown [Arabidopsis thaliana]
  misc_feature (3)..(159): Homolog of NCBI NO: 18394361 NR Description: expressed protein
  misc_feature (5)..(160): Homolog of NCBI NO: 18390833 NR Description: expressed protein
  misc_feature (1)..(160): Homolog of NCBI NO: 25407014 NR Description: protein T6D22.4 [imported] - Arabidopsis thaliana
MMMKNKAGGAGGGMSGSGEGAGPTAAAAAAALQKQKALLQRVETDITSVVDNFTQIVNVARVSDLPVKNSQEAYMMEMRASKMVQAADSILKLVSELKQTAIFSGFASLNDHVEQRIAEFDQEAEKTNRLLARIGDDASASLKELEAHYYSSAQRLTPDV

SEQ ID NO: 52183 - protein, 159 aa, Glycine max
  peptide (1)..(159): Ceres Seq. ID no. 12610179
  misc_feature (25)..(151): Pfam Name: Surfeit locus protein 5 Pfam Description: Surfeit locus protein 5
  misc_feature (32)..(152): Homolog of NCBI NO: 6175073 NR Description: Surfeit locus protein 5
  misc_feature (32)..(155): Homolog of NCBI NO: 28866782 NR Description: Surf5b [Gallus gallus]
  misc_feature (25)..(151): Homolog of NCBI NO: 5803183 NR Description: surfeit 5 isoform a; surfeit locus protein 5
  misc_feature (25)..(151): Homolog of NCBI NO: 6755700 NR Description: surfeit gene 5 [Mus musculus]
  misc_feature (25)..(155): Homolog of NCBI NO: 19557695 NR Description: surfeit 5 isoform b; surfeit locus protein 5
  misc_feature (13)..(158): Homolog of NCBI NO: 34895594 NR Description: unnamed protein product [Oryza sativa (japonica
  misc_feature (2)..(158): Homolog of NCBI NO: 21553439 NR Description: unknown [Arabidopsis thaliana]
  misc_feature (2)..(158): Homolog of NCBI NO: 18394361 NR Description: expressed protein
  misc_feature (4)..(159): Homolog of NCBI NO: 18390833 NR Description: expressed protein
  misc_feature (1)..(159): Homolog of NCBI NO: 25407014 NR Description: protein T6D22.4 [imported] - Arabidopsis thaliana
MMKNKAGGAGGGMSGSGEGAGPTAAAAAAALQKQKALLQRVETDITSVVDNFTQIVNVARVSDLPVKNSQEAYMMEMRASKMVQAADSILKLVSELKQTAIFSGFASLNDHVEQRIAEFDQEAEKTNRLLARIGDDASASLKELEAHYYSSAQRLTPDV

SEQ ID NO: 52184 - protein, 158 aa, Glycine max
  peptide (1)..(158): Ceres Seq. ID no. 12610180
  misc_feature (24)..(150): Pfam Name: Surfeit locus protein 5 Pfam Description: Surfeit locus protein 5
  misc_feature (31)..(151): Homolog of NCBI NO: 6175073 NR Description: Surfeit locus protein 5
  misc_feature (31)..(154): Homolog of NCBI NO: 28866782 NR Description: Surf5b [Gallus gallus]
  misc_feature (24)..(150): Homolog of NCBI NO: 5803183 NR Description: surfeit 5 isoform a; surfeit locus protein 5
  misc_feature (24)..(150): Homolog of NCBI NO: 6755700 NR Description: surfeit gene 5 [Mus musculus]
  misc_feature (24)..(154): Homolog of NCBI NO: 19557695 NR Description: surfeit 5 isoform b; surfeit locus protein 5
  misc_feature (12)..(157): Homolog of NCBI NO: 34895594 NR Description: unnamed protein product [Oryza sativa (japonica
  misc_feature (1)..(157): Homolog of NCBI NO: 21553439 NR Description: unknown [Arabidopsis thaliana]
  misc_feature (1)..(157): Homolog of NCBI NO: 18394361 NR Description: expressed protein
  misc_feature (3)..(158): Homolog of NCBI NO: 18390833 NR Description: expressed protein
  misc_feature (1)..(158): Homolog of NCBI NO: 25407014 NR Description: protein T6D22.4 [imported] - Arabidopsis thaliana
MKNKAGGAGGGMSGSGEGAGPTAAAAAAALQKQKALLQRVETDITSVVDNFTQIVNVARVSDLPVKNSQEAYMMEMRASKMVQAADSILKLVSELKQTAIFSGFASLNDHVEQRIAEFDQEAEKTNRLLARIGDDASASLKELEAHYYSSAQRLTPDV

SEQ ID NO: 52185 - DNA, 1077 bp, Glycine max
  misc_feature (1)..(1077): Ceres Seq. ID no. 13638750
gcattatcgcgttctcgttttccatagcaactgttcaccaaccagcatagcctgcgggctggttgcgcaatggcggcgggtcccttcgcgctccgcctagggccgcgcctcgcggcgccggccgtggcgagtgcgactaggggaggaggacggggaagtgaccgccctacggccagccgagcgctggtgtcaaagaagtcaaacaaggaccaccgtttgtggattaggaaagattcggctgggtcagggaagaaggctctttgtcttgttaatactgtttcaaaactaccgaatgaaagagaaactgtttatggtgcattggataggtggactgcttttgagtctgaatttccaattatagcagcggctaaagctttggagatgttgaaaaagcaaagaaaatggctacagattatccaggtaaccaagtggctgatgagtaaaggtcaggtgctgacatggacaacgtacgatacactgctgttggctctttctatggatggaagagtagakgargstgagtcamtttggaatactatctttcacacttatacacgctcagtgtgcacgaggtggttctctcggatgatccagagtttcaccacgcgccatatttcagacaaagtgttggagatatatgctgacacggaggaattgggcgtgcgtccacacgaggatacaccacgaggagtcgggcgagcacttgcaccttcagagcaggaagataagcagaagcctgtcctcgaaaaacactcgaagaagtggaagtgcatacacttcaatggtgagcgtgttcgtgtgcggagggcagagcctttggcctagcaaacgtcttctggataggttcggatgaacaaagagagtctcctctcctggacatatgtgatagctatagttcttccgaggtcytatrcgagcaygtcaggtagarcaaggtgtggaaatwgtaatrctctctagacaaatggataatatcatagtgcagggkgagarctggcaytactaatgatgttggtatccancacaygtgtaagttgtgatgtttcagacaggttgctgtcgtcttcggcaccatgt

SEQ ID NO: 52186 - protein, 251 aa, Glycine max
  peptide (1)..(251): Ceres Seq. ID no. 15220439
  misc_feature (73)..(229): Homolog of NCBI NO: 25406795 NR Description: hypothetical protein [imported] - Arabidopsis
  misc_feature (41)..(229): Homolog of NCBI NO: 30678929 NR Description: expressed protein [Arabidopsis thaliana]
  misc_feature (41)..(229): Homolog of NCBI NO: 18390413 NR Description: expressed protein [Arabidopsis thaliana]
  misc_feature (70)..(245): Homolog of NCBI NO: 34909686 NR Description: B1131G08.1 [Oryza sativa (japonica
  misc_feature (49)..(245): Homolog of NCBI NO: 7486589 NR Description: hypothetical protein F7J7.130 - Arabidopsis
  misc_feature (49)..(245): Homolog of NCBI NO: 18415645 NR Description: pentatricopeptide (PPR) repeat-containing protein
  misc_feature (34)..(240): Homolog of NCBI NO: 7485419 NR Description: hypothetical protein F13C5.140 - Arabidopsis
  misc_feature (34)..(246): Homolog of NCBI NO: 18415213 NR Description: pentatricopeptide (PPR) repeat-containing protein
  misc_feature (3)..(250): Homolog of NCBI NO: 34393638 NR Description: pentatricopeptide (PPR) repeat-containing
  misc_feature (148)..(148): Xaa is any aa, unknown or other
  misc_feature (149)..(149): Xaa is any aa, unknown or other
  misc_feature (150)..(150): Xaa is any aa, unknown or other
  misc_feature (153)..(153): Xaa is any aa, unknown or other
MAAGPFALRLGPRLAAPAVASATRGGGRGSDRPTASRALVSKKSNKDHRLWIRKDSAGSGKKALCLVNTVSKLPNERETVYGALDRWTAFESEFPIIAAAKALEMLKKQRKWLQIIQVTKWLMSKGQVLTWTTYDTLLLALSMDGRVXXXESXWNTIFHTYTRSVCTRWFSRMIQSFTTRHISDKVLEIYADTEELGVRPHEDTPRGVGRALAPSEQEDKQKPVLEKHSKKWKCIHFNGERVRVRRAEPLA

SEQ ID NO: 52187 - protein, 147 aa, Glycine max
  peptide (1)..(147): Ceres Seq. ID no. 15220440
  misc_feature (1)..(125): Homolog of NCBI NO: 25406795 NR Description: hypothetical protein [imported] - Arabidopsis
  misc_feature (1)..(125): Homolog of NCBI NO: 30678929 NR Description: expressed protein [Arabidopsis thaliana]
  misc_feature (1)..(125): Homolog of NCBI NO: 18390413 NR Description: expressed protein [Arabidopsis thaliana]
  misc_feature (1)..(141): Homolog of NCBI NO: 34909686 NR Description: B1131G08.1 [Oryza sativa (japonica
  misc_feature (1)..(141): Homolog of NCBI NO: 7486589 NR Description: hypothetical protein F7J7.130 - Arabidopsis
  misc_feature (1)..(141): Homolog of NCBI NO: 18415645 NR Description: pentatricopeptide (PPR) repeat-containing protein
  misc_feature (1)..(136): Homolog of NCBI NO: 7485419 NR Description: hypothetical protein F13C5.140 - Arabidopsis
  misc_feature (1)..(142): Homolog of NCBI NO: 18415213 NR Description: pentatricopeptide (PPR) repeat-containing protein
  misc_feature (1)..(146): Homolog of NCBI NO: 34393638 NR Description: pentatricopeptide (PPR) repeat-containing
  misc_feature (44)..(44): Xaa is any aa, unknown or other
  misc_feature (45)..(45): Xaa is any aa, unknown or other
  misc_feature (46)..(46): Xaa is any aa, unknown or other
  misc_feature (49)..(49): Xaa is any aa, unknown or other
MLKKQRKWLQIIQVTKWLMSKGQVLTWTTYDTLLLALSMDGRVXXXESXWNTIFHTYTRSVCTRWFSRMIQSFTTRHISDKVLEIYADTEELGVRPHEDTPRGVGRALAPSEQEDKQKPVLEKHSKKWKCIHFNGERVRVRRAEPLA

SEQ ID NO: 52188 - protein, 129 aa, Glycine max
  peptide (1)..(129): Ceres Seq. ID no. 15220441
  misc_feature (1)..(107): Homolog of NCBI NO: 25406795 NR Description: hypothetical protein [imported] - Arabidopsis
  misc_feature (1)..(107): Homolog of NCBI NO: 30678929 NR Description: expressed protein [Arabidopsis thaliana]
  misc_feature (1)..(107): Homolog of NCBI NO: 18390413 NR Description: expressed protein [Arabidopsis thaliana]
  misc_feature (1)..(123): Homolog of NCBI NO: 34909686 NR Description: B1131G08.1 [Oryza sativa (japonica
  misc_feature (1)..(123): Homolog of NCBI NO: 7486589 NR Description: hypothetical protein F7J7.130 - Arabidopsis
  misc_feature (1)..(123): Homolog of NCBI NO: 18415645 NR Description: pentatricopeptide (PPR) repeat-containing protein
  misc_feature (1)..(118): Homolog of NCBI NO: 7485419 NR Description: hypothetical protein F13C5.140 - Arabidopsis
  misc_feature (1)..(124): Homolog of NCBI NO: 18415213 NR Description: pentatricopeptide (PPR) repeat-containing protein
  misc_feature (1)..(128): Homolog of NCBI NO: 34393638 NR Description: pentatricopeptide (PPR) repeat-containing
  misc_feature (26)..(26): Xaa is any aa, unknown or other
  misc_feature (27)..(27): Xaa is any aa, unknown or other
  misc_feature (28)..(28): Xaa is any aa, unknown or other
  misc_feature (31)..(31): Xaa is any aa, unknown or other
MSKGQVLTWTTYDTLLLALSMDGRVXXXESXWNTIFHTYTRSVCTRWFSRMIQSFTTRHISDKVLEIYADTEELGVRPHEDTPRGVGRALAPSEQEDKQKPVLEKHSKKWKCIHFNGERVRVRRAEPLA

SEQ ID NO: 52189 - DNA, 602 bp, Glycine max
  misc_feature (1)..(602): Ceres Seq. ID no. 13594642
acaaccaacatcccaaccagcagcgatccatccatcctccacaatcagagcaagcgagcgaccaagaaaccatcacagcgaccatcatcttctctgcctccatggcggcgcaccagcagcagcaaccgcagcaggcggtggggttcgaggactacctgccggtgatggcggagcggctgggggaggagggcctgatggaggagctggcggcggggttccgcctgctcatggacccggcgtcgggcctcatcaccttccacagcctccgccgcaacgcgccgctgctgggcctgggcgccatgtccgacgacgacctccgcgggatgctcgccgagggcgacttcgacggcgacggcgcgctgtcccagatggagttctgcgtcctcatggtcaggctcagccccgacctcatggaccagccccgccggtggctcgacgacgccgtcgcccaggcctcccacttcctcttcaccagctaggcggagcatctggtgtcgatcggataggaaattaatcttcttcttcgttgttgttttttcttctctcccccgctgttcatagagtcaggattcaagaaaagaaagggcactgtcgattggttg

SEQ ID NO: 52190 - protein, 170 aa, Glycine max
  peptide (1)..(170): Ceres Seq. ID no. 13594643
  misc_feature (35)..(98): Pfam Name: Bindin Pfam Description: Bindin
  misc_feature (34)..(147): Homolog of NCBI NO: 4049421 NR Description: hypothetical protein [Equine herpesvirus 2]
QPTSQPAAIHPSSTIRASERPRNHHSDHHLLCLHGGAPAAATAAGGGVRGLPAGDGGAAGGGGPDGGAGGGVPPAHGPGVGPHHLPQPPPQRAAAGPGRHVRRRPPRDARRGRLRRRRRAVPDGVLRPHGQAQPRPHGPAPPVARRRRRPGLPLPLHQLGGASGVDRIGN

SEQ ID NO: 52191 - protein, 158 aa, Glycine max
  peptide (1)..(158): Ceres Seq. ID no. 13594644
  misc_feature (104)..(132): Pfam Name: EF hand Pfam Description: EF hand
  misc_feature (34)..(133): Homolog of NCBI NO: 543936 NR Description: CALTRACTIN (CENTRIN)
  misc_feature (34)..(133): Homolog of NCBI NO: 2920835 NR Description: centrin [Marsilea vestita]
  misc_feature (48)..(150): Homolog of NCBI NO: 25409016 NR Description: probable caltractin [imported] - Arabidopsis
  misc_feature (48)..(150): Homolog of NCBI NO: 21595257 NR Description: putative caltractin [Arabidopsis thaliana]
  misc_feature (33)..(150): Homolog of NCBI NO: 18407118 NR Description: calcium-binding protein, putative [Arabidopsis
  misc_feature (39)..(157): Homolog of NCBI NO: 15237043 NR Description: calcium-binding EF-hand family protein
  misc_feature (31)..(141): Homolog of NCBI NO: 21536724 NR Description: EF-hand Ca2+-binding protein CCD1 [Arabidopsis
  misc_feature (31)..(141): Homolog of NCBI NO: 15239651 NR Description: calcium-binding protein, putative [Arabidopsis
  misc_feature (46)..(142): Homolog of NCBI NO: 34910114 NR Description: B1100D10.32 [Oryza sativa (japonica
  misc_feature (34)..(158): Homolog of NCBI NO: 9255753 NR Description: EF-hand Ca2+-binding protein CCD1 [Triticum
NQHPNQQRSIHPPQSEQASDQETITATIIFSASMAAHQQQQPQQAVGFEDYLPVMAERLGEEGLMEELAAGFRLLMDPASGLITFHSLRRNAPLLGLGAMSDDDLRGMLAEGDFDGDGALSQMEFCVLMVRLSPDLMDQPRRWLDDAVAQASHFLFTS

SEQ ID NO: 52192 - protein, 125 aa, Glycine max
  peptide (1)..(125): Ceres Seq. ID no. 13594645
  misc_feature (71)..(99): Pfam Name: EF hand Pfam Description: EF hand
  misc_feature (1)..(100): Homolog of NCBI NO: 543936 NR Description: CALTRACTIN (CENTRIN)
  misc_feature (1)..(100): Homolog of NCBI NO: 2920835 NR Description: centrin [Marsilea vestita]
  misc_feature (15)..(117): Homolog of NCBI NO: 25409016 NR Description: probable caltractin [imported] - Arabidopsis
  misc_feature (15)..(117): Homolog of NCBI NO: 21595257 NR Description: putative caltractin [Arabidopsis thaliana]
  misc_feature (1)..(117): Homolog of NCBI NO: 18407118 NR Description: calcium-binding protein, putative [Arabidopsis
  misc_feature (6)..(124): Homolog of NCBI NO: 15237043 NR Description: calcium-binding EF-hand family protein
  misc_feature (1)..(108): Homolog of NCBI NO: 21536724 NR Description: EF-hand Ca2+-binding protein CCD1 [Arabidopsis
  misc_feature (1)..(108): Homolog of NCBI NO: 15239651 NR Description: calcium-binding protein, putative [Arabidopsis
  misc_feature (13)..(109): Homolog of NCBI NO: 34910114 NR Description: B1100D10.32 [Oryza sativa (japonica
  misc_feature (1)..(125): Homolog of NCBI NO: 9255753 NR Description: EF-hand Ca2+-binding protein CCD1 [Triticum
MAAHQQQQPQQAVGFEDYLPVMAERLGEEGLMEELAAGFRLLMDPASGLITFHSLRRNAPLLGLGAMSDDDLRGMLAEGDFDGDGALSQMEFCVLMVRLSPDLMDQPRRWLDDAVAQASHFLFTS

SEQ ID NO: 52193 - DNA, 1256 bp, Glycine max
  misc_feature (1)..(1256): Ceres Seq. ID no. 15227026
aaaatcctctctctctctctctgtttctcaatttctctggagaatcatggtgaatgccaaagggtcaaccaaaaaatcgaatcttgatcggttcctccattgcacaacacccttagtccctccccaatctctcccaaaggcggagattagaaaactaaatcgattgtggcatccttgggacagagaaaaggtagagtttttcaggcttagtgatctatgggattgctacgacgaatggagcgcgtacggagctagcgtccccattcatctcgccaacggcgaatctctcgttcaatactacgttccttacctctccgccatccagattttcacctctcattcctccttgatcagggaagaatctgaagatggggaaagctatccctttagtgactcaggtagcgatgagagtgtctccggggaagatggggtcttgcatctgaatgatcgtttgggttacctttatctccagtactttgagagatcagctccttatactagagtccctctcatggataagatcaatgagttggctcagagatatccgggtttgatgtcgttgagaagcgtagatctttctccagccagctggatgtctgttgcttggtaccctatttatcatataccaatgggaagaaccattaaagacttgtccacttgtttcctcacttaccacactctttcttcttctttccaagatatggagccggaagagaacggaggggagaaagagaggatgagaaaggaaggggaagacataactctcctcccatttgggatggctacttacaagatgcaaggcgatgtctggctttcgcacgaccacgatgaccaggagagattggcttcgctttgtagcgttgcggattcgtggctaaaacagcttagggtccaacatcatgacttcaactacttctgcaccatgtcgatgactagtcctcgtggctaaaaacaaacccggtttccatgtttgtttgtttgtctgctcattgtcatcgtaaaagtcccaccgtttctttgtttatggaaccgctggcgttttctaaaaagagtgatctggcttttgtagcgttttggttaggatatagcgttttaagacacctaaccttttgagaaaagtgtatgtcggtatatagagtttgttgtcttgttgaaacagagtaatcgttgttacttgttgcgtgttgaaacagagtaaatgctttcttgtaagtttatattacatcatccttcacttgaaactttttttgtgcctc

SEQ ID NO: 52194 - protein, 315 aa, Glycine max
  peptide (1)..(315): Ceres Seq. ID no. 15227027
  misc_feature (26)..(305): Pfam Name: Protein of unknown function (DUF789) Pfam Description: Protein of unknown function (DUF789)
  misc_feature (46)..(307): Homolog of NCBI NO: 19310572 NR Description: unknown protein [Arabidopsis thaliana]
  misc_feature (25)..(307): Homolog of NCBI NO: 30687867 NR Description: expressed protein [Arabidopsis thaliana]
  misc_feature (25)..(307): Homolog of NCBI NO: 21594686 NR Description: unknown [Arabidopsis thaliana]
  misc_feature (25)..(307): Homolog of NCBI NO: 18417136 NR Description: expressed protein [Arabidopsis thaliana]
  misc_feature (16)..(315): Homolog of NCBI NO: 7485906 NR Description: hypothetical protein F21B7.13 - Arabidopsis
  misc_feature (24)..(309): Homolog of NCBI NO: 22328289 NR Description: expressed protein [Arabidopsis thaliana]
  misc_feature (24)..(314): Homolog of NCBI NO: 25373431 NR Description: hypothetical protein AT4g03420 [imported] -
  misc_feature (16)..(315): Homolog of NCBI NO: 9280648 NR Description: F21B7.22 [Arabidopsis thaliana]
  misc_feature (16)..(315): Homolog of NCBI NO: 18958013 NR Description: At1g03610/F21B7_13 [Arabidopsis thaliana]
  misc_feature (16)..(315): Homolog of NCBI NO: 18379117 NR Description: expressed protein [Arabidopsis thaliana]
KSSLSLSVSQFLWRIMVNAKGSTKKSNLDRFLHCTTPLVPPQSLPKAEIRKLNRLWHPWDREKVEFFRLSDLWDCYDEWSAYGASVPIHLANGESLVQYYVPYLSAIQIFTSHSSLIREESEDGESYPFSDSGSDESVSGEDGVLHLNDRLGYLYLQYFERSAPYTRVPLMDKINELAQRYPGLMSLRSVDLSPASWMSVAWYPIYHIPMGRTIKDLSTCFLTYHTLSSSFQDMEPEENGGEKERMRKEGEDITLLPFGMATYKMQGDVWLSHDHDDQERLASLCSVADSWLKQLRVQHHDFNYFCTMSMTSPRG

SEQ ID NO: 52195 - protein, 300 aa, Glycine max
  peptide (1)..(300): Ceres Seq. ID no. 15227028
  misc_feature (11)..(290): Pfam Name: Protein of unknown function (DUF789) Pfam Description: Protein of unknown function (DUF789)
  misc_feature (31)..(292): Homolog of NCBI NO: 19310572 NR Description: unknown protein [Arabidopsis thaliana]
  misc_feature (10)..(292): Homolog of NCBI NO: 30687867 NR Description: expressed protein [Arabidopsis thaliana]
  misc_feature (10)..(292): Homolog of NCBI NO: 21594686 NR Description: unknown [Arabidopsis thaliana]
  misc_feature (10)..(292): Homolog of NCBI NO: 18417136 NR Description: expressed protein [Arabidopsis thaliana]
  misc_feature (1)..(300): Homolog of NCBI NO: 7485906 NR Description: hypothetical protein F21B7.13 - Arabidopsis
  misc_feature (9)..(294): Homolog of NCBI NO: 22328289 NR Description: expressed protein [Arabidopsis thaliana]
  misc_feature (9)..(299): Homolog of NCBI NO: 25373431 NR Description: hypothetical protein AT4g03420 [imported] -
  misc_feature (1)..(300): Homolog of NCBI NO: 9280648 NR Description: F21B7.22 [Arabidopsis thaliana]
  misc_feature (1)..(300): Homolog of NCBI NO: 18958013 NR Description: At1g03610/F21B7_13 [Arabidopsis thaliana]
  misc_feature (1)..(300): Homolog of NCBI NO: 18379117 NR Description: expressed protein [Arabidopsis thaliana]
MVNAKGSTKKSNLDRFLHCTTPLVPPQSLPKAEIRKLNRLWHPWDREKVEFFRLSDLWDCYDEWSAYGASVPIHLANGESLVQYYVPYLSAIQIFTSHSSLIREESEDGESYPFSDSGSDESVSGEDGVLHLNDRLGYLYLQYFERSAPYTRVPLMDKINELAQRYPGLMSLRSVDLSPASWMSVAWYPIYHIPMGRTIKDLSTCFLTYHTLSSSFQDMEPEENGGEKERMRKEGEDITLLPFGMATYKMQGDVWLSHDHDDQERLASLCSVADSWLKQLRVQHHDFNYFCTMSMTSPRG

SEQ ID NO: 52196 - DNA, 1264 bp, Glycine max
  misc_feature (1)..(1264): Ceres Seq. ID no. 13594646
agcaaaaccgcccaaacgggcaaccaacgaactctgttcgaccactataatggcggccgccgccacagccacctctgccgccgcagccgcagccgccgccgccgcatgttcgtccaacgtctctgtttccgacgccaacaacgcatctccctccaacatacccgccatatcctctgcttccgactccgactccgaggatctcctcctcctcctcctcccaaacctcctccccgcgtccgccgccgccgccccctcatccgaggcgcagctccaccaattccacctccccgcgcttccgtcccccatcaccgtccgcaccatcccttccctcgggctcaccttccagctctggccctccgccaccacgctcctccgcttcctccccgcctccccgcatctcctcccgcgcccgcccaccgcacactgcccgctcagcatcctggagctcggctccgggaccggcgccgcgggcctcgccctggcggcggccctcccggcgcacgccgtcctctccgacctctccgccgcgctccccaatctccgccacaacgcctccctcaacgcgcccctcctcgactcccgcggcggctccgtctccgtcgtgccgctcccctggggcgatgccgccgcgatggaggccgtggtggccccagcgccggcgtttcggtttgacctcgtcgtggcgtcggacgtggtctactacgaggagttggtcgaccccttgatagagacgctgtgcttcttcgtgaagggggatgtggtgttcctgatggcgcacatgaggaggtggaaacgcacggataagaaattcttcgggaaggccaggaaggtcttcgacattgaggtgttgcacaaggatccaccccccgaaggctggcgccatggtccggtggtataccgcttcacagtgaagaagcagcgtggcaagaagtgaagaagcagcttccaaaaggtaatggatgtaatgtatgcttgcttatgcccatgctgattctactgctagagttaaacacaaaatgtttcctgcaaacgatgtgacattgtgcaactgaggacaaaattaagcaggaaatctttcttccgaactcggaacagtatcacattgtgcaactgaggacgagaatttagttgtatgctggtttggattgtgcgggtgcttctgctggcccaatttatagttgatttcgtggtacatgatcaaagtgttggattgtagttccgaatttcatgaacgctcacctaaaataatacattgcctgaaccc

SEQ ID NO: 52197 - protein, 310 aa, Glycine max
  peptide (1)..(310): Ceres Seq. ID no. 15221397
  misc_feature (87)..(306): Homolog of NCBI NO: 15230327 NR Description: expressed protein [Arabidopsis thaliana]
  misc_feature (87)..(306): Homolog of NCBI NO: 26451147 NR Description: unknown protein [Arabidopsis thaliana]
  misc_feature (53)..(309): Homolog of NCBI NO: 15240506 NR Description: expressed protein [Arabidopsis thaliana]
  misc_feature (56)..(310): Homolog of NCBI NO: 33146776 NR Description: unknown protein [Oryza sativa (japonica
AKPPKRATNELCSTTIMAAAATATSAAAAAAAAAACSSNVSVSDANNASPSNIPAISSASDSDSEDLLLLLLPNLLPASAAAAPSSEAQLHQFHLPALPSPITVRTIPSLGLTFQLWPSATTLLRFLPASPHLLPRPPTAHCPLSILELGSGTGAAGLALAAALPAHAVLSDLSAALPNLRHNASLNAPLLDSRGGSVSVVPLPWGDAAAMEAVVAPAPAFRFDLVVASDVVYYEELVDPLIETLCFFVKGDVVFLMAHMRRWKRTDKKFFGKARKVFDIEVLHKDPPPEGWRHGPVVYRFTVKKQRGKK

SEQ ID NO: 52198 - protein, 294 aa, Glycine max
  peptide (1)..(294): Ceres Seq. ID no. 15221398
  misc_feature (71)..(290): Homolog of NCBI NO: 15230327 NR Description: expressed protein [Arabidopsis thaliana]
  misc_feature (71)..(290): Homolog of NCBI NO: 26451147 NR Description: unknown protein [Arabidopsis thaliana]
  misc_feature (37)..(293): Homolog of NCBI NO: 15240506 NR Description: expressed protein [Arabidopsis thaliana]
  misc_feature (40)..(294): Homolog of NCBI NO: 33146776 NR Description: unknown protein [Oryza sativa (japonica
MAAAATATSAAAAAAAAAACSSNVSVSDANNASPSNIPAISSASDSDSEDLLLLLLPNLLPASAAAAPSSEAQLHQFHLPALPSPITVRTIPSLGLTFQLWPSATTLLRFLPASPHLLPRPPTAHCPLSILELGSGTGAAGLALAAALPAHAVLSDLSAALPNLRHNASLNAPLLDSRGGSVSVVPLPWGDAAAMEAVVAPAPAFRFDLVVASDVVYYEELVDPLIETLCFFVKGDVVFLMAHMRRWKRTDKKFFGKARKVFDIEVLHKDPPPEGWRHGPVVYRFTVKKQRGKK

SEQ ID NO: 52199 - protein, 223 aa, Glycine max
  peptide (1)..(223): Ceres Seq. ID no. 15221399
  misc_feature (1)..(207): Homolog of NCBI NO: 34872074 NR Description: similar to Ser/Arg-related nuclear matrix protein
SKTAQTGNQRTLFDHYNGGRRHSHLCRRSRSRRRRMFVQRLCFRRQQRISLQHTRHILCFRLRLRGSPPPPPPKPPPRVRRRRPLIRGAAPPIPPPRASVPHHRPHHPFPRAHLPALALRHHAPPLPPRLPASPPAPAHRTLPAQHPGARLRDRRRGPRPGGGPPGARRPLRPLRRAPQSPPQRLPQRAPPRLPRRLRLRRAAPLGRCRRDGGRGGPSAGVSV

SEQ ID NO: 52200 - DNA, 1154 bp, Glycine max
  misc_feature (1)..(1154): Ceres Seq. ID no. 13638931
gcaagcatccattcgagcttcacaaaactagtactccaacgtgtgctcctttctcaagtgtgtgtgtccgtgagctagctttagtattagtgcagtttagctactagctagttggaacttacgttgacactgctcttcttctgcgtgttgtgcactagtgtgtccgtgtgctagtagcctacagcaccgtttctctcgggaggcatttcatatacacgcgattaacacgtacagtacagacatccttcaacgacaatcatggtcggcgctcaagagcaagggctgaagctgctggtgccgcggagcggcgtgagcatatacgccatccgcgtccagatggcgcttgccatgaagggtctggcttacgactacctccccgaggaccccaggtgcaagagcgacctcctcctcgcgtccaatcccgtgcacaagacactgcccgtcctcatccacagcggcaggcccgtctgcgagtcgctcatcatcgtggagtaccttgacgatgcattccccggcaacggcgcgtccatcctccccgccgacccctaccgccgcgccgtcgcccgcttttgggccgcctatgtcgacaacaagatgttcccttcgtgcatcggcattctcaatacggcgaatcagcaggagagagctgacaaggtggaggagaccttggcagctttcgggctcctagaggccgccttggcggagtgctccaaagaaggcgaggcggaggcgccgttcttcggtggtggctccatcgggttcctggacatcgcgctcgggtgctatattccctggttcgaagcgataggccgccttgctggcgtgccgccgttcctagacgcggcgaggacaccaaagctggctgcgtgggcggggcggttcagcgccgccaagccgttcattgccctgctgactgcggtggacaaggtggaggagtacatcactaaggtgctttatccaaagtggaacgtcgctgtcacagctagcaactaattaaagatcatgtatttccattgccggcaggggatcgtgtcgatccaataattactttgctttccgagttaactgttagatagattgcttagatagattgattggctctcaaggcaactatgtaattttttggctctcagagtaactttgagtttacttct

SEQ ID NO: 52201 - protein, 244 aa, Glycine max
  peptide (1)..(244): Ceres Seq. ID no. 13638932
  misc_feature (92)..(212): Pfam Name: Glutathione S-transferase, C-terminal domain Pfam Description: Glutathione S-transferase, C-terminal domain
  misc_feature (1)..(241): Homolog of NCBI NO: 33304612 NR Description: tau class GST protein 3 [Oryza sativa (indica
  misc_feature (1)..(244): Homolog of NCBI NO: 37536334 NR Description: putative glutathione S-transferase
  misc_feature (1)..(244): Homolog of NCBI NO: 37536332 NR Description: putative glutathione S-transferase
  misc_feature (4)..(212): Homolog of NCBI NO: 22022398 NR Description: glutathione-S-transferase Cla47 [Triticum
  misc_feature (1)..(230): Homolog of NCBI NO: 37536330 NR Description: putative glutathione S-transferase
  misc_feature (18)..(231): Homolog of NCBI NO: 37536352 NR Description: putative glutathione S-transferase
  misc_feature (18)..(212): Homolog of NCBI NO: 37536354 NR Description: putative glutathione S-transferase
  misc_feature (3)..(231): Homolog of NCBI NO: 11385503 NR Description: glutathione S-transferase GST 26 [Zea mays]
  misc_feature (9)..(244): Homolog of NCBI NO: 37536356 NR Description: putative glutathione S-transferase
  misc_feature (1)..(243): Homolog of NCBI NO: 20067423 NR Description: glutathione transferase [Triticum aestivum]
MVGAQEQGLKLLVPRSGVSIYAIRVQMALAMKGLAYDYLPEDPRCKSDLLLASNPVHKTLPVLIHSGRPVCESLIIVEYLDDAFPGNGASILPADPYRRAVARFWAAYVDNKMFPSCIGILNTANQQERADKVEETLAAFGLLEAALAECSKEGEAEAPFFGGGSIGFLDIALGCYIPWFEAIGRLAGVPPFLDAARTPKLAAWAGRFSAAKPFIALLTAVDKVEEYITKVLYPKWNVAVTASN

SEQ ID NO: 52202 - protein, 218 aa, Glycine max
  peptide (1)..(218): Ceres Seq. ID no. 13638933
  misc_feature (66)..(186): Pfam Name: Glutathione S-transferase, C-terminal domain Pfam Description: Glutathione S-transferase, C-terminal domain
  misc_feature (1)..(215): Homolog of NCBI NO: 33304612 NR Description: tau class GST protein 3 [Oryza sativa (indica
  misc_feature (1)..(218): Homolog of NCBI NO: 37536334 NR Description: putative glutathione S-transferase
  misc_feature (1)..(218): Homolog of NCBI NO: 37536332 NR Description: putative glutathione S-transferase
  misc_feature (1)..(186): Homolog of NCBI NO: 22022398 NR Description: glutathione-S-transferase Cla47 [Triticum
  misc_feature (1)..(204): Homolog of NCBI NO: 37536330 NR Description: putative glutathione S-transferase
  misc_feature (1)..(205): Homolog of NCBI NO: 37536352 NR Description: putative glutathione S-transferase
  misc_feature (1)..(186): Homolog of NCBI NO: 37536354 NR Description: putative glutathione S-transferase
  misc_feature (1)..(205): Homolog of NCBI NO: 11385503 NR Description: glutathione S-transferase GST 26 [Zea mays]
  misc_feature (1)..(218): Homolog of NCBI NO: 37536356 NR Description: putative glutathione S-transferase
  misc_feature (1)..(217): Homolog of NCBI NO: 20067423 NR Description: glutathione transferase [Triticum aestivum]
MALAMKGLAYDYLPEDPRCKSDLLLASNPVHKTLPVLIHSGRPVCESLIIVEYLDDAFPGNGASILPADPYRRAVARFWAAYVDNKMFPSCIGILNTANQQERADKVEETLAAFGLLEAALAECSKEGEAEAPFFGGGSIGFLDIALGCYIPWFEAIGRLAGVPPFLDAARTPKLAAWAGRFSAAKPFIALLTAVDKVEEYITKVLYPKWNVAVTASN

SEQ ID NO: 52203 - protein, 214 aa, Glycine max
  peptide (1)..(214): Ceres Seq. ID no. 13638934
  misc_feature (62)..(182): Pfam Name: Glutathione S-transferase, C-terminal domain Pfam Description: Glutathione S-transferase, C-terminal domain
  misc_feature (1)..(211): Homolog of NCBI NO: 33304612 NR Description: tau class GST protein 3 [Oryza sativa (indica
  misc_feature (1)..(214): Homolog of NCBI NO: 37536334 NR Description: putative glutathione S-transferase
  misc_feature (1)..(214): Homolog of NCBI NO: 37536332 NR Description: putative glutathione S-transferase
  misc_feature (1)..(182): Homolog of NCBI NO: 22022398 NR Description: glutathione-S-transferase Cla47 [Triticum
  misc_feature (1)..(200): Homolog of NCBI NO: 37536330 NR Description: putative glutathione S-transferase
  misc_feature (1)..(201): Homolog of NCBI NO: 37536352 NR Description: putative glutathione S-transferase
  misc_feature (1)..(182): Homolog of NCBI NO: 37536354 NR Description: putative glutathione S-transferase
  misc_feature (1)..(201): Homolog of NCBI NO: 11385503 NR Description: glutathione S-transferase GST 26 [Zea mays]
  misc_feature (1)..(214): Homolog of NCBI NO: 37536356 NR Description: putative glutathione S-transferase
  misc_feature (1)..(213): Homolog of NCBI NO: 20067423 NR Description: glutathione transferase [Triticum aestivum]
MKGLAYDYLPEDPRCKSDLLLASNPVHKTLPVLIHSGRPVCESLIIVEYLDDAFPGNGASILPADPYRRAVARFWAAYVDNKMFPSCIGILNTANQQERADKVEETLAAFGLLEAALAECSKEGEAEAPFFGGGSIGFLDIALGCYIPWFEAIGRLAGVPPFLDAARTPKLAAWAGRFSAAKPFIALLTAVDKVEEYITKVLYPKWNVAVTASN

SEQ ID NO: 52204 - DNA, 1147 bp, Glycine max
  misc_feature (1)..(1147): Ceres Seq. ID no. 14301423
acacacgctccgcctccacctccgcttcccatttcccgccgcctcctttcctaaaaatctacacaaagattcgtaggaaaatcctgcccaaatcccccacctcccgtttctgctcccgttcccaccccaatcccctccaagaaaccctcgcccccctcgcctcgccgccatgggcagcgccgcctcgccgccgcgggccctcgacgcggcgacgcaggaggacctcaagcgcgtctccgcgcaccgcgccgtcgacatggtggagtccggcatgacgctggggctcggcaccggctccacggccgcgcacgcgctcgaccgcctcggggccctcctccgcaccggcgcgctgcgcgcggtcgccggggtgcccacctccctcaagacggaggcgcacgccgcgcgcgtcgggatccccatgctcgcgctcgccgacgccgccgagatccacctctccatcgacggcgccgacgaggtcgacccggacctcaacctcgtcaagggccgcggcggctcgctcctccgcgagaagatgatcgagggcgccggcgcccgcttcgtcgtcatcgtcgacgagtccaagctcgtcccccgcctcggctgcacgggctccgtgcccgtcgaggtcgtccccttcggcagcgcctacacgctcggcctcatccgcatggtgttcgacaaattgccgggcttccacgccaggctcaggaccgtcaagtccaaggccggcgacggccaggaggagctctttctcaccgacaacggcaaccacatcgtcgagatgttcttcgaggacggcatacacggcaacctgcgcgacataagcgacagcctgctgcgcatcacgggcgtcgtcgagcacggcatgttcctcggcatggccaccaaggtgatcgtcgccaagaaggacggcaccgtggcggtcctcagcaagaagtagcctggccgcctggggaagagtctgcagaggagatgacaataagcccagattcaagctgttcttgctcctgcggtgaacttgctctacgttactgttacagcgttttctcctattcatgggtaatgcgatggtgcccagcttaatgtggtgaagctaataaattttggacttcgctccataatgttatcaagtcagttttgtacttcc

SEQ ID NO: 52205 - protein, 256 aa, Glycine max
  peptide (1)..(256): Ceres Seq. ID no. 14301424
  misc_feature (64)..(248): Pfam Name: Ribose 5-phosphate isomerase A (phosphoriboisomerase A) Pfam Description: Ribose 5-phosphate isomerase A
  misc_feature (1)..(248): Homolog of NCBI NO: 22963952 NR Description: hypothetical protein [Rhodopseudomonas palustris]
  misc_feature (17)..(256): Homolog of NCBI NO: 27378866 NR Description: ribose 5-phosphate isomerase [Bradyrhizobium
  misc_feature (4)..(255): Homolog of NCBI NO: 34393836 NR Description: putative ribose-5-phosphate isomerase
  misc_feature (1)..(255): Homolog of NCBI NO: 34393835 NR Description: putative ribose-5-phosphate isomerase
  misc_feature (6)..(255): Homolog of NCBI NO: 18654317 NR Description: ribose-5-phosphate isomerase [Spinacia oleracea]
  misc_feature (1)..(248): Homolog of NCBI NO: 13430836 NR Description: putative ribose 5-phosphate isomerase
  misc_feature (1)..(248): Homolog of NCBI NO: 15223936 NR Description: ribose 5-phosphate isomerase -related
  misc_feature (1)..(248): Homolog of NCBI NO: 21592672 NR Description: putative ribose 5-phosphate isomerase
  misc_feature (1)..(255): Homolog of NCBI NO: 15226223 NR Description: ribose 5-phosphate isomerase -related
  misc_feature (1)..(256): Homolog of NCBI NO: 38347196 NR Description: OSJNBa0023J03.8 [Oryza sativa (japonica
MGSAASPPRALDAATQEDLKRVSAHRAVDMVESGMTLGLGTGSTAAHALDRLGALLRTGALRAVAGVPTSLKTEAHAARVGIPMLALADAAEIHLSIDGADEVDPDLNLVKGRGGSLLREKMIEGAGARFVVIVDESKLVPRLGCTGSVPVEVVPFGSAYTLGLIRMVFDKLPGFHARLRTVKSKAGDGQEELFLTDNGNHIVEMFFEDGIHGNLRDISDSLLRITGVVEHGMFLGMATKVIVAKKDGTVAVLSKK

SEQ ID NO: 52206 - protein, 227 aa, Glycine max
  peptide (1)..(227): Ceres Seq. ID no. 14301425
  misc_feature (35)..(219): Pfam Name: Ribose 5-phosphate isomerase A (phosphoriboisomerase A) Pfam Description: Ribose 5-phosphate isomerase A
  misc_feature (1)..(219): Homolog of NCBI NO: 22963952 NR Description: hypothetical protein [Rhodopseudomonas palustris]
  misc_feature (1)..(227): Homolog of NCBI NO: 27378866 NR Description: ribose 5-phosphate isomerase [Bradyrhizobium
  misc_feature (1)..(226): Homolog of NCBI NO: 34393836 NR Description: putative ribose-5-phosphate isomerase
  misc_feature (1)..(226): Homolog of NCBI NO: 34393835 NR Description: putative ribose-5-phosphate isomerase
  misc_feature (1)..(226): Homolog of NCBI NO: 18654317 NR Description: ribose-5-phosphate isomerase [Spinacia oleracea]
  misc_feature (1)..(219): Homolog of NCBI NO: 13430836 NR Description: putative ribose 5-phosphate isomerase
  misc_feature (1)..(219): Homolog of NCBI NO: 15223936 NR Description: ribose 5-phosphate isomerase -related
  misc_feature (1)..(219): Homolog of NCBI NO: 21592672 NR Description: putative ribose 5-phosphate isomerase
  misc_feature (1)..(226): Homolog of NCBI NO: 15226223 NR Description: ribose 5-phosphate isomerase -related
  misc_feature (1)..(227): Homolog of NCBI NO: 38347196 NR Description: OSJNBa0023J03.8 [Oryza sativa (japonica
MVESGMTLGLGTGSTAAHALDRLGALLRTGALRAVAGVPTSLKTEAHAARVGIPMLALADAAEIHLSIDGADEVDPDLNLVKGRGGSLLREKMIEGAGARFVVIVDESKLVPRLGCTGSVPVEVVPFGSAYTLGLIRMVFDKLPGFHARLRTVKSKAGDGQEELFLTDNGNHIVEMFFEDGIHGNLRDISDSLLRITGVVEHGMFLGMATKVIVAKKDGTVAVLSKK

SEQ ID NO: 52207 - protein, 222 aa, Glycine max
  peptide (1)..(222): Ceres Seq. ID no. 14301426
  misc_feature (30)..(214): Pfam Name: Ribose 5-phosphate isomerase A (phosphoriboisomerase A) Pfam Description: Ribose 5-phosphate isomerase A
  misc_feature (1)..(214): Homolog of NCBI NO: 22963952 NR Description: hypothetical protein [Rhodopseudomonas palustris]
  misc_feature (1)..(222): Homolog of NCBI NO: 27378866 NR Description: ribose 5-phosphate isomerase [Bradyrhizobium
  misc_feature (1)..(221): Homolog of NCBI NO: 34393836 NR Description: putative ribose-5-phosphate isomerase
  misc_feature (1)..(221): Homolog of NCBI NO: 34393835 NR Description: putative ribose-5-phosphate isomerase
  misc_feature (1)..(221): Homolog of NCBI NO: 18654317 NR Description: ribose-5-phosphate isomerase [Spinacia oleracea]
  misc_feature (1)..(214): Homolog of NCBI NO: 13430836 NR Description: putative ribose 5-phosphate isomerase
  misc_feature (1)..(214): Homolog of NCBI NO: 15223936 NR Description: ribose 5-phosphate isomerase -related
  misc_feature (1)..(214): Homolog of NCBI NO: 21592672 NR Description: putative ribose 5-phosphate isomerase
  misc_feature (1)..(221): Homolog of NCBI NO: 15226223 NR Description: ribose 5-phosphate isomerase -related
  misc_feature (1)..(222): Homolog of NCBI NO: 38347196 NR Description: OSJNBa0023J03.8 [Oryza sativa (japonica
MTLGLGTGSTAAHALDRLGALLRTGALRAVAGVPTSLKTEAHAARVGIPMLALADAAEIHLSIDGADEVDPDLNLVKGRGGSLLREKMIEGAGARFVVIVDESKLVPRLGCTGSVPVEVVPFGSAYTLGLIRMVFDKLPGFHARLRTVKSKAGDGQEELFLTDNGNHIVEMFFEDGIHGNLRDISDSLLRITGVVEHGMFLGMATKVIVAKKDGTVAVLSKK

SEQ ID NO: 52208 - DNA, 800 bp, Glycine max
  misc_feature (1)..(800): Ceres Seq. ID no. 13594647
atcaagctactgagttctgactatccaacttaaaattatattatcttttcgacttcagattctcctctatttcactcaaacactaaagcttcagaaaatggcaatggcgtcgtttaacatgcagtcagtcttcgccggtggactgaccactcgcaagatcaacacgaacaagctttgctttgccggaaacttccataatctcaagaggaattgtcccgtgggagtgagatgtatggctgagggagaaccaatgaaagatgagtctgcaccttcgacctcggcgtctcagcctttgcccaagtcatcgtcgccaccaccacctcctcctactaaacctaaggtgagcacaaagtttagcgacttgctagcgttcagcggtccagcaccggaaagaataaacggtcgtttagctatggttggattcgtggctgcgttggcggttgaactttccaagggtgaaaacgttttagctcagatctccgacggtggtgtctcgtggttcctcggtacggcggcgatcttgacgcttgcgtcgcttgtgccccttttcaagggcataacagccgagtccaagtccaaaggttttatgacgtcagacgctgagctttggaatgggcgttttgcgatgcttggtttggtcgcgctggcgttcactgagtttgtcaagggtgggactctcgtttgagaaagaagagattgtgtattgcaaaatttgcccctgaatcctgtatagtattctggcttgttttaggcctactctgtgtcttttacatatggattagtgacatttgaaactttgg

SEQ ID NO: 52209 - protein, 195 aa, Glycine max
  peptide (1)..(195): Ceres Seq. ID no. 13594648
  misc_feature (1)..(192): Homolog of NCBI NO: 28194659 NR Description: putative early light induced protein [Arachis
  misc_feature (8)..(195): Homolog of NCBI NO: 25315849 NR Description: early light-inducable protein [imported] -
  misc_feature (1)..(195): Homolog of NCBI NO: 7488128 NR Description: probable light induced protein - Arabidopsis
  misc_feature (1)..(195): Homolog of NCBI NO: 18414282 NR Description: expressed protein [Arabidopsis thaliana]
  misc_feature (1)..(195): Homolog of NCBI NO: 21618071 NR Description: light-induced protein-like protein [Arabidopsis
  misc_feature (1)..(195): Homolog of NCBI NO: 15228866 NR Description: early light-induced protein [Arabidopsis
  misc_feature (1)..(195): Homolog of NCBI NO: 38123375 NR Description: ELIP [Brassica rapa subsp. pekinensis]
MAMASFNMQSVFAGGLTTRKINTNKLCFAGNFHNLKRNCPVGVRCMAEGEPMKDESAPSTSASQPLPKSSSPPPPPPTKPKVSTKFSDLLAFSGPAPERINGRLAMVGFVAALAVELSKGENVLAQISDGGVSWFLGTAAILTLASLVPLFKGITAESKSKGFMTSDAELWNGRFAMLGLVALAFTEFVKGGTLV

SEQ ID NO: 52210 - protein, 193 aa, Glycine max
  peptide (1)..(193): Ceres Seq. ID no. 13594649
  misc_feature (1)..(190): Homolog of NCBI NO: 28194659 NR Description: putative early light induced protein [Arachis
  misc_feature (6)..(193): Homolog of NCBI NO: 25315849 NR Description: early light-inducable protein [imported] -
  misc_feature (1)..(193): Homolog of NCBI NO: 7488128 NR Description: probable light induced protein - Arabidopsis
  misc_feature (1)..(193): Homolog of NCBI NO: 18414282 NR Description: expressed protein [Arabidopsis thaliana]
  misc_feature (1)..(193): Homolog of NCBI NO: 21618071 NR Description: light-induced protein-like protein [Arabidopsis
  misc_feature (1)..(193): Homolog of NCBI NO: 15228866 NR Description: early light-induced protein [Arabidopsis
  misc_feature (1)..(193): Homolog of NCBI NO: 38123375 NR Description: ELIP [Brassica rapa subsp. pekinensis]
MASFNMQSVFAGGLTTRKINTNKLCFAGNFHNLKRNCPVGVRCMAEGEPMKDESAPSTSASQPLPKSSSPPPPPPTKPKVSTKFSDLLAFSGPAPERINGRLAMVGFVAALAVELSKGENVLAQISDGGVSWFLGTAAILTLASLVPLFKGITAESKSKGFMTSDAELWNGRFAMLGLVALAFTEFVKGGTLV

SEQ ID NO: 52211 - protein, 188 aa, Glycine max
  peptide (1)..(188): Ceres Seq. ID no. 13594650
  misc_feature (1)..(185): Homolog of NCBI NO: 28194659 NR Description: putative early light induced protein [Arachis
  misc_feature (1)..(188): Homolog of NCBI NO: 25315849 NR Description: early light-inducable protein [imported] -
  misc_feature (1)..(188): Homolog of NCBI NO: 7488128 NR Description: probable light induced protein - Arabidopsis
  misc_feature (1)..(188): Homolog of NCBI NO: 18414282 NR Description: expressed protein [Arabidopsis thaliana]
  misc_feature (1)..(188): Homolog of NCBI NO: 21618071 NR Description: light-induced protein-like protein [Arabidopsis
  misc_feature (1)..(188): Homolog of NCBI NO: 15228866 NR Description: early light-induced protein [Arabidopsis
  misc_feature (1)..(188): Homolog of NCBI NO: 38123375 NR Description: ELIP [Brassica rapa subsp. pekinensis]
MQSVFAGGLTTRKINTNKLCFAGNFHNLKRNCPVGVRCMAEGEPMKDESAPSTSASQPLPKSSSPPPPPPTKPKVSTKFSDLLAFSGPAPERINGRLAMVGFVAALAVELSKGENVLAQISDGGVSWFLGTAAILTLASLVPLFKGITAESKSKGFMTSDAELWNGRFAMLGLVALAFTEFVKGGTLV

SEQ ID NO: 52212 - DNA, 1057 bp, Glycine max
  misc_feature (1)..(1057): Ceres Seq. ID no. 13594651
acttttgaactaatcgatcctacacgaccatcagccggagacgaccgccggcgttttttccgctttaatggaagcgttacttacttcaagggttgttccagttcaagttccttgtagaaagctctcatctttatctgctgatttgtcttgccttgagttaaggagatatcctgttagaagaggaagtgtctcgatcatgagctattccagattggtccgtccagtgactgcttctgtgcagccgcagagggtgtcggctttggggaatgaaggcaacactgttccttctaaagagattctcgatctttggagaggtgttgaagctgtatgcttcgatgtggatagcacggtatgtgtggatgaaggcattgatgaacttgcagagttctgtggagctggaaaggctgttgctgaatggactgccagagcaatgggtggatctgttccatttgaagaagctctagccgcaagactttctttgttcaagccttctctttccaaagttgatgaatatctccaaaagacacccccgaggctatcccctggcattgaagagttggtcaagaagctcagagccaataaaatcgatgtctatttgatatctggaggttttcgacagatgatcaatcctgtagcatcggttcttggcatccctcgagagaatatattcgccaacaatcttctatttggaaattctggtgagtttgtggggtttgatgagaaggaacctacttcaagaagtggaggcaaagccaaggcagtgcaacatatacgaaagggtcgtagctacaagacgatggccatgattggagacggagctactgatctagaagcacgtagacctggtggcgcggacttgttcatatgttatgctggagttcagcttcgtgaagctgttgcagcacaagcagactggcttatcttcaattttgaacctctcattaactccttggactaaaagcctcttctctatactgattagttccattgagagctcaactcattattcaactctcaaattttgtactctcctttttgaatgtgtgaaattccactg

SEQ ID NO: 52213 - protein, 296 aa, Glycine max
  peptide (1)..(296): Ceres Seq. ID no. 13594652
  misc_feature (84)..(270): Pfam Name: haloacid dehalogenase-like hydrolase Pfam Description: haloacid dehalogenase-like hydrolase
  misc_feature (48)..(296): Homolog of NCBI NO: 17543874 NR Description: Haloacid dehalogenase-like hydrolase
  misc_feature (48)..(296): Homolog of NCBI NO: 17543878 NR Description: Haloacid dehalogenase-like hydrolase
  misc_feature (48)..(296): Homolog of NCBI NO: 17543876 NR Description: Haloacid dehalogenase-like hydrolase
  misc_feature (72)..(296): Homolog of NCBI NO: 4758972 NR Description: phosphoserine phosphatase
  misc_feature (72)..(296): Homolog of NCBI NO: 29726390 NR Description: Chain A, Molecular Basis For The Local
  misc_feature (72)..(296): Homolog of NCBI NO: 34872053 NR Description: similar to expressed sequence AI480570 [Rattus
  misc_feature (72)..(296): Homolog of NCBI NO: 19527116 NR Description: expressed sequence AI480570 [Mus musculus]
  misc_feature (78)..(295): Homolog of NCBI NO: 4680206 NR Description: hypothetical protein [Sorghum bicolor]
  misc_feature (1)..(296): Homolog of NCBI NO: 11358621 NR Description: phosphoserine phosphatase (EC 3.1.3.3) precursor,
  misc_feature (1)..(296): Homolog of NCBI NO: 15221827 NR Description: 3-phosphoserine phosphatase (PSP) [Arabidopsis
MEALLTSRVVPVQVPCRKLSSLSADLSCLELRRYPVRRGSVSIMSYSRLVRPVTASVQPQRVSALGNEGNTVPSKEILDLWRGVEAVCFDVDSTVCVDEGIDELAEFCGAGKAVAEWTARAMGGSVPFEEALAARLSLFKPSLSKVDEYLQKTPPRLSPGIEELVKKLRANKIDVYLISGGFRQMINPVASVLGIPRENIFANNLLFGNSGEFVGFDEKEPTSRSGGKAKAVQHIRKGRSYKTMAMIGDGATDLEARRPGGADLFICYAGVQLREAVAAQADWLIFNFEPLINSLD

SEQ ID NO: 52214 - protein, 253 aa, Glycine max
  peptide (1)..(253): Ceres Seq. ID no. 13594653
  misc_feature (41)..(227): Pfam Name: haloacid dehalogenase-like hydrolase Pfam Description: haloacid dehalogenase-like hydrolase
  misc_feature (5)..(253): Homolog of NCBI NO: 17543874 NR Description: Haloacid dehalogenase-like hydrolase
  misc_feature (5)..(253): Homolog of NCBI NO: 17543878 NR Description: Haloacid dehalogenase-like hydrolase
  misc_feature (5)..(253): Homolog of NCBI NO: 17543876 NR Description: Haloacid dehalogenase-like hydrolase
  misc_feature (29)..(253): Homolog of NCBI NO: 4758972 NR Description: phosphoserine phosphatase
  misc_feature (29)..(253): Homolog of NCBI NO: 29726390 NR Description: Chain A, Molecular Basis For The Local
  misc_feature (29)..(253): Homolog of NCBI NO: 34872053 NR Description: similar to expressed sequence AI480570 [Rattus
  misc_feature (29)..(253): Homolog of NCBI NO: 19527116 NR Description: expressed sequence AI480570 [Mus musculus]
  misc_feature (35)..(252): Homolog of NCBI NO: 4680206 NR Description: hypothetical protein [Sorghum bicolor]
  misc_feature (1)..(253): Homolog of NCBI NO: 11358621 NR Description: phosphoserine phosphatase (EC 3.1.3.3) precursor,
  misc_feature (1)..(253): Homolog of NCBI NO: 15221827 NR Description: 3-phosphoserine phosphatase (PSP) [Arabidopsis
MSYSRLVRPVTASVQPQRVSALGNEGNTVPSKEILDLWRGVEAVCFDVDSTVCVDEGIDELAEFCGAGKAVAEWTARAMGGSVPFEEALAARLSLFKPSLSKVDEYLQKTPPRLSPGIEELVKKLRANKIDVYLISGGFRQMINPVASVLGIPRENIFANNLLFGNSGEFVGFDEKEPTSRSGGKAKAVQHIRKGRSYKTMAMIGDGATDLEARRPGGADLFICYAGVQLREAVAAQADWLIFNFEPLINSLD

SEQ ID NO: 52215 - protein, 175 aa, Glycine max
  peptide (1)..(175): Ceres Seq. ID no. 13594654
  misc_feature (1)..(149): Pfam Name: haloacid dehalogenase-like hydrolase Pfam Description: haloacid dehalogenase-like hydrolase
  misc_feature (1)..(175): Homolog of NCBI NO: 17543874 NR Description: Haloacid dehalogenase-like hydrolase
  misc_feature (1)..(175): Homolog of NCBI NO: 17543878 NR Description: Haloacid dehalogenase-like hydrolase
  misc_feature (1)..(175): Homolog of NCBI NO: 17543876 NR Description: Haloacid dehalogenase-like hydrolase
  misc_feature (1)..(175): Homolog of NCBI NO: 4758972 NR Description: phosphoserine phosphatase
  misc_feature (1)..(175): Homolog of NCBI NO: 29726390 NR Description: Chain A, Molecular Basis For The Local
  misc_feature (1)..(175): Homolog of NCBI NO: 34872053 NR Description: similar to expressed sequence AI480570 [Rattus
  misc_feature (1)..(175): Homolog of NCBI NO: 19527116 NR Description: expressed sequence AI480570 [Mus musculus]
  misc_feature (1)..(174): Homolog of NCBI NO: 4680206 NR Description: hypothetical protein [Sorghum bicolor]
  misc_feature (1)..(175): Homolog of NCBI NO: 11358621 NR Description: phosphoserine phosphatase (EC 3.1.3.3) precursor,
  misc_feature (1)..(175): Homolog of NCBI NO: 15221827 NR Description: 3-phosphoserine phosphatase (PSP) [Arabidopsis
MGGSVPFEEALAARLSLFKPSLSKVDEYLQKTPPRLSPGIEELVKKLRANKIDVYLISGGFRQMINPVASVLGIPRENIFANNLLFGNSGEFVGFDEKEPTSRSGGKAKAVQHIRKGRSYKTMAMIGDGATDLEARRPGGADLFICYAGVQLREAVAAQADWLIFNFEPLINSLD

SEQ ID NO: 52216 - DNA, 1032 bp, Glycine max
  misc_feature (1)..(1032): Ceres Seq. ID no. 13638651
agaacatcctaatcgaaaatctttttgccatgataaaatcatctctgtcacaatttagcaaagtgagacagagagagtatggcgaccacacttcattgtctctccacactccatcttcttcctcgcaccacccatcgtcctaaaactctcaactctctcaaaccagcctccaaggcgcaacctcccaagatcccagaactaccctccattcccaacgccctccagctccttaaatcatcttccctccctctcgcactcaccgcattgccctttctcatcgatccacaggatgcagcagcagctggaggacagtttgggatcctggaaggacgatcgttcgcgttgatacacccaatagtgatgggaggtttgttcgtatacactctatacgctggttacttaggttggcaatggagacgtgtgcgtaccatccaaagcgagatcaacgagctcaagaaacaggttaagccaactcctgtttctcccgatggatccacggtcgttgactcttcgtcgcctccttctgccacggagcttgagatccgacggttgacggaagagaggaaagagttggtcaaagggtcttacagagacaaacactttgacgcaggctctgttttgttagggtttggtgttttggagtctgtgtttggtggtcttaacacttatcttcgtaccggtaaactcttccccggtcctcatctctacgctggagcagggataacggtgctatgggctgctgcagctgctttggtgccggccatgcagaaagggaatgagacggcgaggaatctacacattgcgttgaacggtctcaatgttcttcttttcatttggcaaatcccaacaggttttgatatcgtccttaaggtctttgagttcaccaaatggccttaaacccttcacttgttgtggtctcttccgcttttgtttttgtctttttcttgtctttacagttctagttgttggacttgtaatgagtcttgactatatatattgcaaagtcttatgcaactttttttgtgtgtttgt

SEQ ID NO: 52217 - protein, 272 aa, Glycine max
  peptide (1)..(272): Ceres Seq. ID no. 13638652
  misc_feature (160)..(266): Homolog of NCBI NO: 33864786 NR Description: conserved hypothetical protein [Synechococcus sp.
  misc_feature (88)..(127): Homolog of NCBI NO: 17229007 NR Description: hypothetical protein [Nostoc sp. PCC 7120]
  misc_feature (162)..(265): Homolog of NCBI NO: 17229007 NR Description: hypothetical protein [Nostoc sp. PCC 7120]
  misc_feature (91)..(130): Homolog of NCBI NO: 17230241 NR Description: hypothetical protein [Nostoc sp. PCC 7120]
  misc_feature (160)..(265): Homolog of NCBI NO: 17230241 NR Description: hypothetical protein [Nostoc sp. PCC 7120]
  misc_feature (91)..(130): Homolog of NCBI NO: 16330950 NR Description: hypothetical protein [Synechocystis sp. PCC 6803]
  misc_feature (160)..(265): Homolog of NCBI NO: 16330950 NR Description: hypothetical protein [Synechocystis sp. PCC 6803]
  misc_feature (91)..(130): Homolog of NCBI NO: 23130190 NR Description: hypothetical protein [Nostoc punctiforme]
  misc_feature (160)..(265): Homolog of NCBI NO: 23130190 NR Description: hypothetical protein [Nostoc punctiforme]
  misc_feature (1)..(272): Homolog of NCBI NO: 15228623 NR Description: expressed protein [Arabidopsis thaliana]
MATTLHCLSTLHLLPRTTHRPKTLNSLKPASKAQPPKIPELPSIPNALQLLKSSSLPLALTALPFLIDPQDAAAAGGQFGILEGRSFALIHPIVMGGLFVYTLYAGYLGWQWRRVRTIQSEINELKKQVKPTPVSPDGSTVVDSSSPPSATELEIRRLTEERKELVKGSYRDKHFDAGSVLLGFGVLESVFGGLNTYLRTGKLFPGPHLYAGAGITVLWAAAAALVPAMQKGNETARNLHIALNGLNVLLFIWQIPTGFDIVLKVFEFTKWP

SEQ ID NO: 52218 - protein, 178 aa, Glycine max
  peptide (1)..(178): Ceres Seq. ID no. 13638653
  misc_feature (66)..(172): Homolog of NCBI NO: 33864786 NR Description: conserved hypothetical protein [Synechococcus sp.
  misc_feature (1)..(33): Homolog of NCBI NO: 17229007 NR Description: hypothetical protein [Nostoc sp. PCC 7120]
  misc_feature (68)..(171): Homolog of NCBI NO: 17229007 NR Description: hypothetical protein [Nostoc sp. PCC 7120]
  misc_feature (1)..(36): Homolog of NCBI NO: 17230241 NR Description: hypothetical protein [Nostoc sp. PCC 7120]
  misc_feature (66)..(171): Homolog of NCBI NO: 17230241 NR Description: hypothetical protein [Nostoc sp. PCC 7120]
  misc_feature (1)..(36): Homolog of NCBI NO: 16330950 NR Description: hypothetical protein [Synechocystis sp. PCC 6803]
  misc_feature (66)..(171): Homolog of NCBI NO: 16330950 NR Description: hypothetical protein [Synechocystis sp. PCC 6803]
  misc_feature (1)..(36): Homolog of NCBI NO: 23130190 NR Description: hypothetical protein [Nostoc punctiforme]
  misc_feature (66)..(171): Homolog of NCBI NO: 23130190 NR Description: hypothetical protein [Nostoc punctiforme]
  misc_feature (1)..(178): Homolog of NCBI NO: 15228623 NR Description: expressed protein [Arabidopsis thaliana]
MGGLFVYTLYAGYLGWQWRRVRTIQSEINELKKQVKPTPVSPDGSTVVDSSSPPSATELEIRRLTEERKELVKGSYRDKHFDAGSVLLGFGVLESVFGGLNTYLRTGKLFPGPHLYAGAGITVLWAAAAALVPAMQKGNETARNLHIALNGLNVLLFIWQIPTGFDIVLKVFEFTKWP

SEQ ID NO: 52219 - DNA, 1012 bp, Glycine max
  misc_feature (1)..(1012): Ceres Seq. ID no. 13638811
tagccagtgcctcctcctcctcaatttcagcgccacccaaccaaatcacggccagccgagcgccttccccttcctctgccagctcgatcgtcgccggcgcacccagcagatgagcgccttccctgctccttttccttcctcctctgctcctctctctcacactgctcatctctcttccccccgtttctttctctacaggaggaaagcaccacgccatggcctccccaagctctgcttcatccccgtcttgggtccatgaggagacgaccacgccggccgcccttccccatctcgatcgggtccaggaccccgccgcctccagccacctctccgcggtcatggccccgatgggggttacctgccgcgagcctctgtcgtgaccagcacccgaccagcaggtcgccagcgtgcccgatgcctcctcctcgcgcatgcctggccgcgccacctggaccccgcagacaacaccacgccatggcccgcaggttcttctctgagttcatgtcgccctcgttccacgcgcctccggccagattgggcgctccaagcccggccatctccgccgcccttgcccgttctggccggatcccgccggttgggccccgtccccggccaccggtgccctcaccggagaccacctgcaccgtccgccaagtccctttcttcacccgctgcatcctctgcctcgctcgctcgtcccagccttcgttgaccgcgtcctgtctctcctgcgccaagaccaagcctgcgtccaacctccccaccgagccggcctcaaggcccgatgtacaggttatgcgatgatcatgacgcgagagcgatgttttgcttgtgttggcgttcttcttatgcttcttcttcgattaggggataggttccaggtcggcagcctgggctagcagggtggatgtcgtttgagtttctgtttgtgattcattcgtagtcggatggtgctcttttgtaatatgatgttgtattcgtgtggcattgtatgccttttgtatgcatcccc

SEQ ID NO: 52220 - protein, 182 aa, Glycine max
  peptide (1)..(182): Ceres Seq. ID no. 13638812
  misc_feature (1)..(122): Pfam Name: Extensin-like region Pfam Description: Extensin-like region
  misc_feature (1)..(125): Homolog of NCBI NO: 20138131 NR Description: Vegetative cell wall protein gp1 precursor
  misc_feature (1)..(125): Homolog of NCBI NO: 39586345 NR Description: Hypothetical protein CBG21638 [Caenorhabditis
  misc_feature (1)..(125): Homolog of NCBI NO: 6523547 NR Description: hydroxyproline-rich glycoprotein DZ-HRGP
  misc_feature (1)..(67): Homolog of NCBI NO: 6523547 NR Description: hydroxyproline-rich glycoprotein DZ-HRGP
MRRRPRRPPFPISIGSRTPPPPATSPRSWPRWGLPAASLCRDQHPTSRSPACPMPPPRACLAAPPGPRRQHHAMARRFFSEFMSPSFHAPPARLGAPSPAISAALARSGRIPPVGPRPRPPVPSPETTCTVRQVPFFTRCILCLARSSQPSLTASCLSCAKTKPASNLPTEPASRPDVQVMR

SEQ ID NO: 52221 - protein, 129 aa, Glycine max
  peptide (1)..(129): Ceres Seq. ID no. 13638813
  misc_feature (1)..(69): Pfam Name: Extensin-like region Pfam Description: Extensin-like region
  misc_feature (1)..(72): Homolog of NCBI NO: 20138131 NR Description: Vegetative cell wall protein gp1 precursor
  misc_feature (1)..(72): Homolog of NCBI NO: 39586345 NR Description: Hypothetical protein CBG21638 [Caenorhabditis
  misc_feature (1)..(72): Homolog of NCBI NO: 6523547 NR Description: hydroxyproline-rich glycoprotein DZ-HRGP
  misc_feature (1)..(14): Homolog of NCBI NO: 6523547 NR Description: hydroxyproline-rich glycoprotein DZ-HRGP
MPPPRACLAAPPGPRRQHHAMARRFFSEFMSPSFHAPPARLGAPSPAISAALARSGRIPPVGPRPRPPVPSPETTCTVRQVPFFTRCILCLARSSQPSLTASCLSCAKTKPASNLPTEPASRPDVQVMR

SEQ ID NO: 52222 - protein, 109 aa, Glycine max
  peptide (1)..(109): Ceres Seq. ID no. 13638814
  misc_feature (1)..(52): Homolog of NCBI NO: 20138131 NR Description: Vegetative cell wall protein gp1 precursor
  misc_feature (1)..(52): Homolog of NCBI NO: 39586345 NR Description: Hypothetical protein CBG21638 [Caenorhabditis
  misc_feature (1)..(52): Homolog of NCBI NO: 6523547 NR Description: hydroxyproline-rich glycoprotein DZ-HRGP
MARRFFSEFMSPSFHAPPARLGAPSPAISAALARSGRIPPVGPRPRPPVPSPETTCTVRQVPFFTRCILCLARSSQPSLTASCLSCAKTKPASNLPTEPASRPDVQVMR

SEQ ID NO: 52223 - DNA, 624 bp, Glycine max
  misc_feature (1)..(624): Ceres Seq. ID no. 13581902
acaccgcaaagcaatcttctcttcacttcaaaacacccgagcaaacctctccgatctcccatcccggcgccccccgctcctcccgcgatggcccgcacgaagcagacggcgcgcaagtccaccggcggcaaggccccgcggaagcagctggcgaccaaggcggcgcgcaagtcggccccggcgaccggcggcgtgaagaagccgcaccgcttccgcccgggcaccgtcgcgctgcgcgagatccgcaagtaccagaagagcacggagctgctcatccgcaagctccccttccagcgcctggtccgggagatcgcgcaggacttcaagaccgacctccgcttccagagctccgccgtctccgccctgcaggaggccgccgaggcctacctcgtcggcctcttcgaggacaccaacctctgcgccatccacgccaagcgcgtcaccatcatgcccaaggacatccagcttgcccgccgcatccgcggggagcgcgcctaggcgcctcgcttgccattgctaggtgtttaggatctgttcccgtcgtgttccatatctgcgtcgttcctgtgtaactagcttgttgctgtgcttcgatgctttcaatgaaatatggttaccagtatg

SEQ ID NO: 52224 - protein, 189 aa, Glycine max
  peptide (1)..(189): Ceres Seq. ID no. 13581903
TAKQSSLHFKTPEQTSPISHPGAPRSSRDGPHEADGAQVHRRQGPAEAAGDQGGAQVGPGDRRREEAAPLPPGHRRAARDPQVPEEHGAAHPQAPLPAPGPGDRAGLQDRPPLPELRRLRPAGGRRGLPRRPLRGHQPLRHPRQARHHHAQGHPACPPHPRGARLGASLAIARCLGSVPVVFHICVVPV

SEQ ID NO: 52225 - protein, 165 aa, Glycine max
  peptide (1)..(165): Ceres Seq. ID no. 13581904
  misc_feature (46)..(164): Pfam Name: Core histone H2A/H2B/H3/H4 Pfam Description: Core histone H2A/H2B/H3/H4
  misc_feature (30)..(165): Homolog of NCBI NO: 34876396 NR Description: similar to H3 histone family, member I [Rattus
  misc_feature (31)..(165): Homolog of NCBI NO: 122083 NR Description: Histone H3
  misc_feature (29)..(165): Homolog of NCBI NO: 37546835 NR Description: similar to histone protein Hist2h3c1 [Homo
  misc_feature (3)..(165): Homolog of NCBI NO: 34876364 NR Description: similar to CG31613-PA [Rattus norvegicus]
  misc_feature (29)..(165): Homolog of NCBI NO: 30061401 NR Description: histone 2, H3ca1 [Mus musculus]
  misc_feature (30)..(165): Homolog of NCBI NO: 1362108 NR Description: histone H3 homolog - common tobacco
  misc_feature (31)..(165): Homolog of NCBI NO: 70753 NR Description: histone H3 - garden pea (tentative sequence)
  misc_feature (30)..(165): Homolog of NCBI NO: 166384 NR Description: histone H3 (H3-1.1)
  misc_feature (30)..(165): Homolog of NCBI NO: 15232146 NR Description: histone H3 [Arabidopsis thaliana]
  misc_feature (30)..(165): Homolog of NCBI NO: 122087 NR Description: Histone H3
TPQSNLLFTSKHPSKPLRSPIPAPPAPPAMARTKQTARKSTGGKAPRKQLATKAARKSAPATGGVKKPHRFRPGTVALREIRKYQKSTELLIRKLPFQRLVREIAQDFKTDLRFQSSAVSALQEAAEAYLVGLFEDTNLCAIHAKRVTIMPKDIQLARRIRGERA

SEQ ID NO: 52226 - protein, 136 aa, Glycine max
  peptide (1)..(136): Ceres Seq. ID no. 13581905
  misc_feature (17)..(135): Pfam Name: Core histone H2A/H2B/H3/H4 Pfam Description: Core histone H2A/H2B/H3/H4
  misc_feature (1)..(136): Homolog of NCBI NO: 34876396 NR Description: similar to H3 histone family, member I [Rattus
  misc_feature (2)..(136): Homolog of NCBI NO: 122083 NR Description: Histone H3
  misc_feature (1)..(136): Homolog of NCBI NO: 37546835 NR Description: similar to histone protein Hist2h3c1 [Homo
  misc_feature (1)..(136): Homolog of NCBI NO: 34876364 NR Description: similar to CG31613-PA [Rattus norvegicus]
  misc_feature (1)..(136): Homolog of NCBI NO: 30061401 NR Description: histone 2, H3ca1 [Mus musculus]
  misc_feature (1)..(136): Homolog of NCBI NO: 1362108 NR Description: histone H3 homolog - common tobacco
  misc_feature (2)..(136): Homolog of NCBI NO: 70753 NR Description: histone H3 - garden pea (tentative sequence)
  misc_feature (1)..(136): Homolog of NCBI NO: 166384 NR Description: histone H3 (H3-1.1)
  misc_feature (1)..(136): Homolog of NCBI NO: 15232146 NR Description: histone H3 [Arabidopsis thaliana]
  misc_feature (1)..(136): Homolog of NCBI NO: 122087 NR Description: Histone H3
MARTKQTARKSTGGKAPRKQLATKAARKSAPATGGVKKPHRFRPGTVALREIRKYQKSTELLIRKLPFQRLVREIAQDFKTDLRFQSSAVSALQEAAEAYLVGLFEDTNLCAIHAKRVTIMPKDIQLARRIRGERA

SEQ ID NO: 52227 - DNA, 889 bp, Glycine max
  misc_feature (1)..(889): Ceres Seq. ID no. 13581868
attttcaccacccccatccgccgcaggaccgccgaacgcccgcatcgccattggagatcgtgcgaggagacgaggaccctttccgcgggccttgagcgatgaagttcggcaagagcctgagcagccagatcgtggagacgctgccggagtggcgcgacaagttcctgtcctacaaggacctcaagaagcggcttaagctcatcggcctcggcgccgacggggaggagcggcaggccaagcgggcccgcgtctcggagccggccggggacggcgacgagacagcggcggcggcggccgcggcgatgacgcctgaggaggcggacttcatgcggctcctggaggccgagctcgacaagttcaattctttcttcgtcgagaaggaggaggagtacatcatccgccagaaggagttgcaggacagggtggccagggcggccgggatggagtccagggaggagttgctgcgtgtgcacaaggagatcgtcgacttccatggcgagatggtgctgcttgagaattacagcgccctcaactacaccgcgctgctacacggacgacaattttacagccgacacctgcacgatcctacttggcagcatcaaaagcaagcatgcaggcaggaatcactgttggggagggatgcatcgttcgcagatcgtgcgtgtagtgtcgtgtgtaaagcaatttcgtttgtttttcacatactcgcacaatgtcatgatgacgtgctattacgcactagatcagtttcctttccagactgtactgcaatcagcatatatagtgcttgtgcaaactaggtcttcatttgctcgctttacagttgagtaatcttgtttcctctttgtcaatattgttgcttcgagtgtgaaaaaatgctgctcttgtt

SEQ ID NO: 52228 - protein, 233 aa, Glycine max
  peptide (1)..(233): Ceres Seq. ID no. 13581869
  misc_feature (1)..(149): Pfam Name: SPX domain Pfam Description: SPX domain
  misc_feature (1)..(149): Homolog of NCBI NO: 11358467 NR Description: ids-4 protein-like - Arabidopsis thaliana
  misc_feature (1)..(150): Homolog of NCBI NO: 34897330 NR Description: putative signal transduction protein [Oryza
  misc_feature (72)..(150): Homolog of NCBI NO: 16506648 NR Description: IDS-4-like protein [Castanea sativa]
  misc_feature (1)..(29): Homolog of NCBI NO: 15225414 NR Description: hypothetical protein [Arabidopsis thaliana]
  misc_feature (71)..(149): Homolog of NCBI NO: 15225414 NR Description: hypothetical protein [Arabidopsis thaliana]
  misc_feature (1)..(35): Homolog of NCBI NO: 37533962 NR Description: hypothetical protein [Oryza sativa (japonica
  misc_feature (73)..(149): Homolog of NCBI NO: 37533962 NR Description: hypothetical protein [Oryza sativa (japonica
  misc_feature (1)..(162): Homolog of NCBI NO: 15241275 NR Description: ids4-related protein [Arabidopsis thaliana]
  misc_feature (1)..(162): Homolog of NCBI NO: 21592813 NR Description: ids4-like protein [Arabidopsis thaliana]
  misc_feature (1)..(149): Homolog of NCBI NO: 15225770 NR Description: expressed protein [Arabidopsis thaliana]
MKFGKSLSSQIVETLPEWRDKFLSYKDLKKRLKLIGLGADGEERQAKRARVSEPAGDGDETAAAAAAAMTPEEADFMRLLEAELDKFNSFFVEKEEEYIIRQKELQDRVARAAGMESREELLRVHKEIVDFHGEMVLLENYSALNYTALLHGRQFYSRHLHDPTWQHQKQACRQESLLGRDASFADRACSVVCKAISFVFHILAQCHDDVLLRTRSVSFPDCTAISIYSACAN

SEQ ID NO: 52229 - protein, 165 aa, Glycine max
  peptide (1)..(165): Ceres Seq. ID no. 13581870
  misc_feature (1)..(81): Pfam Name: SPX domain Pfam Description: SPX domain
  misc_feature (1)..(78): Homolog of NCBI NO: 23237928 NR Description: ids4-like protein [Oryza sativa (japonica
  misc_feature (1)..(81): Homolog of NCBI NO: 18417630 NR Description: ids-4 protein - like [Arabidopsis thaliana]
  misc_feature (1)..(81): Homolog of NCBI NO: 11358467 NR Description: ids-4 protein-like - Arabidopsis thaliana
  misc_feature (1)..(82): Homolog of NCBI NO: 34897330 NR Description: putative signal transduction protein [Oryza
  misc_feature (4)..(82): Homolog of NCBI NO: 16506648 NR Description: IDS-4-like protein [Castanea sativa]
  misc_feature (3)..(81): Homolog of NCBI NO: 15225414 NR Description: hypothetical protein [Arabidopsis thaliana]
  misc_feature (5)..(81): Homolog of NCBI NO: 37533962 NR Description: hypothetical protein [Oryza sativa (japonica
  misc_feature (1)..(94): Homolog of NCBI NO: 15241275 NR Description: ids4-related protein [Arabidopsis thaliana]
  misc_feature (1)..(94): Homolog of NCBI NO: 21592813 NR Description: ids4-like protein [Arabidopsis thaliana]
  misc_feature (1)..(81): Homolog of NCBI NO: 15225770 NR Description: expressed protein [Arabidopsis thaliana]
MTPEEADFMRLLEAELDKFNSFFVEKEEEYIIRQKELQDRVARAAGMESREELLRVHKEIVDFHGEMVLLENYSALNYTALLHGRQFYSRHLHDPTWQHQKQACRQESLLGRDASFADRACSVVCKAISFVFHILAQCHDDVLLRTRSVSFPDCTAISIYSACAN

SEQ ID NO: 52230 - protein, 157 aa, Glycine max
  peptide (1)..(157): Ceres Seq. ID no. 13581871
  misc_feature (1)..(73): Pfam Name: SPX domain Pfam Description: SPX domain
  misc_feature (1)..(70): Homolog of NCBI NO: 23237928 NR Description: ids4-like protein [Oryza sativa (japonica
  misc_feature (1)..(73): Homolog of NCBI NO: 18417630 NR Description: ids-4 protein - like [Arabidopsis thaliana]
  misc_feature (1)..(73): Homolog of NCBI NO: 11358467 NR Description: ids-4 protein-like - Arabidopsis thaliana
  misc_feature (1)..(74): Homolog of NCBI NO: 34897330 NR Description: putative signal transduction protein [Oryza
  misc_feature (1)..(74): Homolog of NCBI NO: 16506648 NR Description: IDS-4-like protein [Castanea sativa]
  misc_feature (1)..(73): Homolog of NCBI NO: 15225414 NR Description: hypothetical protein [Arabidopsis thaliana]
  misc_feature (1)..(73): Homolog of NCBI NO: 37533962 NR Description: hypothetical protein [Oryza sativa (japonica
  misc_feature (1)..(86): Homolog of NCBI NO: 15241275 NR Description: ids4-related protein [Arabidopsis thaliana]
  misc_feature (1)..(86): Homolog of NCBI NO: 21592813 NR Description: ids4-like protein [Arabidopsis thaliana]
  misc_feature (1)..(73): Homolog of NCBI NO: 15225770 NR Description: expressed protein [Arabidopsis thaliana]
MRLLEAELDKFNSFFVEKEEEYIIRQKELQDRVARAAGMESREELLRVHKEIVDFHGEMVLLENYSALNYTALLHGRQFYSRHLHDPTWQHQKQACRQESLLGRDASFADRACSVVCKAISFVFHILAQCHDDVLLRTRSVSFPDCTAISIYSACAN

SEQ ID NO: 52231 - DNA, 919 bp, Glycine max
  misc_feature (1)..(919): Ceres Seq. ID no. 13638815
gtacagtggcaaattattttcagtcgataattggtggattgtctgaccctgtgaccgagtgcggaaacagcagtcagtagacgacactgaatcgccaacaactgcgttcatcatgtcgccggcgacttcttccgcggtgggtaccctatccggcggcctcctcccccacggtgcacatcgccggcgacccttgccaaccgcccgcctcctcccgccgcgttggtctaggctccaggtcaacgcggcccgtcatcgccgcctggccactcccccgcgcgcccagagcgctccctccccagggtacctgccggactcggagttctacaagatcgaggccatcctgaggccatggagggtgtcgcatgtctcgtcgggtttgctagaaatggggatcagaggtgtgacggtgtccgatgtgcggggctatggggcgcagggcgggtcgacggagcggtacgaagggtcagaattttcagaagatacatttattgctaaagttaaaatggaaatagtcgtgtgcaaggagcaggttgagccagtaattgacaaaataattgagaaggccagaactggagaaattggtgatgggaagatattcttgatacccgtcgcggatgttgtaagggtacgcaccggcgaacgcggagtgcatgcggagaagatgatcggcggtctgtcagacaaactgcctccggtgatcacaatctcatgagtagagcttgactgctcttgctgcctgtaactgtaagcgcatccctcaggctggttgcttgtggccgtgtgtgtcttgacctttggggaataatgtgtatgtaactttgcgtgttggcacgaataaattggcaccagcatccatacggcgggtggtgttgttgaatggggtggttactgtggttcgtgtgcggaatgcagtgattgc

SEQ ID NO: 52232 - protein, 199 aa, Glycine max
  peptide (1)..(199): Ceres Seq. ID no. 13638816
  misc_feature (72)..(181): Homolog of NCBI NO: 2494772 NR Description: Nitrogen regulatory protein P-II (PII signal
  misc_feature (72)..(181): Homolog of NCBI NO: 17229811 NR Description: nitrogen regulatory protein P-II [Nostoc sp. PCC
  misc_feature (72)..(181): Homolog of NCBI NO: 7523524 NR Description: nitrogen metabolism regulator protein
  misc_feature (72)..(181): Homolog of NCBI NO: 23127409 NR Description: hypothetical protein [Nostoc punctiforme]
  misc_feature (72)..(181): Homolog of NCBI NO: 2494773 NR Description: NITROGEN REGULATORY PROTEIN P-II (PII SIGNAL
  misc_feature (31)..(187): Homolog of NCBI NO: 37653227 NR Description: PII-like protein [Pinus pinaster]
  misc_feature (54)..(194): Homolog of NCBI NO: 15234360 NR Description: P II nitrogen sensing protein GLB I [Arabidopsis
  misc_feature (32)..(190): Homolog of NCBI NO: 38231570 NR Description: PII-like protein [Lycopersicon esculentum]
  misc_feature (54)..(192): Homolog of NCBI NO: 13277515 NR Description: PII protein [Medicago sativa]
  misc_feature (36)..(190): Homolog of NCBI NO: 3885941 NR Description: PII protein [Ricinus communis]
MSPATSSAVGTLSGGLLPHGAHRRRPLPTARLLPPRWSRLQVNAARHRRLATPPRAQSAPSPGYLPDSEFYKIEAILRPWRVSHVSSGLLEMGIRGVTVSDVRGYGAQGGSTERYEGSEFSEDTFIAKVKMEIVVCKEQVEPVIDKIIEKARTGEIGDGKIFLIPVADVVRVRTGERGVHAEKMIGGLSDKLPPVITIS

SEQ ID NO: 52233 - protein, 108 aa, Glycine max
  peptide (1)..(108): Ceres Seq. ID no. 13638817
  misc_feature (1)..(90): Homolog of NCBI NO: 2494772 NR Description: Nitrogen regulatory protein P-II (PII signal
  misc_feature (1)..(90): Homolog of NCBI NO: 17229811 NR Description: nitrogen regulatory protein P-II [Nostoc sp. PCC
  misc_feature (1)..(90): Homolog of NCBI NO: 7523524 NR Description: nitrogen metabolism regulator protein
  misc_feature (1)..(90): Homolog of NCBI NO: 23127409 NR Description: hypothetical protein [Nostoc punctiforme]
  misc_feature (1)..(90): Homolog of NCBI NO: 2494773 NR Description: NITROGEN REGULATORY PROTEIN P-II (PII SIGNAL
  misc_feature (1)..(96): Homolog of NCBI NO: 37653227 NR Description: PII-like protein [Pinus pinaster]
  misc_feature (1)..(103): Homolog of NCBI NO: 15234360 NR Description: P II nitrogen sensing protein GLB I [Arabidopsis
  misc_feature (1)..(99): Homolog of NCBI NO: 38231570 NR Description: PII-like protein [Lycopersicon esculentum]
  misc_feature (1)..(101): Homolog of NCBI NO: 13277515 NR Description: PII protein [Medicago sativa]
  misc_feature (1)..(99): Homolog of NCBI NO: 3885941 NR Description: PII protein [Ricinus communis]
MGIRGVTVSDVRGYGAQGGSTERYEGSEFSEDTFIAKVKMEIVVCKEQVEPVIDKIIEKARTGEIGDGKIFLIPVADVVRVRTGERGVHAEKMIGGLSDKLPPVITIS

SEQ ID NO: 52234 - DNA, 658 bp, Glycine max
  misc_feature (1)..(658): Ceres Seq. ID no. 15172768
atctccccactcggccactccccaccccatagccgcggatccactgcgccgcggcgaggacgacggcgaggcgatcccggccctgtgcaccaggggcgcgatggctgaccatgacccagagttggaggccattaggcagaggcgaatgcaagagctaatgggacagcgtggtggtgcggcaagcccacaaaatgcagggcaacaaaaggctcaggaagatgcaaagcaggaagctgaggaacgccggcagatgatgcttgctcagatactgtcttctgaagctagagaaagaatctcccgcatagctttggtcaagcctgataaagcaagaggagtggaggatgttctgctgagagctgcacaaactggtggaatatctgaaaaggtgtctgaagaaaggcttatctcacttctggagcaaatcaacacccacacaagcaaacaaaccaaagtgacgattcagaggcgtcgctttgacgacgatgactagttggtaagcttgatgtactagcgaatgggtgcagtagcgtctgttgcttgattcaacaaccgtcagaacctgacaaactatttgattggtcttgggttgtatatgatctggatattatttggtggggtttttcattgataactgttggatgcgtcacttctacccctg

SEQ ID NO: 52235 - protein, 162 aa, Glycine max
  peptide (1)..(162): Ceres Seq. ID no. 15172769
  misc_feature (44)..(155): Pfam Name: Double-stranded DNA-binding domain Pfam Description: Double-stranded DNA-binding domain
  misc_feature (38)..(162): Homolog of NCBI NO: 30584883 NR Description: Homo sapiens programmed cell death 5 [synthetic
  misc_feature (38)..(162): Homolog of NCBI NO: 4759224 NR Description: programmed cell death 5
  misc_feature (38)..(162): Homolog of NCBI NO: 27731143 NR Description: similar to programmed cell death 5
  misc_feature (38)..(162): Homolog of NCBI NO: 9790259 NR Description: programmed cell death 5 [Mus musculus]
  misc_feature (38)..(162): Homolog of NCBI NO: 28279764 NR Description: Similar to programmed cell death 5 [Danio rerio]
  misc_feature (38)..(162): Homolog of NCBI NO: 19114093 NR Description: conserved hypothetical protein
  misc_feature (38)..(162): Homolog of NCBI NO: 21592844 NR Description: unknown [Arabidopsis thaliana]
  misc_feature (38)..(162): Homolog of NCBI NO: 18397268 NR Description: putative apoptosis-related protein 19
  misc_feature (38)..(162): Homolog of NCBI NO: 30690937 NR Description: putative apoptosis-related protein 19
  misc_feature (38)..(162): Homolog of NCBI NO: 32966259 NR Description: apoptosis-related protein [Oryza sativa (indica
SPHSATPHPIAADPLRRGEDDGEAIPALCTRGAMADHDPELEAIRQRRMQELMGQRGGAASPQNAGQQKAQEDAKQEAEERRQMMLAQILSSEARERISRIALVKPDKARGVEDVLLRAAQTGGISEKVSEERLISLLEQINTHTSKQTKVTIQRRRFDDDD

SEQ ID NO: 52236 - protein, 129 aa, Glycine max
  peptide (1)..(129): Ceres Seq. ID no. 15172770
  misc_feature (11)..(122): Pfam Name: Double-stranded DNA-binding domain Pfam Description: Double-stranded DNA-binding domain
  misc_feature (5)..(129): Homolog of NCBI NO: 30584883 NR Description: Homo sapiens programmed cell death 5 [synthetic
  misc_feature (5)..(129): Homolog of NCBI NO: 4759224 NR Description: programmed cell death 5
  misc_feature (5)..(129): Homolog of NCBI NO: 27731143 NR Description: similar to programmed cell death 5
  misc_feature (5)..(129): Homolog of NCBI NO: 9790259 NR Description: programmed cell death 5 [Mus musculus]
  misc_feature (5)..(129): Homolog of NCBI NO: 28279764 NR Description: Similar to programmed cell death 5 [Danio rerio]
  misc_feature (5)..(129): Homolog of NCBI NO: 19114093 NR Description: conserved hypothetical protein
  misc_feature (5)..(129): Homolog of NCBI NO: 21592844 NR Description: unknown [Arabidopsis thaliana]
  misc_feature (5)..(129): Homolog of NCBI NO: 18397268 NR Description: putative apoptosis-related protein 19
  misc_feature (5)..(129): Homolog of NCBI NO: 30690937 NR Description: putative apoptosis-related protein 19
  misc_feature (5)..(129): Homolog of NCBI NO: 32966259 NR Description: apoptosis-related protein [Oryza sativa (indica
MADHDPELEAIRQRRMQELMGQRGGAASPQNAGQQKAQEDAKQEAEERRQMMLAQILSSEARERISRIALVKPDKARGVEDVLLRAAQTGGISEKVSEERLISLLEQINTHTSKQTKVTIQRRRFDDDD

SEQ ID NO: 52237 - protein, 114 aa, Glycine max
  peptide (1)..(114): Ceres Seq. ID no. 15172771
  misc_feature (1)..(107): Pfam Name: Double-stranded DNA-binding domain Pfam Description: Double-stranded DNA-binding domain
  misc_feature (1)..(114): Homolog of NCBI NO: 30584883 NR Description: Homo sapiens programmed cell death 5 [synthetic
  misc_feature (1)..(114): Homolog of NCBI NO: 4759224 NR Description: programmed cell death 5
  misc_feature (1)..(114): Homolog of NCBI NO: 27731143 NR Description: similar to programmed cell death 5
  misc_feature (1)..(114): Homolog of NCBI NO: 9790259 NR Description: programmed cell death 5 [Mus musculus]
  misc_feature (1)..(114): Homolog of NCBI NO: 28279764 NR Description: Similar to programmed cell death 5 [Danio rerio]
  misc_feature (1)..(114): Homolog of NCBI NO: 19114093 NR Description: conserved hypothetical protein
  misc_feature (1)..(114): Homolog of NCBI NO: 21592844 NR Description: unknown [Arabidopsis thaliana]
  misc_feature (1)..(114): Homolog of NCBI NO: 18397268 NR Description: putative apoptosis-related protein 19
  misc_feature (1)..(114): Homolog of NCBI NO: 30690937 NR Description: putative apoptosis-related protein 19
  misc_feature (1)..(114): Homolog of NCBI NO: 32966259 NR Description: apoptosis-related protein [Oryza sativa (indica
MQELMGQRGGAASPQNAGQQKAQEDAKQEAEERRQMMLAQILSSEARERISRIALVKPDKARGVEDVLLRAAQTGGISEKVSEERLISLLEQINTHTSKQTKVTIQRRRFDDDD

SEQ ID NO: 52238 - DNA, 1046 bp, Glycine max
  misc_feature (1)..(1046): Ceres Seq. ID no. 14314042
acaaacaattaaacaaattaatcttcaattctctcaattttctttttgtttttccctcttttttttttttcttttctggtcatcatcatgcccagaacaaaggtgaaaatcgccttcataaccaacgatgctgcgaggagggcagcatacaggaaaaggaagaagggaattctgaagaagatggaggaactcagcaccctttgtggaattgaagcatgtgctatagcatatagcccctatgatcccgagccagtgatttggccatccgaattgggtgtccatcatgtgctgggaaaattcaggaccatgtctgaatgggagaagaacaagaagatggcgaaccaggagagcttcctagggcatatgatcgcgaagcacaaggagcagctgaagaaactcgtgaaggaaaacaaggagaaggagatgaccgtgttcatgcatcaatgccttgatgaagggagggttctgccagataacaacttgacggcagacgatttgaacgatctttcgtcgatcatcgaacagaacctgaaggatgtttgtagaaggttggaaacgctgaatgttatggagaagacaccaccacaccaacaacccccccagatccaatcatcaccagtgttggatatgagtgctaaccatgatcaaaagcagaagaagtttatggatttgcttaatggtaatgaggatgagacaacaacagtgcctccatttgaatcagatgctaatctccaactccaaattgggttttaggctaacctgttaccttgaaaaaattaagcacgtgtgtgcttgttagtcttttgggaatcatgtttcagttcaatttgtctatgctttgatttttaattttaattactgtcctagcttgtgtgtcaatgtgaagacacaatagtaagtagtcatttaattactgtctagctagtcttcacattttattttcgtgcctggaaatacatgttgatttggtttgacatgtttatcctgctttcaggacttggttgttcatttaatcattatggtttaattaagaatgtttcgcttgc

SEQ ID NO: 52239 - protein, 221 aa, Glycine max
  peptide (1)..(221): Ceres Seq. ID no. 14314043
  misc_feature (9)..(60): Pfam Name: SRF-type transcription factor (DNA-binding and Pfam Description: SRF-type transcription factor (DNA-binding and
  misc_feature (5)..(158): Homolog of NCBI NO: 32402458 NR Description: MADS-box protein AGL36 [Arabidopsis thaliana]
  misc_feature (1)..(158): Homolog of NCBI NO: 7484930 NR Description: DNA-binding protein homolog F21E10.10 -
  misc_feature (1)..(217): Homolog of NCBI NO: 30690321 NR Description: expressed protein [Arabidopsis thaliana]
  misc_feature (1)..(177): Homolog of NCBI NO: 34894272 NR Description: unnamed protein product [Oryza sativa (japonica
  misc_feature (3)..(202): Homolog of NCBI NO: 15218644 NR Description: MADS-box protein [Arabidopsis thaliana]
  misc_feature (6)..(191): Homolog of NCBI NO: 15217896 NR Description: MADS-box protein [Arabidopsis thaliana]
  misc_feature (3)..(191): Homolog of NCBI NO: 32402454 NR Description: MADS-box protein AGL38 [Arabidopsis thaliana]
  misc_feature (8)..(184): Homolog of NCBI NO: 30690335 NR Description: MADS-box protein [Arabidopsis thaliana]
  misc_feature (1)..(184): Homolog of NCBI NO: 32402456 NR Description: MADS-box protein AGL35 [Arabidopsis thaliana]
  misc_feature (1)..(158): Homolog of NCBI NO: 15239669 NR Description: MADS-box protein [Arabidopsis thaliana]
MPRTKVKIAFITNDAARRAAYRKRKKGILKKMEELSTLCGIEACAIAYSPYDPEPVIWPSELGVHHVLGKFRTMSEWEKNKKMANQESFLGHMIAKHKEQLKKLVKENKEKEMTVFMHQCLDEGRVLPDNNLTADDLNDLSSIIEQNLKDVCRRLETLNVMEKTPPHQQPPQIQSSPVLDMSANHDQKQKKFMDLLNGNEDETTTVPPFESDANLQLQIGF

SEQ ID NO: 52240 - protein, 190 aa, Glycine max
  peptide (1)..(190): Ceres Seq. ID no. 14314044
  misc_feature (1)..(127): Homolog of NCBI NO: 32402458 NR Description: MADS-box protein AGL36 [Arabidopsis thaliana]
  misc_feature (1)..(127): Homolog of NCBI NO: 7484930 NR Description: DNA-binding protein homolog F21E10.10 -
  misc_feature (1)..(186): Homolog of NCBI NO: 30690321 NR Description: expressed protein [Arabidopsis thaliana]
  misc_feature (1)..(146): Homolog of NCBI NO: 34894272 NR Description: unnamed protein product [Oryza sativa (japonica
  misc_feature (1)..(171): Homolog of NCBI NO: 15218644 NR Description: MADS-box protein [Arabidopsis thaliana]
  misc_feature (1)..(160): Homolog of NCBI NO: 15217896 NR Description: MADS-box protein [Arabidopsis thaliana]
  misc_feature (1)..(160): Homolog of NCBI NO: 32402454 NR Description: MADS-box protein AGL38 [Arabidopsis thaliana]
  misc_feature (1)..(153): Homolog of NCBI NO: 30690335 NR Description: MADS-box protein [Arabidopsis thaliana]
  misc_feature (1)..(153): Homolog of NCBI NO: 32402456 NR Description: MADS-box protein AGL35 [Arabidopsis thaliana]
  misc_feature (1)..(127): Homolog of NCBI NO: 15239669 NR Description: MADS-box protein [Arabidopsis thaliana]
MEELSTLCGIEACAIAYSPYDPEPVIWPSELGVHHVLGKFRTMSEWEKNKKMANQESFLGHMIAKHKEQLKKLVKENKEKEMTVFMHQCLDEGRVLPDNNLTADDLNDLSSIIEQNLKDVCRRLETLNVMEKTPPHQQPPQIQSSPVLDMSANHDQKQKKFMDLLNGNEDETTTVPPFESDANLQLQIGF

SEQ ID NO: 52241 - protein, 148 aa, Glycine max
  peptide (1)..(148): Ceres Seq. ID no. 14314045
  misc_feature (1)..(85): Homolog of NCBI NO: 32402458 NR Description: MADS-box protein AGL36 [Arabidopsis thaliana]
  misc_feature (1)..(85): Homolog of NCBI NO: 7484930 NR Description: DNA-binding protein homolog F21E10.10 -
  misc_feature (1)..(144): Homolog of NCBI NO: 30690321 NR Description: expressed protein [Arabidopsis thaliana]
  misc_feature (1)..(104): Homolog of NCBI NO: 34894272 NR Description: unnamed protein product [Oryza sativa (japonica
  misc_feature (1)..(129): Homolog of NCBI NO: 15218644 NR Description: MADS-box protein [Arabidopsis thaliana]
  misc_feature (1)..(118): Homolog of NCBI NO: 15217896 NR Description: MADS-box protein [Arabidopsis thaliana]
  misc_feature (1)..(118): Homolog of NCBI NO: 32402454 NR Description: MADS-box protein AGL38 [Arabidopsis thaliana]
  misc_feature (1)..(111): Homolog of NCBI NO: 30690335 NR Description: MADS-box protein [Arabidopsis thaliana]
  misc_feature (1)..(111): Homolog of NCBI NO: 32402456 NR Description: MADS-box protein AGL35 [Arabidopsis thaliana]
  misc_feature (1)..(85): Homolog of NCBI NO: 15239669 NR Description: MADS-box protein [Arabidopsis thaliana]
MSEWEKNKKMANQESFLGHMIAKHKEQLKKLVKENKEKEMTVFMHQCLDEGRVLPDNNLTADDLNDLSSIIEQNLKDVCRRLETLNVMEKTPPHQQPPQIQSSPVLDMSANHDQKQKKFMDLLNGNEDETTTVPPFESDANLQLQIGF

SEQ ID NO: 52242 - DNA, 1384 bp, Glycine max
  misc_feature (1)..(1384): Ceres Seq. ID no. 14314068
atacaatcaaactgcaaaaaaaaaaaaaaaaacaaagcattttttttttgccgcaatcaatcaataactgtcggcgacatatccgaatcaccgttgcagtctcacgtttcctctaactgtttttctcgggctccgagctcgccggagctaacattcacggcggcgcaccgcccatttcttcaccctcactcaaaatgcagtgccaccgcgtctccgccgtgctttttctaagcttatgctttagaattgcgctagtatacgcgcaaggagagcctcatctcactgctctggaccaacattggttcccgggaaccgccacgtggtacggcgaccccgaaggtgacggtagcaccggaggggcatgtgggtatggtacgttggtggacgtgaagccgttgaaggcaagggtgggagcagtggggtcagtgctgtttaagaagggggaagggtgtggtgcttgctacaaggtgaagtgtttggaccatagcatatgttcgaagcgggcagtgacggttataataacggatgagtgcccgggctgcccgtctgaccggacgcacttcgacctcagtggctctgcctttggccgcatggcagttgtgggtgaaaacggtcagctcaggaacctaggtgaaatcccagtcatttaccgcagaacaccgtgcaagtatgctggcaaaaacattgccttccatgtcaatgaaggctccactcctttttggctatcccttctggtggagtttgaagatggagatggggacattggctccatgcatatacaagaagcagggtcgagtgagtggcagcagatgaatcatgtatggggtgcaaattggtgcattgttaaggggccattaagaggacctttctctgttaaactaagcacatctacagggaaaagcctcactgccaaagatgttattccaagcaattggactccaaaagccacttatacctctcgcttaaatttcctttcttagtacaaggtttccaactgaacaatcaccaacaccaaggcccttcttcccaaagggagaaagtaatttaataaatcaccatttacccagttaaagttgctcaagttccacaaggcagagagtcttcttggcctttgagtctttgtgttttttaataagaaagaaaagtagccgttgagtgtacaaggccatatccaatgatctttccttttcttagttttatcttttcgcttttgaatacctataattttgtcatttttgtggtgtgcaactgtttgtaccaagaagtcatggtattattggtagccctctccaaaaaggagggagagcgtgtagtgtagtatcgtagaatgcgtgtactgggctcagtgggcttcaaatgaatgaatatataaattttagaaccg

SEQ ID NO: 52243 - protein, 261 aa, Glycine max
  peptide (1)..(261): Ceres Seq. ID no. 14314069
  misc_feature (164)..(244): Pfam Name: Pollen allergen Pfam Description: Pollen allergen
  misc_feature (1)..(259): Homolog of NCBI NO: 22095681 NR Description: Putative beta-expansin 5 precursor (At-EXPB5)
  misc_feature (30)..(259): Homolog of NCBI NO: 20138423 NR Description: Putative beta-expansin 2 precursor (At-EXPB2)
  misc_feature (13)..(259): Homolog of NCBI NO: 1076486 NR Description: cim1 protein - soybean
  misc_feature (31)..(197): Homolog of NCBI NO: 21666634 NR Description: beta-expansin [Oryza sativa]
  misc_feature (9)..(231): Homolog of NCBI NO: 7484871 NR Description: cim1 protein homolog F26K10.130 - Arabidopsis
  misc_feature (20)..(259): Homolog of NCBI NO: 11357194 NR Description: beta-expansin [imported] - Arabidopsis thaliana
  misc_feature (9)..(259): Homolog of NCBI NO: 15225423 NR Description: beta-expansin, putative (EXPB1) [Arabidopsis
  misc_feature (31)..(259): Homolog of NCBI NO: 38346623 NR Description: OSJNBa0074L08.17 [Oryza sativa (japonica
  misc_feature (33)..(259): Homolog of NCBI NO: 21592834 NR Description: putative beta-expansin/allergen protein
  misc_feature (9)..(259): Homolog of NCBI NO: 18417157 NR Description: beta-expansin, putative (EXPB3) [Arabidopsis
MQCHRVSAVLFLSLCFRIALVYAQGEPHLTALDQHWFPGTATWYGDPEGDGSTGGACGYGTLVDVKPLKARVGAVGSVLFKKGEGCGACYKVKCLDHSICSKRAVTVIITDECPGCPSDRTHFDLSGSAFGRMAVVGENGQLRNLGEIPVIYRRTPCKYAGKNIAFHVNEGSTPFWLSLLVEFEDGDGDIGSMHIQEAGSSEWQQMNHVWGANWCIVKGPLRGPFSVKLSTSTGKSLTAKDVIPSNWTPKATYTSRLNFLS

SEQ ID NO: 52244 - DNA, 1189 bp, Glycine max
  misc_feature (1)..(1189): Ceres Seq. ID no. 14314037
atataaacttacccttgccttgtcaaccaacacaaagaaggttaatctcaccaatctgacagggatcatcaatggcaaagcaattaattcccttcataatctctcttctcctcttcattttcacagaagtggaaggggctaaaaggtcttatggggtatacaacagcaaccctgtaaaactgtttgtttttggggactcctatgttgacactgggaatttcgtgcattcagaatcatacaagcctcccagtggaatcacttttcctggtaaccctgcagggagattctgcgacggtcgcatcatcactgattacgttgcttcctttctgaaaattgaatcccccacaccatatacttttagaaattcatctaatcttcactacggtataaactttgcctatggagggaccggtattttcagtacttcgattgatggaccaaacgcgactgcccaaatcgactcatttgagaagctaatccaacaaaatatctataccaaacatgatcttgaatcctcaattgctctcgtcaatgccggtggtaatgattatacaaatgcattaaaaactgggcgcattattgatttaccaggcttcatggaatcccttgtgaagcaaatgtctgtaaatcttaaacgcattcgcagcttagggataaaaaaggtagcagttgggttattacagccaattgggtgtttgcctgtgttaaatgtgatatctttccgtacgaactgcattggccttttgaacgtgatctccaaagatcacaacaaaatgttgctcaaagctgtgcaagaactcaacaaggaagcagcagacaaatcagttttcataacactggacctctacaactccttcctctctgcaattgaaactatgcagaaaaagcgtgcagaaaagtctacactgatgaatccgttgcaaccatgctgtgagggaaacaatttggaagattcatgtggaagtctggatgacgaaggatcaaagaaatacagtttatgtgagaacccgaaactttctttcttttgggacacacttcacccttctcaaaatggttggtttgcagtctacacaatattgcaatctactcttggccaacttattacatgaaaaaaacttctaatcaatattagtgtatttggattagttccatgatgaaaaataatctattaatccttcaaagttattgc

SEQ ID NO: 52245 - protein, 345 aa, Glycine max
  peptide (1)..(345): Ceres Seq. ID no. 14314038
  misc_feature (37)..(336): Pfam Name: GDSL-like Lipase/Acylhydrolase Pfam Description: GDSL-like Lipase/Acylhydrolase
  misc_feature (8)..(327): Homolog of NCBI NO: 30695607 NR Description: GDSL-motif lipase/hydrolase protein [Arabidopsis
  misc_feature (59)..(206): Homolog of NCBI NO: 33285918 NR Description: putative lipase [Brassica rapa subsp. pekinensis]
  misc_feature (8)..(344): Homolog of NCBI NO: 32488918 NR Description: OSJNBb0059K02.9 [Oryza sativa (japonica
  misc_feature (8)..(344): Homolog of NCBI NO: 10241432 NR Description: putative lipase/acylhydrolase
  misc_feature (36)..(345): Homolog of NCBI NO: 15242810 NR Description: GDSL-motif lipase/hydrolase protein [Arabidopsis
  misc_feature (28)..(336): Homolog of NCBI NO: 20260298 NR Description: unknown protein [Arabidopsis thaliana]
  misc_feature (83)..(340): Homolog of NCBI NO: 6143883 NR Description: unknown protein [Arabidopsis thaliana]
  misc_feature (4)..(340): Homolog of NCBI NO: 15232799 NR Description: GDSL-motif lipase/hydrolase protein [Arabidopsis
  misc_feature (4)..(340): Homolog of NCBI NO: 28393114 NR Description: putative lipase acylhydrolase [Arabidopsis
  misc_feature (5)..(340): Homolog of NCBI NO: 15242811 NR Description: GDSL-motif lipase/hydrolase protein [Arabidopsis
MAKQLIPFIISLLLFIFTEVEGAKRSYGVYNSNPVKLFVFGDSYVDTGNFVHSESYKPPSGITFPGNPAGRFCDGRIITDYVASFLKIESPTPYTFRNSSNLHYGINFAYGGTGIFSTSIDGPNATAQIDSFEKLIQQNIYTKHDLESSIALVNAGGNDYTNALKTGRIIDLPGFMESLVKQMSVNLKRIRSLGIKKVAVGLLQPIGCLPVLNVISFRTNCIGLLNVISKDHNKMLLKAVQELNKEAADKSVFITLDLYNSFLSAIETMQKKRAEKSTLMNPLQPCCEGNNLEDSCGSLDDEGSKKYSLCENPKLSFFWDTLHPSQNGWFAVYTILQSTLGQLIT

SEQ ID NO: 52246 - DNA, 874 bp, Glycine max
  misc_feature (1)..(874): Ceres Seq. ID no. 14306131
aaattccatggcttacaatcacaatgcatcttatctttctctcccaccaccgcttttcatagtatatgatccaatctcatatatgctacgcttctagctccattctgcacaattctctcttatcatctttgttattacctctttccaaagtccaaattttctagttccaccaaaccaaaccaaaccaaaatggcagcagcctcagcctcatccatgatatcaacaccagccttatctccaaccatccaaaagcaccatcatttgaagccatccaacgtgtgcttccaaggtcttagacccctcgcaaggttcaccaaagcctcatcaaccaaagtgagcaccaccaccaaaagggttattccaaagggtggtgttagagctgaactcaactcagcccttgtgataagcctcagcactggcctctccctcttcttgggaaggtttgtgttcttcaacttccaaagggagaacgtggcaaagcaagtgcctgagcagaacggcctcacacactttgaggctggtgatacacgtgccaaggagtatgtcagcctcctcaaatccaatgaccctgttggattcaacattgttgatgtcttggcttggggctccattggccatgttgttgcttactacatcttggccaccactagcaatggctatgaccctgcattctttggctgatttaatttcatcatcatgttgttccaactgtgtttcttgcttactttttagtatgtaatgtaatcaatgtcatgatgtataggttctctctaaagatccaacaagttcagcatatgctaatttgatcactattttcggctgcaatttggtttgctattatgattaatggaaaatgggacttctctacgtattg

SEQ ID NO: 52247 - protein, 163 aa, Glycine max
  peptide (1)..(163): Ceres Seq. ID no. 14306132
  misc_feature (65)..(159): Pfam Name: Photosystem I psaG / psaK Pfam Description: Photosystem I psaG / psaK
  misc_feature (65)..(102): Homolog of NCBI NO: 131193 NR Description: Photosystem I reaction center subunit V (PSI-G)
  misc_feature (35)..(154): Homolog of NCBI NO: 131191 NR Description: Photosystem I reaction center subunit V, precursor (PSI-G) (Light-harvesting complex I 10 kDa protein)
  misc_feature (67)..(158): Homolog of NCBI NO: 17369611 NR Description: Photosystem I reaction center subunit V,
  misc_feature (25)..(163): Homolog of NCBI NO: 131192 NR Description: Photosystem I reaction center subunit V,
  misc_feature (2)..(162): Homolog of NCBI NO: 131194 NR Description: Photosystem I reaction center subunit V,
  misc_feature (3)..(163): Homolog of NCBI NO: 15222757 NR Description: photosystem I subunit V precursor -related
MAAASASSMISTPALSPTIQKHHHLKPSNVCFQGLRPLARFTKASSTKVSTTTKRVIPKGGVRAELNSALVISLSTGLSLFLGRFVFFNFQRENVAKQVPEQNGLTHFEAGDTRAKEYVSLLKSNDPVGFNIVDVLAWGSIGHVVAYYILATTSNGYDPAFFG

SEQ ID NO: 52248 - protein, 155 aa, Glycine max
  peptide (1)..(155): Ceres Seq. ID no. 14306133
  misc_feature (57)..(151): Pfam Name: Photosystem I psaG / psaK Pfam Description: Photosystem I psaG / psaK
  misc_feature (57)..(94): Homolog of NCBI NO: 131193 NR Description: Photosystem I reaction center subunit V (PSI-G)
  misc_feature (27)..(146): Homolog of NCBI NO: 131191 NR Description: Photosystem I reaction center subunit V, precursor (PSI-G) (Light-harvesting complex I 10 kDa protein)
  misc_feature (59)..(150): Homolog of NCBI NO: 17369611 NR Description: Photosystem I reaction center subunit V,
  misc_feature (17)..(155): Homolog of NCBI NO: 131192 NR Description: Photosystem I reaction center subunit V,
  misc_feature (1)..(154): Homolog of NCBI NO: 131194 NR Description: Photosystem I reaction center subunit V,
  misc_feature (1)..(155): Homolog of NCBI NO: 15222757 NR Description: photosystem I subunit V precursor -related
MISTPALSPTIQKHHHLKPSNVCFQGLRPLARFTKASSTKVSTTTKRVIPKGGVRAELNSALVISLSTGLSLFLGRFVFFNFQRENVAKQVPEQNGLTHFEAGDTRAKEYVSLLKSNDPVGFNIVDVLAWGSIGHVVAYYILATTSNGYDPAFFG

SEQ ID NO: 52249 - DNA, 1170 bp, Glycine max
  misc_feature (1)..(1170): Ceres Seq. ID no. 14306059
attactttccgcatctaccttcattccttggcgggtgttagcggttgcggtttcggtttcgttgcgccgaatcttaaccgtccttttggggcccacaaatcgccgatactgtgttcactttcattgccggtggcggcgaagccaccgtaccaaccaccgacgccgtccaatccttttcagcctttcaaattgcgatgacgtatttcgaagaggatgccattaacggcgacggtgatcgaacgagggacgtcaatcgcaatcacgacggcggaggagaattatacgtcaatttgaggtgggacccacaaccggaggccccgaacactaaccggagaggatcgtcgcgtctctggtattgggttaagttggttctctgtttcttatgtctgggcctcttggctctcgttgctttcaaatgggttgtcccactcttcacagaaaaggtgattattcctataataaattgggagacgaacacgttcagttctccagtgttagctgttctggtgtttgcttctatagcgctattccctaccctaattctgccatcctcgccttctatgtgggtggctgggttgacatttggttatggctttggattcttgctaatcatttctgcagcagcagtgggagtatcacttcctttcttgatcggttcaatcttctatagtaaaattgaagggtggttagaaaagtatccaaagagagcttctgttctaagatctgctggtgggggaaattggtttcatcaatttcaggcagttgctttaatcagggtttctccattcccatacataatctacaactattgtgccgtcgcaacaaatgttgagtattggccttacctgctcggttccatggtaggaatggtgccagaaatatttgtttcaatttacacgggaattttgatagaaacattggctaatgcttcacatcaaaatcacactctatccactccacaaattgccctcaatgtagttggtttctgcataagtggagctacaataatctttttcacagcctatgcaaagaggcagctcaaggagttacaacagaaagaggatggtttgctcttgcaataatccagtaggtttagtctgggtttatttgctggcagcatgaggcagttatcactatcttgaacgtcacatgttaaggcttaccacagaa

SEQ ID NO: 52250 - protein, 295 aa, Glycine max
  peptide (1)..(295): Ceres Seq. ID no. 14306060
  misc_feature (137)..(295): Homolog of NCBI NO: 7486891 NR Description: hypothetical protein T12H17.240 - Arabidopsis
  misc_feature (55)..(235): Homolog of NCBI NO: 8778630 NR Description: F5O11.19 [Arabidopsis thaliana]
  misc_feature (229)..(295): Homolog of NCBI NO: 8778630 NR Description: F5O11.19 [Arabidopsis thaliana]
  misc_feature (5)..(162): Homolog of NCBI NO: 8778630 NR Description: F5O11.19 [Arabidopsis thaliana]
  misc_feature (55)..(289): Homolog of NCBI NO: 34913316 NR Description: P0519E12.36 [Oryza sativa (japonica
  misc_feature (39)..(289): Homolog of NCBI NO: 31249711 NR Description: hypothetical protein [Oryza sativa (japonica
  misc_feature (49)..(289): Homolog of NCBI NO: 18395356 NR Description: expressed protein [Arabidopsis thaliana]
  misc_feature (1)..(295): Homolog of NCBI NO: 15234386 NR Description: expressed protein [Arabidopsis thaliana]
  misc_feature (49)..(295): Homolog of NCBI NO: 30685958 NR Description: expressed protein [Arabidopsis thaliana]
  misc_feature (5)..(295): Homolog of NCBI NO: 15221330 NR Description: expressed protein [Arabidopsis thaliana]
MTYFEEDAINGDGDRTRDVNRNHDGGGELYVNLRWDPQPEAPNTNRRGSSRLWYWVKLVLCFLCLGLLALVAFKWVVPLFTEKVIIPIINWETNTFSSPVLAVLVFASIALFPTLILPSSPSMWVAGLTFGYGFGFLLIISAAAVGVSLPFLIGSIFYSKIEGWLEKYPKRASVLRSAGGGNWFHQFQAVALIRVSPFPYIIYNYCAVATNVEYWPYLLGSMVGMVPEIFVSIYTGILIETLANASHQNHTLSTPQIALNVVGFCISGATIIFFTAYAKRQLKELQQKEDGLLLQ

SEQ ID NO: 52251 - protein, 173 aa, Glycine max
  peptide (1)..(173): Ceres Seq. ID no. 14306061
  misc_feature (15)..(173): Homolog of NCBI NO: 7486891 NR Description: hypothetical protein T12H17.240 - Arabidopsis
  misc_feature (1)..(113): Homolog of NCBI NO: 8778630 NR Description: F5O11.19 [Arabidopsis thaliana]
  misc_feature (107)..(173): Homolog of NCBI NO: 8778630 NR Description: F5O11.19 [Arabidopsis thaliana]
  misc_feature (1)..(40): Homolog of NCBI NO: 8778630 NR Description: F5O11.19 [Arabidopsis thaliana]
  misc_feature (1)..(167): Homolog of NCBI NO: 34913316 NR Description: P0519E12.36 [Oryza sativa (japonica
  misc_feature (1)..(167): Homolog of NCBI NO: 31249711 NR Description: hypothetical protein [Oryza sativa (japonica
  misc_feature (1)..(167): Homolog of NCBI NO: 18395356 NR Description: expressed protein [Arabidopsis thaliana]
  misc_feature (1)..(173): Homolog of NCBI NO: 15234386 NR Description: expressed protein [Arabidopsis thaliana]
  misc_feature (1)..(173): Homolog of NCBI NO: 30685958 NR Description: expressed protein [Arabidopsis thaliana]
  misc_feature (1)..(173): Homolog of NCBI NO: 15221330 NR Description: expressed protein [Arabidopsis thaliana]
MWVAGLTFGYGFGFLLIISAAAVGVSLPFLIGSIFYSKIEGWLEKYPKRASVLRSAGGGNWFHQFQAVALIRVSPFPYIIYNYCAVATNVEYWPYLLGSMVGMVPEIFVSIYTGILIETLANASHQNHTLSTPQIALNVVGFCISGATIIFFTAYAKRQLKELQQKEDGLLLQ

SEQ ID NO: 52252 - DNA, 831 bp, Glycine max
  misc_feature (1)..(831): Ceres Seq. ID no. 14306036
ccatttgatgtgaacaagcttcctatagaaactcaaaatcttctagctgtgtgcaagagggaaagcatggctgagtatccatcacctgaaaaggatgataataattgtaagcacatggatgactacccttcacctcaaacagataatccaaagcctttctctcaaatatacaaacgaaggcgtcataacttgaactccaacaactctaatgtttctggagattcagtccgaaccagccaggatccgtgctcctctacaataactaccgctgcaactgcactcccaaccgcaactgttgctggcacagccaccaacactgcaccgaaaaaacattttctgtctgcactggtggagttttccctgctagaatcccttgaatcaaaggacaaccttgcttcaattaaggcaccggattttgacactgaaaatctcgagtcatccatgcctccaagttgcgcaaagttcatcaagcaaatgcagagtgagatgcagaagctttcagttgaaaaggagacgataaggtttgagatgatgagcgcacaagcgatgattaacattctccagtctcgcatcgacgttctcagcaaagaaaatgaggatttgaagaggatggtggcccaaaatccataggaattggcaatgtcatgcccttgtatcagtgtaagttagttacaactgagtaatgaagctcagtcttccggatattttcttatttttctgagtaagaattgtagttcgtttctttggctaaacttattttaaacttgtcatcgtgtatcatatgactttcagtttcccattgttgtgaaaatatggccatgttagcatctc

SEQ ID NO: 52253 - protein, 209 aa, Glycine max
  peptide (1)..(209): Ceres Seq. ID no. 14306037
  misc_feature (66)..(205): Homolog of NCBI NO: 21105744 NR Description: nam-like protein 8 [Petunia x hybrida]
  misc_feature (1)..(203): Homolog of NCBI NO: 18398891 NR Description: expressed protein [Arabidopsis thaliana]
  misc_feature (50)..(203): Homolog of NCBI NO: 30681347 NR Description: expressed protein [Arabidopsis thaliana]
  misc_feature (46)..(205): Homolog of NCBI NO: 21105736 NR Description: nam-like protein 4 [Petunia x hybrida]
PFDVNKLPIETQNLLAVCKRESMAEYPSPEKDDNNCKHMDDYPSPQTDNPKPFSQIYKRRRHNLNSNNSNVSGDSVRTSQDPCSSTITTAATALPTATVAGTATNTAPKKHFLSALVEFSLLESLESKDNLASIKAPDFDTENLESSMPPSCAKFIKQMQSEMQKLSVEKETIRFEMMSAQAMINILQSRIDVLSKENEDLKRMVAQNP

SEQ ID NO: 52254 - protein, 187 aa, Glycine max
  peptide (1)..(187): Ceres Seq. ID no. 14306038
  misc_feature (44)..(183): Homolog of NCBI NO: 21105744 NR Description: nam-like protein 8 [Petunia x hybrida]
  misc_feature (1)..(181): Homolog of NCBI NO: 18398891 NR Description: expressed protein [Arabidopsis thaliana]
  misc_feature (28)..(181): Homolog of NCBI NO: 30681347 NR Description: expressed protein [Arabidopsis thaliana]
  misc_feature (24)..(183): Homolog of NCBI NO: 21105736 NR Description: nam-like protein 4 [Petunia x hybrida]
MAEYPSPEKDDNNCKHMDDYPSPQTDNPKPFSQIYKRRRHNLNSNNSNVSGDSVRTSQDPCSSTITTAATALPTATVAGTATNTAPKKHFLSALVEFSLLESLESKDNLASIKAPDFDTENLESSMPPSCAKFIKQMQSEMQKLSVEKETIRFEMMSAQAMINILQSRIDVLSKENEDLKRMVAQNP

SEQ ID NO: 52255 - protein, 171 aa, Glycine max
  peptide (1)..(171): Ceres Seq. ID no. 14306039
  misc_feature (28)..(167): Homolog of NCBI NO: 21105744 NR Description: nam-like protein 8 [Petunia x hybrida]
  misc_feature (1)..(165): Homolog of NCBI NO: 18398891 NR Description: expressed protein [Arabidopsis thaliana]
  misc_feature (12)..(165): Homolog of NCBI NO: 30681347 NR Description: expressed protein [Arabidopsis thaliana]
  misc_feature (8)..(167): Homolog of NCBI NO: 21105736 NR Description: nam-like protein 4 [Petunia x hybrida]
MDDYPSPQTDNPKPFSQIYKRRRHNLNSNNSNVSGDSVRTSQDPCSSTITTAATALPTATVAGTATNTAPKKHFLSALVEFSLLESLESKDNLASIKAPDFDTENLESSMPPSCAKFIKQMQSEMQKLSVEKETIRFEMMSAQAMINILQSRIDVLSKENEDLKRMVAQNP

SEQ ID NO: 52256 - DNA, 1616 bp, Glycine max
  misc_feature (1)..(1616): Ceres Seq. ID no. 14315063
atgcatataaactacaaacattatttcatccaagccctcttgtctcaacaaattaataataattaatcacacccttcgatcttcgagtcatctaataataaatcttttgtttcccatcaacactagttcatgcaaattaatgggtatccctcactttctttgtataccatttccagttcaaggacatgtgaaccctcttatgcaattttctctgcttttggttaaacatggttgcaaggtcacttttgtacacactgagttcagcctcaaacgaacaaagacttctggtgctgacaacctcgagcattcacaagtaaagttggtgactcttcctgatggtttggaggctgaagatgacagaagtgatgtgacaaaacttcttttgtctatcaaaagcaacatgcctgctttgcttccaaagctcatagaagatatcaatgccttggatgctgacaataagatcacctgtattattgttacatttaatatgggttggcctttggaagttggccacaaactgggaatcaaaggagctcttctctgtccagcatctgcaacttccttggcttctgctgcttgcatcccaaagctgattcatgatggcattattgattctcaaggacttcccaccaaaacacaagaaattcaactctctccaaacatgcctctgatagacacagaaaactttccatggcgtggctttaataagatcttctttgaccatcttgtgcaagagatgaaaactttggagttaggagagtggtggctttgcaacactacttatgatcttgagcctggagcattttccgtatcaccaaagttcctacccattggcccattgatggaaagtgacaacagcaaaagtgcattttgggaagaagatacaacttgcttagagtggttagatcaacaaccacctcaatctgtcatatatgtttcctttggcagtttggcagtaatggatccaaaccaatttaaagaattagctcttgcacttgatctccttgacaagcctttcatttgggttgtacgtccatgtaatgacaacaaggaaaatgttaatgcatacgcacatgatttccatggaagcaaaggtaaaatagttggttgggcaccccagaagaagatattgaaccaccctgcattggctagcttcattagtcactgtggttggaattctaccctagaaggtatatgtgccggtgtacctttcttgtgttggccatgcgccactgatcaatatcttgacaagtcatatatatgtgatgtgtggaagattgggcttggactagacaaggatgaaaatggaataatttctagggaagagataaggaagaaggtggatcaactgcttgttgatgaagacatcaaagctaggtcattgaaattgaaagacatgaccataaataacatactagaaggtggtcagtcatcaaagaatctcaacttctttatggattgggcgaagtaattatgcttaatttggttctatattgaaaagtcatgtgtaatttctacatgtaagaatttaatttctatgtagatcttaatgtaatctatttaaaaattaataagctttattatatgcaatgatttttagttttatgaaattaatt

SEQ ID NO: 52257 - protein, 443 aa, Glycine max
  peptide (1)..(443): Ceres Seq. ID no. 14315064
  misc_feature (49)..(439): Pfam Name: UDP-glucoronosyl and UDP-glucosyl transferase Pfam Description: UDP-glucoronosyl and UDP-glucosyl transferase
  misc_feature (4)..(435): Homolog of NCBI NO: 21326128 NR Description: putative glucosyl transferase [Sorghum bicolor]
  misc_feature (4)..(440): Homolog of NCBI NO: 13236653 NR Description: putative glucosyltransferase [Oryza sativa]
  misc_feature (2)..(440): Homolog of NCBI NO: 13236658 NR Description: putative glucosyltransferase [Oryza sativa]
  misc_feature (5)..(440): Homolog of NCBI NO: 13236656 NR Description: putative glucosyltransferase [Oryza sativa]
  misc_feature (4)..(435): Homolog of NCBI NO: 21326127 NR Description: putative glucosyl transferase [Sorghum bicolor]
  misc_feature (1)..(434): Homolog of NCBI NO: 21326123 NR Description: putative glucosyl transferase [Sorghum bicolor]
  misc_feature (1)..(443): Homolog of NCBI NO: 21326124 NR Description: putative glucosyl transferase [Sorghum bicolor]
  misc_feature (1)..(443): Homolog of NCBI NO: 15232846 NR Description: glycosyltransferase family [Arabidopsis thaliana]
  misc_feature (1)..(440): Homolog of NCBI NO: 21326125 NR Description: putative glucosyl transferase [Sorghum bicolor]
  misc_feature (49)..(439): Homolog of NCBI NO: 10953887 NR Description: UDP-glucosyltransferase HRA25 [Phaseolus vulgaris]
MGIPHFLCIPFPVQGHVNPLMQFSLLLVKHGCKVTFVHTEFSLKRTKTSGADNLEHSQVKLVTLPDGLEAEDDRSDVTKLLLSIKSNMPALLPKLIEDINALDADNKITCIIVTFNMGWPLEVGHKLGIKGALLCPASATSLASAACIPKLIHDGIIDSQGLPTKTQEIQLSPNMPLIDTENFPWRGFNKIFFDHLVQEMKTLELGEWWLCNTTYDLEPGAFSVSPKFLPIGPLMESDNSKSAFWEEDTTCLEWLDQQPPQSVIYVSFGSLAVMDPNQFKELALALDLLDKPFIWVVRPCNDNKENVNAYAHDFHGSKGKIVGWAPQKKILNHPALASFISHCGWNSTLEGICAGVPFLCWPCATDQYLDKSYICDVWKIGLGLDKDENGIISREEIRKKVDQLLVDEDIKARSLKLKDMTINNILEGGQSSKNLNFFMDWAK

SEQ ID NO: 52258 - protein, 423 aa, Glycine max
  peptide (1)..(423): Ceres Seq. ID no. 14315065
  misc_feature (29)..(419): Pfam Name: UDP-glucoronosyl and UDP-glucosyl transferase Pfam Description: UDP-glucoronosyl and UDP-glucosyl transferase
  misc_feature (1)..(415): Homolog of NCBI NO: 21326128 NR Description: putative glucosyl transferase [Sorghum bicolor]
  misc_feature (1)..(420): Homolog of NCBI NO: 13236653 NR Description: putative glucosyltransferase [Oryza sativa]
  misc_feature (1)..(420): Homolog of NCBI NO: 13236658 NR Description: putative glucosyltransferase [Oryza sativa]
  misc_feature (1)..(420): Homolog of NCBI NO: 13236656 NR Description: putative glucosyltransferase [Oryza sativa]
  misc_feature (1)..(415): Homolog of NCBI NO: 21326127 NR Description: putative glucosyl transferase [Sorghum bicolor]
  misc_feature (1)..(414): Homolog of NCBI NO: 21326123 NR Description: putative glucosyl transferase [Sorghum bicolor]
  misc_feature (1)..(423): Homolog of NCBI NO: 21326124 NR Description: putative glucosyl transferase [Sorghum bicolor]
  misc_feature (1)..(423): Homolog of NCBI NO: 15232846 NR Description: glycosyltransferase family [Arabidopsis thaliana]
  misc_feature (1)..(420): Homolog of NCBI NO: 21326125 NR Description: putative glucosyl transferase [Sorghum bicolor]
  misc_feature (29)..(419): Homolog of NCBI NO: 10953887 NR Description: UDP-glucosyltransferase HRA25 [Phaseolus vulgaris]
MQFSLLLVKHGCKVTFVHTEFSLKRTKTSGADNLEHSQVKLVTLPDGLEAEDDRSDVTKLLLSIKSNMPALLPKLIEDINALDADNKITCIIVTFNMGWPLEVGHKLGIKGALLCPASATSLASAACIPKLIHDGIIDSQGLPTKTQEIQLSPNMPLIDTENFPWRGFNKIFFDHLVQEMKTLELGEWWLCNTTYDLEPGAFSVSPKFLPIGPLMESDNSKSAFWEEDTTCLEWLDQQPPQSVIYVSFGSLAVMDPNQFKELALALDLLDKPFIWVVRPCNDNKENVNAYAHDFHGSKGKIVGWAPQKKILNHPALASFISHCGWNSTLEGICAGVPFLCWPCATDQYLDKSYICDVWKIGLGLDKDENGIISREEIRKKVDQLLVDEDIKARSLKLKDMTINNILEGGQSSKNLNFFMDWAK

SEQ ID NO: 52259 - protein, 356 aa, Glycine max
  peptide (1)..(356): Ceres Seq. ID no. 14315066
  misc_feature (1)..(352): Pfam Name: UDP-glucoronosyl and UDP-glucosyl transferase Pfam Description: UDP-glucoronosyl and UDP-glucosyl transferase
  misc_feature (1)..(348): Homolog of NCBI NO: 21326128 NR Description: putative glucosyl transferase [Sorghum bicolor]
  misc_feature (1)..(353): Homolog of NCBI NO: 13236653 NR Description: putative glucosyltransferase [Oryza sativa]
  misc_feature (1)..(353): Homolog of NCBI NO: 13236658 NR Description: putative glucosyltransferase [Oryza sativa]
  misc_feature (1)..(353): Homolog of NCBI NO: 13236656 NR Description: putative glucosyltransferase [Oryza sativa]
  misc_feature (1)..(348): Homolog of NCBI NO: 21326127 NR Description: putative glucosyl transferase [Sorghum bicolor]
  misc_feature (1)..(347): Homolog of NCBI NO: 21326123 NR Description: putative glucosyl transferase [Sorghum bicolor]
  misc_feature (1)..(356): Homolog of NCBI NO: 21326124 NR Description: putative glucosyl transferase [Sorghum bicolor]
  misc_feature (1)..(356): Homolog of NCBI NO: 15232846 NR Description: glycosyltransferase family [Arabidopsis thaliana]
  misc_feature (1)..(353): Homolog of NCBI NO: 21326125 NR Description: putative glucosyl transferase [Sorghum bicolor]
  misc_feature (1)..(352): Homolog of NCBI NO: 10953887 NR Description: UDP-glucosyltransferase HRA25 [Phaseolus vulgaris]
MPALLPKLIEDINALDADNKITCIIVTFNMGWPLEVGHKLGIKGALLCPASATSLASAACIPKLIHDGIIDSQGLPTKTQEIQLSPNMPLIDTENFPWRGFNKIFFDHLVQEMKTLELGEWWLCNTTYDLEPGAFSVSPKFLPIGPLMESDNSKSAFWEEDTTCLEWLDQQPPQSVIYVSFGSLAVMDPNQFKELALALDLLDKPFIWVVRPCNDNKENVNAYAHDFHGSKGKIVGWAPQKKILNHPALASFISHCGWNSTLEGICAGVPFLCWPCATDQYLDKSYICDVWKIGLGLDKDENGIISREEIRKKVDQLLVDEDIKARSLKLKDMTINNILEGGQSSKNLNFFMDWAK

SEQ ID NO: 52260 - DNA, 1150 bp, Glycine max
  misc_feature (1)..(1150): Ceres Seq. ID no. 14314371
attgctaatagcaatactgtgacgtaactctccaacttatgaagcttgcaataataatgttttgaggacatttctctctccgaaccctcccatgcatggcctcttccgcattcctttccgtttatctcattatctccgtcatcgtccttttgtcgaacaggtgctgcgcgtttcaatgcggggtttcctacgacacgatcaccgtcctcaacgcgttccctcacgacccacaagccttcactgagggtcttctttatcatggaaatgacaccttatttgagtcaactggcctttatggggagtcatccgtccgtaaagttgctcttcgtactgggaaggttgagaatattcagaagatggatgattctttatttggtgaaggcttagctctcctcaataataggctgttccagctaaattggttgcagaaagatggtttcatatatgagccaaaaaatttaagccaaatagggacatttaaatatgatatgaaagagggttggggtctggcaactgatggaaaagtcttgtttggaagtgatggcagttcaacattgtatcaatttgagcctcaaccatttaaagttgtatcaaaacaagttgtttactacaagggtcatcaagtgcacaatctcaatgaattggaatacataaatggtgaagtttgggccaatgttttgccgactgactgcattgtaagaatctctccccatgatggaagggttcttggatggattctcctccaaaatttgaggaaagaacttgtggaagctggggagattagtgatcgtgatattttgaatgggatagcatgggatggtgagcagaattgtatttttgtgactggaaaacaatggccaaagctgtatgaaatcaaggtttcccctataaagaaaccaattgaagaagggatcatcgagcaactttgcttgtatgagcctttgaatgggggatttgtgttggctgacccagcccaaagagaatgaggtgaagctgaacataaaatgatggccttaagaggacccaaaaggatgtttgggacaactcccaggttgaaaaaactttattttatattgggtttaggataaatatcattagattatgtattttggcaaatgatattaataaagtatactccattttccctttt

SEQ ID NO: 52261 - protein, 296 aa, Glycine max
  peptide (1)..(296): Ceres Seq. ID no. 14314372
  misc_feature (9)..(262): Pfam Name: Glutamine cyclotransferase Pfam Description: Glutamine cyclotransferase
  misc_feature (8)..(263): Homolog of NCBI NO: 21243055 NR Description: glutamine cyclotransferase
  misc_feature (37)..(263): Homolog of NCBI NO: 16126885 NR Description: glutamine cyclotransferase [Caulobacter
  misc_feature (37)..(260): Homolog of NCBI NO: 22970826 NR Description: hypothetical protein [Chloroflexus aurantiacus]
  misc_feature (37)..(263): Homolog of NCBI NO: 31790364 NR Description: putative glutamine cyclotransferase
  misc_feature (37)..(265): Homolog of NCBI NO: 21231655 NR Description: glutamine cyclotransferase
  misc_feature (1)..(278): Homolog of NCBI NO: 24413973 NR Description: putative glutaminyl-peptide cyclotransferase
  misc_feature (35)..(279): Homolog of NCBI NO: 7484984 NR Description: glutaminyl-peptide cyclotransferase homolog
  misc_feature (35)..(279): Homolog of NCBI NO: 18416607 NR Description: glutamine cyclotransferase precursor - like
  misc_feature (35)..(279): Homolog of NCBI NO: 21536884 NR Description: glutamine cyclotransferase precursor-like protein
  misc_feature (9)..(279): Homolog of NCBI NO: 7484740 NR Description: glutaminyl-peptide cyclotransferase (EC 2.3.2.5)
MASSAFLSVYLIISVIVLLSNRCCAFQCGVSYDTITVLNAFPHDPQAFTEGLLYHGNDTLFESTGLYGESSVRKVALRTGKVENIQKMDDSLFGEGLALLNNRLFQLNWLQKDGFIYEPKNLSQIGTFKYDMKEGWGLATDGKVLFGSDGSSTLYQFEPQPFKVVSKQVVYYKGHQVHNLNELEYINGEVWANVLPTDCIVRISPHDGRVLGWILLQNLRKELVEAGEISDRDILNGIAWDGEQNCIFVTGKQWPKLYEIKVSPIKKPIEEGIIEQLCLYEPLNGGFVLADPAQRE

SEQ ID NO: 52262 - protein, 209 aa, Glycine max
  peptide (1)..(209): Ceres Seq. ID no. 14314373
  misc_feature (1)..(175): Pfam Name: Glutamine cyclotransferase Pfam Description: Glutamine cyclotransferase
  misc_feature (1)..(176): Homolog of NCBI NO: 21243055 NR Description: glutamine cyclotransferase
  misc_feature (1)..(176): Homolog of NCBI NO: 16126885 NR Description: glutamine cyclotransferase [Caulobacter
  misc_feature (1)..(173): Homolog of NCBI NO: 22970826 NR Description: hypothetical protein [Chloroflexus aurantiacus]
  misc_feature (1)..(176): Homolog of NCBI NO: 31790364 NR Description: putative glutamine cyclotransferase
  misc_feature (1)..(178): Homolog of NCBI NO: 21231655 NR Description: glutamine cyclotransferase
  misc_feature (1)..(191): Homolog of NCBI NO: 24413973 NR Description: putative glutaminyl-peptide cyclotransferase
  misc_feature (1)..(192): Homolog of NCBI NO: 7484984 NR Description: glutaminyl-peptide cyclotransferase homolog
  misc_feature (1)..(192): Homolog of NCBI NO: 18416607 NR Description: glutamine cyclotransferase precursor - like
  misc_feature (1)..(192): Homolog of NCBI NO: 21536884 NR Description: glutamine cyclotransferase precursor-like protein
  misc_feature (1)..(192): Homolog of NCBI NO: 7484740 NR Description: glutaminyl-peptide cyclotransferase (EC 2.3.2.5)
MDDSLFGEGLALLNNRLFQLNWLQKDGFIYEPKNLSQIGTFKYDMKEGWGLATDGKVLFGSDGSSTLYQFEPQPFKVVSKQVVYYKGHQVHNLNELEYINGEVWANVLPTDCIVRISPHDGRVLGWILLQNLRKELVEAGEISDRDILNGIAWDGEQNCIFVTGKQWPKLYEIKVSPIKKPIEEGIIEQLCLYEPLNGGFVLADPAQRE

SEQ ID NO: 52263 - protein, 165 aa, Glycine max
  peptide (1)..(165): Ceres Seq. ID no. 14314374
  misc_feature (1)..(131): Pfam Name: Glutamine cyclotransferase Pfam Description: Glutamine cyclotransferase
  misc_feature (1)..(132): Homolog of NCBI NO: 21243055 NR Description: glutamine cyclotransferase
  misc_feature (1)..(132): Homolog of NCBI NO: 16126885 NR Description: glutamine cyclotransferase [Caulobacter
  misc_feature (1)..(129): Homolog of NCBI NO: 22970826 NR Description: hypothetical protein [Chloroflexus aurantiacus]
  misc_feature (1)..(132): Homolog of NCBI NO: 31790364 NR Description: putative glutamine cyclotransferase
  misc_feature (1)..(134): Homolog of NCBI NO: 21231655 NR Description: glutamine cyclotransferase
  misc_feature (1)..(147): Homolog of NCBI NO: 24413973 NR Description: putative glutaminyl-peptide cyclotransferase
  misc_feature (1)..(148): Homolog of NCBI NO: 7484984 NR Description: glutaminyl-peptide cyclotransferase homolog
  misc_feature (1)..(148): Homolog of NCBI NO: 18416607 NR Description: glutamine cyclotransferase precursor - like
  misc_feature (1)..(148): Homolog of NCBI NO: 21536884 NR Description: glutamine cyclotransferase precursor-like protein
  misc_feature (1)..(148): Homolog of NCBI NO: 7484740 NR Description: glutaminyl-peptide cyclotransferase (EC 2.3.2.5)
MKEGWGLATDGKVLFGSDGSSTLYQFEPQPFKVVSKQVVYYKGHQVHNLNELEYINGEVWANVLPTDCIVRISPHDGRVLGWILLQNLRKELVEAGEISDRDILNGIAWDGEQNCIFVTGKQWPKLYEIKVSPIKKPIEEGIIEQLCLYEPLNGGFVLADPAQRE

SEQ ID NO: 52264 - DNA, 1587 bp, Glycine max
  misc_feature (1)..(1587): Ceres Seq. ID no. 15171245
aaaacttttgtcactgaaggtgtcttggagccaattgtagcagttggtaacatcaaacacatattcagacaatgaggcttgtcgtctcagctctttgtgttcttgtgttattctcttgtgcagttgcttatgatcctttggatccaaacggaaacgtaacaatcaaatgggatgtaatgtcttggacaccagatggctatgtggctgtggtaacaatgcacaacttccaaatgtttcggcacatcatgaatcctggatggaccttgggatggacatgggcaaagaaagaagtcatttggtccatgataggagctcaaaccacagaacaaggagattgctctaagttcaaaggcaacatacctcattgctgcaagaaaattcccacagttgtggaccttctccctggtgtaccttacaaccagcaattctcaaactgctgcaagggtggagtagtggcagcatggggccaagatccttcacaagctatctcttccttccaagtgagtgtaggccaagctggtacctcaaacaagacagttaaacttcccaagaacttcactctctttgctccaggaccaggctacacttgtggccctgcaaagattgttccttccaccaattttcttacgcctgacaagcgccgcaagactcaagcactaatgacatggaatgttacctgcacatactcacagtttctggcaagaaagaacccaagttgttgtgtatctttgtcatccttttacaatgaaaccattaccccttgtccctcttgtgcatgtggctgccagaacaagaagcattgtgtcaagggaaactccaaaattctcagcatggtgggggttcacactccaaagaaagacaatgaaccattgctgcagtgcactcatcacatgtgtccaatcagggtccactggcatgtgaagactaactataaggactattggcgagtcaaggttgccataacaaacttcaattacagaatgaatcactccctttggtctcttgctgttcagcatccaaatctcaacaatctcacacaagttttcagtttcaattacaagccacttcttccctatggatccataaatgatactggcatgttctatggcatgaagtacttcaatgatcttctaatggaagctggaccaactgggaatgttcaatcagagttgcttcttcagaaggacaaggatgcattcacattcaagcagggttgggcatttcctcgcaaggtttactttaatggtgatgaatgcatgctgccaccacctgacacctacccttttctccctaactctgctcctgcaagcctacttaacttccctgcgttcatgttgttattgttcttcttgcttgcagtttggtgaattggtgcatattgtgtcagaattttgtgaaatttttgaaaccatgtataccttcttaatggtaacgtgacaataggcatgaatactcaaattctttggaaacactaagccaaatctcatggctgtgttttatctgacatgtgagcaccaaaggggatgctaatatgtaaatctcaacagtgattttgtctgaatcatagattgatgatgctattactcc

SEQ ID NO: 52265 - protein, 431 aa, Glycine max
  peptide (1)..(431): Ceres Seq. ID no. 15171246
  misc_feature (4)..(411): Homolog of NCBI NO: 34394570 NR Description: putative phytochelatin synthetase
  misc_feature (14)..(427): Homolog of NCBI NO: 18406342 NR Description: phytochelatin synthetase-related protein
  misc_feature (8)..(427): Homolog of NCBI NO: 21618129 NR Description: phytochelatin synthetase-like protein
  misc_feature (14)..(429): Homolog of NCBI NO: 18424412 NR Description: phytochelatin synthetase - like protein
  misc_feature (14)..(429): Homolog of NCBI NO: 21553837 NR Description: phytochelatin synthetase-like protein
  misc_feature (1)..(427): Homolog of NCBI NO: 13477083 NR Description: phytochelatin synthetase-like protein
  misc_feature (244)..(411): Homolog of NCBI NO: 34014146 NR Description: BRITTLE CULM1 [Oryza sativa (japonica
  misc_feature (2)..(248): Homolog of NCBI NO: 34014146 NR Description: BRITTLE CULM1 [Oryza sativa (japonica
  misc_feature (36)..(431): Homolog of NCBI NO: 11358657 NR Description: probable phytochelatin synthetase - Arabidopsis
  misc_feature (1)..(431): Homolog of NCBI NO: 30685446 NR Description: phytochelatin synthetase -related [Arabidopsis
MRLVVSALCVLVLFSCAVAYDPLDPNGNVTIKWDVMSWTPDGYVAVVTMHNFQMFRHIMNPGWTLGWTWAKKEVIWSMIGAQTTEQGDCSKFKGNIPHCCKKIPTVVDLLPGVPYNQQFSNCCKGGVVAAWGQDPSQAISSFQVSVGQAGTSNKTVKLPKNFTLFAPGPGYTCGPAKIVPSTNFLTPDKRRKTQALMTWNVTCTYSQFLARKNPSCCVSLSSFYNETITPCPSCACGCQNKKHCVKGNSKILSMVGVHTPKKDNEPLLQCTHHMCPIRVHWHVKTNYKDYWRVKVAITNFNYRMNHSLWSLAVQHPNLNNLTQVFSFNYKPLLPYGSINDTGMFYGMKYFNDLLMEAGPTGNVQSELLLQKDKDAFTFKQGWAFPRKVYFNGDECMLPPPDTYPFLPNSAPASLLNFPAFMLLLFFLLAVW

SEQ ID NO: 52266 - protein, 396 aa, Glycine max
  peptide (1)..(396): Ceres Seq. ID no. 15171247
  misc_feature (1)..(376): Homolog of NCBI NO: 34394570 NR Description: putative phytochelatin synthetase
  misc_feature (1)..(392): Homolog of NCBI NO: 18406342 NR Description: phytochelatin synthetase-related protein
  misc_feature (1)..(392): Homolog of NCBI NO: 21618129 NR Description: phytochelatin synthetase-like protein
  misc_feature (1)..(394): Homolog of NCBI NO: 18424412 NR Description: phytochelatin synthetase - like protein
  misc_feature (1)..(394): Homolog of NCBI NO: 21553837 NR Description: phytochelatin synthetase-like protein
  misc_feature (1)..(392): Homolog of NCBI NO: 13477083 NR Description: phytochelatin synthetase-like protein
  misc_feature (209)..(376): Homolog of NCBI NO: 34014146 NR Description: BRITTLE CULM1 [Oryza sativa (japonica
  misc_feature (1)..(213): Homolog of NCBI NO: 34014146 NR Description: BRITTLE CULM1 [Oryza sativa (japonica
  misc_feature (1)..(396): Homolog of NCBI NO: 11358657 NR Description: probable phytochelatin synthetase - Arabidopsis
  misc_feature (1)..(396): Homolog of NCBI NO: 30685446 NR Description: phytochelatin synthetase -related [Arabidopsis
MSWTPDGYVAVVTMHNFQMFRHIMNPGWTLGWTWAKKEVIWSMIGAQTTEQGDCSKFKGNIPHCCKKIPTVVDLLPGVPYNQQFSNCCKGGVVAAWGQDPSQAISSFQVSVGQAGTSNKTVKLPKNFTLFAPGPGYTCGPAKIVPSTNFLTPDKRRKTQALMTWNVTCTYSQFLARKNPSCCVSLSSFYNETITPCPSCACGCQNKKHCVKGNSKILSMVGVHTPKKDNEPLLQCTHHMCPIRVHWHVKTNYKDYWRVKVAITNFNYRMNHSLWSLAVQHPNLNNLTQVFSFNYKPLLPYGSINDTGMFYGMKYFNDLLMEAGPTGNVQSELLLQKDKDAFTFKQGWAFPRKVYFNGDECMLPPPDTYPFLPNSAPASLLNFPAFMLLLFFLLAVW

SEQ ID NO: 52267 - protein, 383 aa, Glycine max
  peptide (1)..(383): Ceres Seq. ID no. 15171248
  misc_feature (1)..(363): Homolog of NCBI NO: 34394570 NR Description: putative phytochelatin synthetase
  misc_feature (1)..(379): Homolog of NCBI NO: 18406342 NR Description: phytochelatin synthetase-related protein
  misc_feature (1)..(379): Homolog of NCBI NO: 21618129 NR Description: phytochelatin synthetase-like protein
  misc_feature (1)..(381): Homolog of NCBI NO: 18424412 NR Description: phytochelatin synthetase - like protein
  misc_feature (1)..(381): Homolog of NCBI NO: 21553837 NR Description: phytochelatin synthetase-like protein
  misc_feature (1)..(379): Homolog of NCBI NO: 13477083 NR Description: phytochelatin synthetase-like protein
  misc_feature (196)..(363): Homolog of NCBI NO: 34014146 NR Description: BRITTLE CULM1 [Oryza sativa (japonica
  misc_feature (1)..(200): Homolog of NCBI NO: 34014146 NR Description: BRITTLE CULM1 [Oryza sativa (japonica
  misc_feature (1)..(383): Homolog of NCBI NO: 11358657 NR Description: probable phytochelatin synthetase - Arabidopsis
  misc_feature (1)..(383): Homolog of NCBI NO: 30685446 NR Description: phytochelatin synthetase -related [Arabidopsis
MHNFQMFRHIMNPGWTLGWTWAKKEVIWSMIGAQTTEQGDCSKFKGNIPHCCKKIPTVVDLLPGVPYNQQFSNCCKGGVVAAWGQDPSQAISSFQVSVGQAGTSNKTVKLPKNFTLFAPGPGYTCGPAKIVPSTNFLTPDKRRKTQALMTWNVTCTYSQFLARKNPSCCVSLSSFYNETITPCPSCACGCQNKKHCVKGNSKILSMVGVHTPKKDNEPLLQCTHHMCPIRVHWHVKTNYKDYWRVKVAITNFNYRMNHSLWSLAVQHPNLNNLTQVFSFNYKPLLPYGSINDTGMFYGMKYFNDLLMEAGPTGNVQSELLLQKDKDAFTFKQGWAFPRKVYFNGDECMLPPPDTYPFLPNSAPASLLNFPAFMLLLFFLLAVW

SEQ ID NO: 52268 - DNA, 1439 bp, Glycine max
  misc_feature (1)..(1439): Ceres Seq. ID no. 15171257
ggtaactctttcaactcggccgtgcaagttttattggcagcgctggaaccatcttctcctctcttcacctacgtttttctttttctctttctctttctcttactctcttcaacactttctcaaatcccttccttcttcgctcttgtcttctctttcaggtgcaccttccagttaagcaggagttggataattgttggacatagatgaaatagtgattgttatgtctggactgattgaaggacttcctgacgctgttgcaatcaggtgccttgcatgggttcccttctacctccacccaaagttagagcttgtctctcgtgcttggcgagcagttgttcgtggccctgaactatttaaagctcgacaggagcttggttcatcggaggatctgttgtgtgtctgtgcttttgagccagagaacttatggcagctgtatgaccctcagcgagacctctggataactcttcctgttctaccctcaagaatcaggcacctttcacattttggtgccgtctccactgctggaaagttgtttgtgattggtggtggaagtgatgctgttgatcctttgacgggtgaccaagatggttgttttgcaacaaatgaagtctggtcgtatgacccagtagtacggcagtggtccccccgtgcggcaatgctcgtcccccgttctatgtttgcatgctgtgttatgaatggaaaaatagttgtggctgggggcttcactagctgcagaaagtcaatatctcaagcagaaatatatgatcccgagaaagatgtttggattccaatgcctgatcttcatcgcacccataactcagcctgttcgggagtagtgattggaggaaaggtgcatgtcctgcacaaggatatgtcaacagtgcaagttttagacaatgcaggtcagtggacggtagaggaatatgggtggctccatggtcaaatggcagttatcagggatgccctttatgtgataagccatggattaatcatcaagcaagacaaaaaaatgaggaaggtagttggttcagcttctgaatttcgaaggagaattggatttgcaatgattggtttaggtgatgaattatatgtgattggaggtgtcattggccctgacaggtggaattgggacatcaagccactgtctgatgttgatgttcttacacttgcgagcgagagaccgacgtggcgccaggcagctccaatgacaaggtgtggtggtactattcttggttgtacacagctgagaatttaggctttcactttctaggcttatgtgatatgtgtgctccaactaaggaatgtgaattccttcaacaggagacgaagaattaggttgttcaatggcttctttgagttgttgtatgtaagccataatatttgtccttgttgttttgttgactattatgtggtaataagataaggtaatgttttcaagc

SEQ ID NO: 52269 - protein, 344 aa, Glycine max
  peptide (1)..(344): Ceres Seq. ID no. 15171258
  misc_feature (91)..(147): Pfam Name: Kelch motif Pfam Description: Kelch motif
  misc_feature (4)..(194): Homolog of NCBI NO: 18405298 NR Description: Kelch repeat containing F-box protein family
  misc_feature (4)..(237): Homolog of NCBI NO: 37534254 NR Description: unknown protein [Oryza sativa (japonica
  misc_feature (4)..(214): Homolog of NCBI NO: 7487225 NR Description: hypothetical protein T1F15.5 - Arabidopsis
  misc_feature (4)..(214): Homolog of NCBI NO: 15220452 NR Description: Kelch repeat containing F-box protein family
  misc_feature (4)..(296): Homolog of NCBI NO: 21593163 NR Description: unknown [Arabidopsis thaliana]
  misc_feature (4)..(296): Homolog of NCBI NO: 18400571 NR Description: Kelch repeat containing F-box protein family
  misc_feature (8)..(214): Homolog of NCBI NO: 25518477 NR Description: hypothetical protein F3O9.5 - Arabidopsis
  misc_feature (4)..(214): Homolog of NCBI NO: 22329607 NR Description: Kelch repeat containing F-box protein family
  misc_feature (66)..(344): Homolog of NCBI NO: 37533892 NR Description: putative protein [Oryza sativa (japonica
  misc_feature (1)..(344): Homolog of NCBI NO: 15229392 NR Description: Kelch repeat containing F-box protein family
MSGLIEGLPDAVAIRCLAWVPFYLHPKLELVSRAWRAVVRGPELFKARQELGSSEDLLCVCAFEPENLWQLYDPQRDLWITLPVLPSRIRHLSHFGAVSTAGKLFVIGGGSDAVDPLTGDQDGCFATNEVWSYDPVVRQWSPRAAMLVPRSMFACCVMNGKIVVAGGFTSCRKSISQAEIYDPEKDVWIPMPDLHRTHNSACSGVVIGGKVHVLHKDMSTVQVLDNAGQWTVEEYGWLHGQMAVIRDALYVISHGLIIKQDKKMRKVVGSASEFRRRIGFAMIGLGDELYVIGGVIGPDRWNWDIKPLSDVDVLTLASERPTWRQAAPMTRCGGTILGCTQLRI

SEQ ID NO: 52270 - protein, 199 aa, Glycine max
  peptide (1)..(199): Ceres Seq. ID no. 15171259
  misc_feature (1)..(49): Homolog of NCBI NO: 18405298 NR Description: Kelch repeat containing F-box protein family
  misc_feature (1)..(92): Homolog of NCBI NO: 37534254 NR Description: unknown protein [Oryza sativa (japonica
  misc_feature (1)..(69): Homolog of NCBI NO: 7487225 NR Description: hypothetical protein T1F15.5 - Arabidopsis
  misc_feature (1)..(69): Homolog of NCBI NO: 15220452 NR Description: Kelch repeat containing F-box protein family
  misc_feature (1)..(151): Homolog of NCBI NO: 21593163 NR Description: unknown [Arabidopsis thaliana]
  misc_feature (1)..(151): Homolog of NCBI NO: 18400571 NR Description: Kelch repeat containing F-box protein family
  misc_feature (1)..(69): Homolog of NCBI NO: 25518477 NR Description: hypothetical protein F3O9.5 - Arabidopsis
  misc_feature (1)..(69): Homolog of NCBI NO: 22329607 NR Description: Kelch repeat containing F-box protein family
  misc_feature (1)..(199): Homolog of NCBI NO: 37533892 NR Description: putative protein [Oryza sativa (japonica
  misc_feature (1)..(199): Homolog of NCBI NO: 15229392 NR Description: Kelch repeat containing F-box protein family
MLVPRSMFACCVMNGKIVVAGGFTSCRKSISQAEIYDPEKDVWIPMPDLHRTHNSACSGVVIGGKVHVLHKDMSTVQVLDNAGQWTVEEYGWLHGQMAVIRDALYVISHGLIIKQDKKMRKVVGSASEFRRRIGFAMIGLGDELYVIGGVIGPDRWNWDIKPLSDVDVLTLASERPTWRQAAPMTRCGGTILGCTQLRI

SEQ ID NO: 52271 - protein, 193 aa, Glycine max
  peptide (1)..(193): Ceres Seq. ID no. 15171260
  misc_feature (1)..(43): Homolog of NCBI NO: 18405298 NR Description: Kelch repeat containing F-box protein family
  misc_feature (1)..(86): Homolog of NCBI NO: 37534254 NR Description: unknown protein [Oryza sativa (japonica
  misc_feature (1)..(63): Homolog of NCBI NO: 7487225 NR Description: hypothetical protein T1F15.5 - Arabidopsis
  misc_feature (1)..(63): Homolog of NCBI NO: 15220452 NR Description: Kelch repeat containing F-box protein family
  misc_feature (1)..(145): Homolog of NCBI NO: 21593163 NR Description: unknown [Arabidopsis thaliana]
  misc_feature (1)..(145): Homolog of NCBI NO: 18400571 NR Description: Kelch repeat containing F-box protein family
  misc_feature (1)..(63): Homolog of NCBI NO: 25518477 NR Description: hypothetical protein F3O9.5 - Arabidopsis
  misc_feature (1)..(63): Homolog of NCBI NO: 22329607 NR Description: Kelch repeat containing F-box protein family
  misc_feature (1)..(193): Homolog of NCBI NO: 37533892 NR Description: putative protein [Oryza sativa (japonica
  misc_feature (1)..(193): Homolog of NCBI NO: 15229392 NR Description: Kelch repeat containing F-box protein family
MFACCVMNGKIVVAGGFTSCRKSISQAEIYDPEKDVWIPMPDLHRTHNSACSGVVIGGKVHVLHKDMSTVQVLDNAGQWTVEEYGWLHGQMAVIRDALYVISHGLIIKQDKKMRKVVGSASEFRRRIGFAMIGLGDELYVIGGVIGPDRWNWDIKPLSDVDVLTLASERPTWRQAAPMTRCGGTILGCTQLRI

SEQ ID NO: 52272 - DNA, 1507 bp, Glycine max
  misc_feature (1)..(1507): Ceres Seq. ID no. 14314363
ttttcggaagcggaaattggactgatcctttctctctctctctctctttctcctcaacgcctcttcctttcaatttaatccaacaataataattattcgcaaaaaaacgttgaacagataccatcatcatcacccacatcatcagaatttcaagctatacagagggaagcgcaattgattctttttgtgtgtttgactttgatcaatcagttggatatcgcatagaggattgtgttgccttgaggggaaactcagtttttgactcactaaaagtaagtagccaaacaatttctcggggtcttgttgaagttgattcctttgataagttaccaacttcactcaataaaaacccattaacaagccaaacagagcgacaaagattgcaattacaaaaggttcaattatcaaatctggtcagtggggatacggaacaccaggaagagtctgccatggctgacgccagtcctagaactgatatttctacagatgttgacactgatgataagaatccacggtttgatagaagtcagtcccttgttgctgtggtttctgactccagtgacagatcaaaggataaatcagatcagaagactctccgaaggcttgctcagaatcgtgaggcagcaagaaaaagtcggttgagaaagaaagcttatgttcaacagcttgaaagtagtcgcttaaagttaacccaactggagcaagagcttcagcgagctaggcagcagggaatcattatatcaaactcaggtgatcaagcacattcaatgagtggaaatggggctatggcatttgatgtagagtatgcaagatggctggaagagcagaatcgacaagttaatgagctaagagcagctgtaaattcccatgcaggtgatacagaacttcgcatgattatcgatggtataatggcacattatgatgagatatttaggctgaaggccgatgcagctaaggctgatgtcttccatttgttgtctggaatgtggaagacaccagcagagaggtgttttctatggcttggtggttttcggtcatctgaactcctcaagctcctggtaaatcagttggaacctctgacagagcaacagttagtgggtattaccaacttgcagcaatcttcccaacaggccgaagatgcattgtctcagggcatggaagcattgcaacagtccctttctgagacattatccactggatcacttggctcctctggttcatcaggcaatgtggcaaattacatgggtcaaatggctatggccatgggtaaactagggacacttgaggggttcattaagcaggctgacaatttgcgccagcagactttgcaacaaattcaccgcatattgacaactcggcaatcggctcgtgcactacttgcaatacatgactacttttctaggttgcgtgcccttagctctctttggcttgcccgcccaagagactgatgggtggtaaatagtgtcattaattttcatggatctggcaccagaatcatttgtcgtag

SEQ ID NO: 52273 - protein, 332 aa, Glycine max
  peptide (1)..(332): Ceres Seq. ID no. 14314364
  misc_feature (43)..(106): Pfam Name: bZIP transcription factor Pfam Description: bZIP transcription factor
  misc_feature (1)..(332): Homolog of NCBI NO: 30682117 NR Description: bZIP transcription factor, TGA6 [Arabidopsis
  misc_feature (1)..(332): Homolog of NCBI NO: 15240216 NR Description: bZIP transcription factor, HBP-1b homolog
  misc_feature (1)..(332): Homolog of NCBI NO: 17025924 NR Description: bZIP transcription factor [Oryza sativa]
  misc_feature (1)..(332): Homolog of NCBI NO: 34921538 NR Description: Transcription factor HBP-1b(c1)
  misc_feature (1)..(332): Homolog of NCBI NO: 6288682 NR Description: bZIP transcription factor [Nicotiana tabacum]
  misc_feature (1)..(332): Homolog of NCBI NO: 422029 NR Description: transcription factor OBF3.2 - maize
  misc_feature (1)..(332): Homolog of NCBI NO: 34909110 NR Description: putative transcription factor HBP-1b
  misc_feature (1)..(332): Homolog of NCBI NO: 15148926 NR Description: TGA-type basic leucine zipper protein TGA2.2
  misc_feature (1)..(276): Homolog of NCBI NO: 100099 NR Description: DNA-binding protein VBP1 - fava bean
  misc_feature (1)..(332): Homolog of NCBI NO: 15148924 NR Description: TGA-type basic leucine zipper protein TGA2.1
MADASPRTDISTDVDTDDKNPRFDRSQSLVAVVSDSSDRSKDKSDQKTLRRLAQNREAARKSRLRKKAYVQQLESSRLKLTQLEQELQRARQQGIIISNSGDQAHSMSGNGAMAFDVEYARWLEEQNRQVNELRAAVNSHAGDTELRMIIDGIMAHYDEIFRLKADAAKADVFHLLSGMWKTPAERCFLWLGGFRSSELLKLLVNQLEPLTEQQLVGITNLQQSSQQAEDALSQGMEALQQSLSETLSTGSLGSSGSSGNVANYMGQMAMAMGKLGTLEGFIKQADNLRQQTLQQIHRILTTRQSARALLAIHDYFSRLRALSSLWLARPRD

SEQ ID NO: 52274 - protein, 226 aa, Glycine max
  peptide (1)..(226): Ceres Seq. ID no. 14314365
  misc_feature (1)..(226): Homolog of NCBI NO: 30682117 NR Description: bZIP transcription factor, TGA6 [Arabidopsis
  misc_feature (1)..(226): Homolog of NCBI NO: 15240216 NR Description: bZIP transcription factor, HBP-1b homolog
  misc_feature (1)..(226): Homolog of NCBI NO: 17025924 NR Description: bZIP transcription factor [Oryza sativa]
  misc_feature (1)..(226): Homolog of NCBI NO: 34921538 NR Description: Transcription factor HBP-1b(c1)
  misc_feature (1)..(226): Homolog of NCBI NO: 6288682 NR Description: bZIP transcription factor [Nicotiana tabacum]
  misc_feature (1)..(226): Homolog of NCBI NO: 422029 NR Description: transcription factor OBF3.2 - maize
  misc_feature (1)..(226): Homolog of NCBI NO: 34909110 NR Description: putative transcription factor HBP-1b
  misc_feature (1)..(226): Homolog of NCBI NO: 15148926 NR Description: TGA-type basic leucine zipper protein TGA2.2
  misc_feature (1)..(170): Homolog of NCBI NO: 100099 NR Description: DNA-binding protein VBP1 - fava bean
  misc_feature (1)..(226): Homolog of NCBI NO: 15148924 NR Description: TGA-type basic leucine zipper protein TGA2.1
MSGNGAMAFDVEYARWLEEQNRQVNELRAAVNSHAGDTELRMIIDGIMAHYDEIFRLKADAAKADVFHLLSGMWKTPAERCFLWLGGFRSSELLKLLVNQLEPLTEQQLVGITNLQQSSQQAEDALSQGMEALQQSLSETLSTGSLGSSGSSGNVANYMGQMAMAMGKLGTLEGFIKQADNLRQQTLQQIHRILTTRQSARALLAIHDYFSRLRALSSLWLARPRD

SEQ ID NO: 52275 - protein, 220 aa, Glycine max
  peptide (1)..(220): Ceres Seq. ID no. 14314366
  misc_feature (1)..(220): Homolog of NCBI NO: 30682117 NR Description: bZIP transcription factor, TGA6 [Arabidopsis
  misc_feature (1)..(220): Homolog of NCBI NO: 15240216 NR Description: bZIP transcription factor, HBP-1b homolog
  misc_feature (1)..(220): Homolog of NCBI NO: 17025924 NR Description: bZIP transcription factor [Oryza sativa]
  misc_feature (1)..(220): Homolog of NCBI NO: 34921538 NR Description: Transcription factor HBP-1b(c1)
  misc_feature (1)..(220): Homolog of NCBI NO: 6288682 NR Description: bZIP transcription factor [Nicotiana tabacum]
  misc_feature (1)..(220): Homolog of NCBI NO: 422029 NR Description: transcription factor OBF3.2 - maize
  misc_feature (1)..(220): Homolog of NCBI NO: 34909110 NR Description: putative transcription factor HBP-1b
  misc_feature (1)..(220): Homolog of NCBI NO: 15148926 NR Description: TGA-type basic leucine zipper protein TGA2.2
  misc_feature (1)..(164): Homolog of NCBI NO: 100099 NR Description: DNA-binding protein VBP1 - fava bean
  misc_feature (1)..(220): Homolog of NCBI NO: 15148924 NR Description: TGA-type basic leucine zipper protein TGA2.1
MAFDVEYARWLEEQNRQVNELRAAVNSHAGDTELRMIIDGIMAHYDEIFRLKADAAKADVFHLLSGMWKTPAERCFLWLGGFRSSELLKLLVNQLEPLTEQQLVGITNLQQSSQQAEDALSQGMEALQQSLSETLSTGSLGSSGSSGNVANYMGQMAMAMGKLGTLEGFIKQADNLRQQTLQQIHRILTTRQSARALLAIHDYFSRLRALSSLWLARPRD

SEQ ID NO: 52276 - DNA, 1638 bp, Glycine max
  misc_feature (1)..(1638): Ceres Seq. ID no. 15171249
agaaaaaacgagtaatgttcactgcgaagaaaatatcaaaataatactactagccatttacaaaggcagcagctgcaggaggtgcgtgcatcgagcggagccatgatctcgcaattcttcgttctgtcacagcgtggcgataacatcgcttttcgagattatcgtggtgaagtgcagaagggaagtgcggagatatttttccgcaaagtaaagttttgggaagatgggggactgctggaggcaccacctgtctttaatgtggatggagtaaattactttcatgtgaaagttgttggcttattgtttgttgcaactacaagggttaatacatcaccttcttttgtcttggagcttttacaaagaattgctcgagttattaaggattaccttgggattctcaatgaagactcattacggaaaaactttgtgcttgtgtacgagttacttgatgaagttattgattttggttatgttcaaacaacatctactgaattgttgaagtcctatgttttcaatgagccgcttgtaattgatgctgcacgtctgccacctcttggacctgctgcaatttttacgcaaggaacaaaaagaatgccagggatagctgtcacaaaatctgttgttgctacagagcctgggggtagaaagagggaagagatttttgtagacataattgagaaaatcagcatcactttcagctccagtggatatatactgacttctgagattgatggcaccatacaaatgaagagctatctttctggcaatcctgaaattcgattagcacttaatgatgacctctccattggaagaagccagggatcagctttcggttataggagctcatctggctcaggaacagttatattagatgactgtaatttccatgaatctgttcgtcttgatagttttgatatagacagaactctatccctggtaccaccggatggtgaatttccagtcatgaactaccgtttgacacaggaatttagtcctccttttcgtattaatgctttgattgaagaagcagggtcacttaaggcagaagtaattcttaaagtaagtgccgagtttccctcaagtgtaacagctaacactatcaaagtgcagatgccactaccaaaatgtacctccagagttagttttgagctggaacctggagctgtaggacaaacaactgattttaaggaagcaaataagaggctagaatggagtttaagaaagatcgtcgggggatcggagcacactctacatgcaaaactaaccttttctcaggaatctcacgttaatataacaaaagaatcaggacctgtgagcatgacatttactataccaatgcataacgtttcacggcttcaggtaaagtatttgcagatagcaaagaaatctgcaacgcatgaaccataccggtgggttagatatgttacacaggcgaattcctacgtcgctcgtatatgatgccgttaagaacactgtcccctcccccgctctttgtttttctattttgttttcctgctcttattgctctttacacacatgctttgtttatttacttattctttatttgtaaattacactctaagtttacattctaagtcgaatatagatgacgttttcagtttgcctgatttatcattc

SEQ ID NO: 52277 - protein, 451 aa, Glycine max
  peptide (1)..(451): Ceres Seq. ID no. 15171250
  misc_feature (5)..(451): Pfam Name: Adaptor complexes medium subunit family Pfam Description: Adaptor complexes medium subunit family
  misc_feature (1)..(451): Homolog of NCBI NO: 14917111 NR Description: adaptor-related protein complex 4, mu 1 subunit
  misc_feature (1)..(451): Homolog of NCBI NO: 13431270 NR Description: Adapter-related protein complex 4 mu 1 subunit subunit of AP-4) (AP-4 adapter complex mu subunit)
  misc_feature (1)..(451): Homolog of NCBI NO: 13431281 NR Description: Adapter-related protein complex 4 mu 1 subunit subunit of AP-4) (AP-4 adapter complex mu subunit)
  misc_feature (1)..(451): Homolog of NCBI NO: 31981143 NR Description: adaptor-related protein complex AP-4, mu 1
  misc_feature (1)..(451): Homolog of NCBI NO: 33468662 NR Description: SI:zC237L4.1 (novel protein similar to human and
  misc_feature (1)..(451): Homolog of NCBI NO: 23508393 NR Description: clathrin coat assembly protein, putative
  misc_feature (1)..(374): Homolog of NCBI NO: 34906796 NR Description: contains EST D40457(S2456)~similar to clathrin
  misc_feature (1)..(374): Homolog of NCBI NO: 30686572 NR Description: clathrin coat assembly like protein [Arabidopsis
  misc_feature (1)..(451): Homolog of NCBI NO: 33146629 NR Description: putative clathrin-adaptor medium chain apm 4
  misc_feature (1)..(451): Homolog of NCBI NO: 15233859 NR Description: clathrin coat assembly like protein [Arabidopsis
MISQFFVLSQRGDNIAFRDYRGEVQKGSAEIFFRKVKFWEDGGLLEAPPVFNVDGVNYFHVKVVGLLFVATTRVNTSPSFVLELLQRIARVIKDYLGILNEDSLRKNFVLVYELLDEVIDFGYVQTTSTELLKSYVFNEPLVIDAARLPPLGPAAIFTQGTKRMPGIAVTKSVVATEPGGRKREEIFVDIIEKISITFSSSGYILTSEIDGTIQMKSYLSGNPEIRLALNDDLSIGRSQGSAFGYRSSSGSGTVILDDCNFHESVRLDSFDIDRTLSLVPPDGEFPVMNYRLTQEFSPPFRINALIEEAGSLKAEVILKVSAEFPSSVTANTIKVQMPLPKCTSRVSFELEPGAVGQTTDFKEANKRLEWSLRKIVGGSEHTLHAKLTFSQESHVNITKESGPVSMTFTIPMHNVSRLQVKYLQIAKKSATHEPYRWVRYVTQANSYVARI

SEQ ID NO: 52278 - protein, 288 aa, Glycine max; identical to SEQ ID NO: 51626
  peptide (1)..(288): Ceres Seq. ID no. 15171251
  misc_feature (1)..(288): Pfam Name: Adaptor complexes medium subunit family Pfam Description: Adaptor complexes medium subunit family
  misc_feature (1)..(288): Homolog of NCBI NO: 14917111 NR Description: adaptor-related protein complex 4, mu 1 subunit
  misc_feature (1)..(288): Homolog of NCBI NO: 13431270 NR Description: Adapter-related protein complex 4 mu 1 subunit subunit of AP-4) (AP-4 adapter complex mu subunit)
  misc_feature (1)..(288): Homolog of NCBI NO: 13431281 NR Description: Adapter-related protein complex 4 mu 1 subunit subunit of AP-4) (AP-4 adapter complex mu subunit)
  misc_feature (1)..(288): Homolog of NCBI NO: 31981143 NR Description: adaptor-related protein complex AP-4, mu 1
  misc_feature (1)..(288): Homolog of NCBI NO: 33468662 NR Description: SI:zC237L4.1 (novel protein similar to human and
  misc_feature (1)..(288): Homolog of NCBI NO: 23508393 NR Description: clathrin coat assembly protein, putative
  misc_feature (1)..(211): Homolog of NCBI NO: 34906796 NR Description: contains EST D40457(S2456)~similar to clathrin
  misc_feature (1)..(211): Homolog of NCBI NO: 30686572 NR Description: clathrin coat assembly like protein [Arabidopsis
  misc_feature (1)..(288): Homolog of NCBI NO: 33146629 NR Description: putative clathrin-adaptor medium chain apm 4
  misc_feature (1)..(288): Homolog of NCBI NO: 15233859 NR Description: clathrin coat assembly like protein [Arabidopsis

SEQ ID NO: 52279 - protein, 237 aa, Glycine max; identical to SEQ ID NO: 51627
  peptide (1)..(237): Ceres Seq. ID no. 15171252
  misc_feature (1)..(237): Pfam Name: Adaptor complexes medium subunit family Pfam Description: Adaptor complexes medium subunit family
  misc_feature (1)..(237): Homolog of NCBI NO: 14917111 NR Description: adaptor-related protein complex 4, mu 1 subunit
  misc_feature (1)..(237): Homolog of NCBI NO: 13431270 NR Description: Adapter-related protein complex 4 mu 1 subunit subunit of AP-4) (AP-4 adapter complex mu subunit)
  misc_feature (1)..(237): Homolog of NCBI NO: 13431281 NR Description: Adapter-related protein complex 4 mu 1 subunit subunit of AP-4) (AP-4 adapter complex mu subunit)
  misc_feature (1)..(237): Homolog of NCBI NO: 31981143 NR Description: adaptor-related protein complex AP-4, mu 1
  misc_feature (1)..(237): Homolog of NCBI NO: 33468662 NR Description: SI:zC237L4.1 (novel protein similar to human and
  misc_feature (1)..(237): Homolog of NCBI NO: 23508393 NR Description: clathrin coat assembly protein, putative
  misc_feature (1)..(160): Homolog of NCBI NO: 34906796 NR Description: contains EST D40457(S2456)~similar to clathrin
  misc_feature (1)..(160): Homolog of NCBI NO: 30686572 NR Description: clathrin coat assembly like protein [Arabidopsis
  misc_feature (1)..(237): Homolog of NCBI NO: 33146629 NR Description: putative clathrin-adaptor medium chain apm 4
  misc_feature (1)..(237): Homolog of NCBI NO: 15233859 NR Description: clathrin coat assembly like protein [Arabidopsis

SEQ ID NO: 52280 - DNA, 830 bp, Glycine max
  misc_feature (1)..(830): Ceres Seq. ID no. 14305994
atatatctcttataccccttttgtttccatttgaactttgcttttagtagttttaaatcatatcaatagctatgacgactgtggacaggcgtgtgaatgtcgaccgtactgacaaaggacttcaacttaagccgcagtacgaagatcgtgtcggttatggcgctggttatgattatggttatggtgctgattacaagagtcgcggcccatccactaatcaagtcgtggcacttatagcaggagttccaattggtggctcattactagccctagctggactcactctagccggttcggtgataggtttgattctctccattccgctcttcctcctcttcagtcccgtgattgtcccagccgctctcaccatagggctcgctgtgaccggaattttggcgtctgggttatttggtctgacgggtctgagctcggtctcatgggtcctaaactacatccgtgggacgagtgatacggtgccggagcaactggactatgctaagcggcgtatggctgatgcagtaggctacgctggtcagaagggaaaagagatgggacagtatgtgcaggataaggcccatgaagcccacgatactagtctgaccactgagaccagagagccggttcaggcaaagaggactttagcgtaaggcaaggaggaaccttctataaagttgtgggtttatgttggaaaaggcaattatgtaattttacttttgtgtcccagtttcttcgttttttttttgaatatttgtgaattatgtgtaagttcgttttgttatgtccaaataaaatattttgtgagtgaaataaagtgggataaaaggaaatac

SEQ ID NO: 52281 - protein, 191 aa, Glycine max
  peptide (1)..(191): Ceres Seq. ID no. 14305995
  misc_feature (47)..(164): Pfam Name: Oleosin Pfam Description: Oleosin
  misc_feature (17)..(130): Homolog of NCBI NO: 249647 NR Description: oleosin napI [rapeseeds, Peptide Partial, 113 aa]
  misc_feature (17)..(170): Homolog of NCBI NO: 266690 NR Description: Oleosin 18.2 kDa
  misc_feature (46)..(189): Homolog of NCBI NO: 82051 NR Description: lipid body-associated membrane protein - carrot
  misc_feature (17)..(130): Homolog of NCBI NO: 99796 NR Description: major oleosin chain nap-I - rape (fragment)
  misc_feature (41)..(189): Homolog of NCBI NO: 15232141 NR Description: oleosin [Arabidopsis thaliana]
  misc_feature (10)..(180): Homolog of NCBI NO: 2129658 NR Description: oleosin, 21K - Arabidopsis thaliana
  misc_feature (10)..(191): Homolog of NCBI NO: 15242686 NR Description: oleosin [Arabidopsis thaliana]
  misc_feature (5)..(188): Homolog of NCBI NO: 21554017 NR Description: oleosin isoform [Arabidopsis thaliana]
  misc_feature (5)..(188): Homolog of NCBI NO: 15232227 NR Description: oleosin [Arabidopsis thaliana]
  misc_feature (5)..(188): Homolog of NCBI NO: 1592686 NR Description: oleosin type4 [Arabidopsis thaliana]
MTTVDRRVNVDRTDKGLQLKPQYEDRVGYGAGYDYGYGADYKSRGPSTNQVVALIAGVPIGGSLLALAGLTLAGSVIGLILSIPLFLLFSPVIVPAALTIGLAVTGILASGLFGLTGLSSVSWVLNYIRGTSDTVPEQLDYAKRRMADAVGYAGQKGKEMGQYVQDKAHEAHDTSLTTETREPVQAKRTLA

SEQ ID NO: 52282 - DNA, 1293 bp, Glycine max
  misc_feature (1)..(1293): Ceres Seq. ID no. 14314542
atccataacacatcgacccgtgcatggtctcagtaatcaaacccttaccgcgttccccactctgccatcgcaaacccttcccctcacagagttgaagtttattagttgaataatagaacagtccatggctgaagaaatgacaatggtagaacctggaagaggtaagaggaaattttttaaaaagcaaggccataaaatgtcaagtaataaagcaaaagtgatgccaccacaacatggacagaagaaagttaaaatagacaaaaaaatgaagaaacttttccgcaagcgtgcacgagagtataattctgatgatgaagaagatgaggaggccactgtacctgctacctcagagcctaaaggtctggcatctatcaccaataaaagaaatgacgaggatgacacagaaagtgaggatgggtctgaggatgaaggagctgcaggaccacaaaaaacatggaataagaatgctactgatatgaataaccacagctctgatgatgaaggagaagatgataatgaaattcagccaggaattacaaaattcactgaaggatgtagagcattcaagatggcctttaagaatattatgcagaagagtgttcctgatgacatgttgggtccaatactgtcagggcaaaggaaacttgttgtagacaaacttgcagaagaggaagcagaaagcaaggtcaagggagaggccaaaaaggaaaagaagatgttggcagaaaaggggcatgtcaaacctgcttcatacttggattcacatgaaaagtttttaataagtgttgctacaaaaggagtggtcaagctgttcaatgctgtaaataaggcacaaactgctcagaaaggactgaacccctcaaggactaaggatgcaaaagagatacgaaaacgaaccaaacaggccttcttttcagagttagggaaaccatcattgcctgcaattggcaccactacaaaggccaaggaaagcactgacagggtagaagatgaacaacctgcttgggctccattacgagataattatatgctgacaagttcaaggctaaaggattgggacaaaatgcctgataaaaatgtatcagatgacatgggaaaaacttctgaagatagtagttcagatgaagattagtattttagaactcgagcaagcagaattgagatattcatggtgggacaatctgtcagtttttgaatattggtactgttctagttgttactggcataggaatatcttatccatacattttgttgccattggtgtaccaatacgagcaatgaatcacctccagt

SEQ ID NO: 52283 - protein, 335 aa, Glycine max
  peptide (1)..(335): Ceres Seq. ID no. 14314543
  misc_feature (26)..(303): Homolog of NCBI NO: 28828202 NR Description: hypothetical protein [Dictyostelium discoideum]
  misc_feature (24)..(334): Homolog of NCBI NO: 38344339 NR Description: OSJNBa0058K23.21 [Oryza sativa (japonica
  misc_feature (38)..(268): Homolog of NCBI NO: 15238917 NR Description: hypothetical protein [Arabidopsis thaliana]
MAEEMTMVEPGRGKRKFFKKQGHKMSSNKAKVMPPQHGQKKVKIDKKMKKLFRKRAREYNSDDEEDEEATVPATSEPKGLASITNKRNDEDDTESEDGSEDEGAAGPQKTWNKNATDMNNHSSDDEGEDDNEIQPGITKFTEGCRAFKMAFKNIMQKSVPDDMLGPILSGQRKLVVDKLAEEEAESKVKGEAKKEKKMLAEKGHVKPASYLDSHEKFLISVATKGVVKLFNAVNKAQTAQKGLNPSRTKDAKEIRKRTKQAFFSELGKPSLPAIGTTTKAKESTDRVEDEQPAWAPLRDNYMLTSSRLKDWDKMPDKNVSDDMGKTSEDSSSDED

SEQ ID NO: 52284 - protein, 331 aa, Glycine max
  peptide (1)..(331): Ceres Seq. ID no. 14314544
  misc_feature (22)..(299): Homolog of NCBI NO: 28828202 NR Description: hypothetical protein [Dictyostelium discoideum]
  misc_feature (20)..(330): Homolog of NCBI NO: 38344339 NR Description: OSJNBa0058K23.21 [Oryza sativa (japonica
  misc_feature (34)..(264): Homolog of NCBI NO: 15238917 NR Description: hypothetical protein [Arabidopsis thaliana]
MTMVEPGRGKRKFFKKQGHKMSSNKAKVMPPQHGQKKVKIDKKMKKLFRKRAREYNSDDEEDEEATVPATSEPKGLASITNKRNDEDDTESEDGSEDEGAAGPQKTWNKNATDMNNHSSDDEGEDDNEIQPGITKFTEGCRAFKMAFKNIMQKSVPDDMLGPILSGQRKLVVDKLAEEEAESKVKGEAKKEKKMLAEKGHVKPASYLDSHEKFLISVATKGVVKLFNAVNKAQTAQKGLNPSRTKDAKEIRKRTKQAFFSELGKPSLPAIGTTTKAKESTDRVEDEQPAWAPLRDNYMLTSSRLKDWDKMPDKNVSDDMGKTSEDSSSDED

SEQ ID NO: 52285 - protein, 329 aa, Glycine max
  peptide (1)..(329): Ceres Seq. ID no. 14314545
  misc_feature (20)..(297): Homolog of NCBI NO: 28828202 NR Description: hypothetical protein [Dictyostelium discoideum]
  misc_feature (18)..(328): Homolog of NCBI NO: 38344339 NR Description: OSJNBa0058K23.21 [Oryza sativa (japonica
  misc_feature (32)..(262): Homolog of NCBI NO: 15238917 NR Description: hypothetical protein [Arabidopsis thaliana]
MVEPGRGKRKFFKKQGHKMSSNKAKVMPPQHGQKKVKIDKKMKKLFRKRAREYNSDDEEDEEATVPATSEPKGLASITNKRNDEDDTESEDGSEDEGAAGPQKTWNKNATDMNNHSSDDEGEDDNEIQPGITKFTEGCRAFKMAFKNIMQKSVPDDMLGPILSGQRKLVVDKLAEEEAESKVKGEAKKEKKMLAEKGHVKPASYLDSHEKFLISVATKGVVKLFNAVNKAQTAQKGLNPSRTKDAKEIRKRTKQAFFSELGKPSLPAIGTTTKAKESTDRVEDEQPAWAPLRDNYMLTSSRLKDWDKMPDKNVSDDMGKTSEDSSSDED

SEQ ID NO: 52286 - DNA, 1411 bp, Glycine max
  misc_feature (1)..(1411): Ceres Seq. ID no. 15177291
tatatatgtatatatacattgcatagccttggggtattcaaaatcatcaattttcaattcatggcttccctcatgagcaccatcctcaagcaaaggtcttgttcttcttcttcacatgctgggaggctgttgttctccacaacaacagcagccattgttgattccccttcacttgctcagagaatcagagatttgcctaaggaccttcctggaaccaacatcaagaagcatgtttctcagctcattgggaggactccactggtttatcttaacaaagtcaccgaaggatgtggagcttatgttgctgtcaagcaagagatgatgcaacctactgccagcatcaaagacagaccagcatatgcaatgatcacagatgctgaggaaaagaatctgataactcctggaaagacaactttgatagagcctacatcaggcaatatgggtatcagcatggcatttatggccgccatgaagggatataagatggttttgaccatgccctcttacacaagcttggaaagaagggtgaccatgagagcgtttggagctgaattaatcctcactgatccagccaaaggaatgggaggaacagtaaagaaggcttatgaacttttggaaaacacaccaaatgctcacatgctgcaacaattttcaaaccctgccaatactcaggtgcattttgaaacaacaggtcctgagatatgggaggatacaaatggacaagttgacatatttgttatgggaataggtagtggaggcacagtctctggggttggacaatatcttaaatccaaaaatcctaatgttaagatatatggagtggagccaagtgaaagcaatgtgctgaatggtggtaaacctggtcctcatcatataactggcaatggggttggattcaaaccagacatattggacctggatgttatggaaaaagttcttgaagttagcagcgaagatgcagttaacatggctagggtgttggcattgaaggaaggactcatggtagggatatcatctggagctaacacagttgcagcactcagattggctcagctgcctgagaacaaaggcaaacttattgtgactgttcatccaagcttcggtgaacgatacctatcatctgttctgttccaagagcttcgtcaagaagctgaaaacatgcagccagtagcagttgattaattccatgcataagctttgttgtggagttacattacatggagcaacctagttattacaatcctgttgtagcaaaaattgttaacatcatcttacagttcggccatagcaaaaattgtcaaacaaagctgtgttaattgggaaaaggttttgatacagcttacaataagagctgtgttaatgttttgtattgttctttatttttcatttttaatcgaaaaaggtataaagc

SEQ ID NO: 52287 - protein, 393 aa, Glycine max
  peptide (1)..(393): Ceres Seq. ID no. 15177292
  misc_feature (78)..(367): Pfam Name: Pyridoxal-phosphate dependent enzyme Pfam Description: Pyridoxal-phosphate dependent enzyme
  misc_feature (68)..(389): Homolog of NCBI NO: 11131628 NR Description: Cysteine synthase, chloroplast precursor sulfhydrylase) (O-acetylserine (Thiol)-lyase) (CSase B) (CS-B)
  misc_feature (66)..(389): Homolog of NCBI NO: 12644209 NR Description: CYSTEINE SYNTHASE, CHLOROPLAST PRECURSOR SULFHYDRYLASE) (O-ACETYLSERINE (THIOL)-LYASE) (CSASE B) (CS-B)
  misc_feature (66)..(389): Homolog of NCBI NO: 303902 NR Description: cysteine synthase [Spinacia oleracea]
  misc_feature (36)..(393): Homolog of NCBI NO: 38346461 NR Description: OSJNBa0019G23.9 [Oryza sativa (japonica
  misc_feature (36)..(393): Homolog of NCBI NO: 10241630 NR Description: cysteine synthase [Oryza sativa (indica
  misc_feature (21)..(393): Homolog of NCBI NO: 1071913 NR Description: cysteine synthase (EC 4.2.99.8) C precursor,
  misc_feature (48)..(393): Homolog of NCBI NO: 11995005 NR Description: beta-cyanoalanine synthase like protein [Solanum
  misc_feature (21)..(393): Homolog of NCBI NO: 15233111 NR Description: cysteine synthase (O-acetylserine
  misc_feature (57)..(393): Homolog of NCBI NO: 11559260 NR Description: beta-cyanoalanine synthase [Solanum tuberosum]
  misc_feature (48)..(393): Homolog of NCBI NO: 30840956 NR Description: beta-cyanoalanine synthase [Betula pendula]
YICIYTLHSLGVFKIINFQFMASLMSTILKQRSCSSSSHAGRLLFSTTTAAIVDSPSLAQRIRDLPKDLPGTNIKKHVSQLIGRTPLVYLNKVTEGCGAYVAVKQEMMQPTASIKDRPAYAMITDAEEKNLITPGKTTLIEPTSGNMGISMAFMAAMKGYKMVLTMPSYTSLERRVTMRAFGAELILTDPAKGMGGTVKKAYELLENTPNAHMLQQFSNPANTQVHFETTGPEIWEDTNGQVDIFVMGIGSGGTVSGVGQYLKSKNPNVKIYGVEPSESNVLNGGKPGPHHITGNGVGFKPDILDLDVMEKVLEVSSEDAVNMARVLALKEGLMVGISSGANTVAALRLAQLPENKGKLIVTVHPSFGERYLSSVLFQELRQEAENMQPVAVD

SEQ ID NO: 52288 - protein, 373 aa, Glycine max
  peptide (1)..(373): Ceres Seq. ID no. 15177293
  misc_feature (58)..(347): Pfam Name: Pyridoxal-phosphate dependent enzyme Pfam Description: Pyridoxal-phosphate dependent enzyme
  misc_feature (48)..(369): Homolog of NCBI NO: 11131628 NR Description: Cysteine synthase, chloroplast precursor sulfhydrylase) (O-acetylserine (Thiol)-lyase) (CSase B) (CS-B)
  misc_feature (46)..(369): Homolog of NCBI NO: 12644209 NR Description: CYSTEINE SYNTHASE, CHLOROPLAST PRECURSOR SULFHYDRYLASE) (O-ACETYLSERINE (THIOL)-LYASE) (CSASE B) (CS-B)
  misc_feature (46)..(369): Homolog of NCBI NO: 303902 NR Description: cysteine synthase [Spinacia oleracea]
  misc_feature (16)..(373): Homolog of NCBI NO: 38346461 NR Description: OSJNBa0019G23.9 [Oryza sativa (japonica
  misc_feature (16)..(373): Homolog of NCBI NO: 10241630 NR Description: cysteine synthase [Oryza sativa (indica
  misc_feature (1)..(373): Homolog of NCBI NO: 1071913 NR Description: cysteine synthase (EC 4.2.99.8) C precursor,
  misc_feature (28)..(373): Homolog of NCBI NO: 11995005 NR Description: beta-cyanoalanine synthase like protein [Solanum
  misc_feature (1)..(373): Homolog of NCBI NO: 15233111 NR Description: cysteine synthase (O-acetylserine
  misc_feature (37)..(373): Homolog of NCBI NO: 11559260 NR Description: beta-cyanoalanine synthase [Solanum tuberosum]
  misc_feature (28)..(373): Homolog of NCBI NO: 30840956 NR Description: beta-cyanoalanine synthase [Betula pendula]
MASLMSTILKQRSCSSSSHAGRLLFSTTTAAIVDSPSLAQRIRDLPKDLPGTNIKKHVSQLIGRTPLVYLNKVTEGCGAYVAVKQEMMQPTASIKDRPAYAMITDAEEKNLITPGKTTLIEPTSGNMGISMAFMAAMKGYKMVLTMPSYTSLERRVTMRAFGAELILTDPAKGMGGTVKKAYELLENTPNAHMLQQFSNPANTQVHFETTGPEIWEDTNGQVDIFVMGIGSGGTVSGVGQYLKSKNPNVKIYGVEPSESNVLNGGKPGPHHITGNGVGFKPDILDLDVMEKVLEVSSEDAVNMARVLALKEGLMVGISSGANTVAALRLAQLPENKGKLIVTVHPSFGERYLSSVLFQELRQEAENMQPVAVD

SEQ ID NO: 52289 - protein, 369 aa, Glycine max
  peptide (1)..(369): Ceres Seq. ID no. 15177294
  misc_feature (54)..(343): Pfam Name: Pyridoxal-phosphate dependent enzyme Pfam Description: Pyridoxal-phosphate dependent enzyme
  misc_feature (44)..(365): Homolog of NCBI NO: 11131628 NR Description: Cysteine synthase, chloroplast precursor sulfhydrylase) (O-acetylserine (Thiol)-lyase) (CSase B) (CS-B)
  misc_feature (42)..(365): Homolog of NCBI NO: 12644209 NR Description: CYSTEINE SYNTHASE, CHLOROPLAST PRECURSOR SULFHYDRYLASE) (O-ACETYLSERINE (THIOL)-LYASE) (CSASE B) (CS-B)
  misc_feature (42)..(365): Homolog of NCBI NO: 303902 NR Description: cysteine synthase [Spinacia oleracea]
  misc_feature (12)..(369): Homolog of NCBI NO: 38346461 NR Description: OSJNBa0019G23.9 [Oryza sativa (japonica
  misc_feature (12)..(369): Homolog of NCBI NO: 10241630 NR Description: cysteine synthase [Oryza sativa (indica
  misc_feature (1)..(369): Homolog of NCBI NO: 1071913 NR Description: cysteine synthase (EC 4.2.99.8) C precursor,
  misc_feature (24)..(369): Homolog of NCBI NO: 11995005 NR Description: beta-cyanoalanine synthase like protein [Solanum
  misc_feature (1)..(369): Homolog of NCBI NO: 15233111 NR Description: cysteine synthase (O-acetylserine
  misc_feature (33)..(369): Homolog of NCBI NO: 11559260 NR Description: beta-cyanoalanine synthase [Solanum tuberosum]
  misc_feature (24)..(369): Homolog of NCBI NO: 30840956 NR Description: beta-cyanoalanine synthase [Betula pendula]
MSTILKQRSCSSSSHAGRLLFSTTTAAIVDSPSLAQRIRDLPKDLPGTNIKKHVSQLIGRTPLVYLNKVTEGCGAYVAVKQEMMQPTASIKDRPAYAMITDAEEKNLITPGKTTLIEPTSGNMGISMAFMAAMKGYKMVLTMPSYTSLERRVTMRAFGAELILTDPAKGMGGTVKKAYELLENTPNAHMLQQFSNPANTQVHFETTGPEIWEDTNGQVDIFVMGIGSGGTVSGVGQYLKSKNPNVKIYGVEPSESNVLNGGKPGPHHITGNGVGFKPDILDLDVMEKVLEVSSEDAVNMARVLALKEGLMVGISSGANTVAALRLAQLPENKGKLIVTVHPSFGERYLSSVLFQELRQEAENMQPVAVD

SEQ ID NO: 52290 - DNA, 937 bp, Glycine max
  misc_feature (1)..(937): Ceres Seq. ID no. 14305963
ctctttgctccttctgtcctcccctcagcggcatcgttgtattgttcttacacatctttctctctctcactttcggtttctaaaccaaaaccctaatcgagatcacaatcggatcgtaaacaaacagagaccagccatggacggtgattcctcttggagtgctcgactctcttccgcttccaggcgctaccaatccgctcttcaatctcgatcagacatgttcatgggttttgatgaaaatgatggggacgatgatataagagaggagtttctctgcccattttgttctgagtattttgatatcgttggattatgctgccacattgatgaagagcatccaatggaggcaaaaaatggggtatgtccagtttgtgcattgagggtgggggttgatatggtagcacatataaccctacaacatgggagtatatttaagatgcagcgcaaaaggaaatcacggaaaggtggatcgtattcaacactatctttattgaggaaggaactacgagaaggaaatttgcaatccctttttggcggatcttcatgtatagtgtcctcatctaatgcagatccactgttgtcatcatttatattgcctttagctaatgaacatgccagttctcagcctcacttacacactgagacaagatcatctaaaaaatgcttagatgagactgtgtcaacaagaaatgtggagacatcaaccttgtcagttaaggataaggaggagaaggaaaaaagatgcgagtttgttcaagggctgttgctgtccaccatacttgatgacaatttataaaggaaattcatggaggtggctgcttcagtagtgggcgaattcatatgcggtacctgctatgtatggtttgcctgatgaaattgtctatgtatttgatcagagtggaataataagtagtagaaaatgaatgtaatttatgtt

SEQ ID NO: 52291 - protein, 264 aa, Glycine max
  peptide (1)..(264): Ceres Seq. ID no. 14305964
  misc_feature (56)..(259): Pfam Name: Drought induced 19 protein (Di19) Pfam Description: Drought induced 19 protein (Di19)
  misc_feature (49)..(263): Homolog of NCBI NO: 15230782 NR Description: drought-induced protein -related [Arabidopsis
  misc_feature (57)..(262): Homolog of NCBI NO: 15239827 NR Description: drought-induced protein -related [Arabidopsis
  misc_feature (57)..(262): Homolog of NCBI NO: 13937216 NR Description: AT5g49230/K21P3_11 [Arabidopsis thaliana]
  misc_feature (56)..(262): Homolog of NCBI NO: 30696095 NR Description: drought-induced protein -related [Arabidopsis
  misc_feature (49)..(263): Homolog of NCBI NO: 18377875 NR Description: AT3g06760/F3E22_10 [Arabidopsis thaliana]
  misc_feature (56)..(262): Homolog of NCBI NO: 1076316 NR Description: drought-induced protein Di19 - Arabidopsis
  misc_feature (56)..(262): Homolog of NCBI NO: 15028023 NR Description: unknown protein [Arabidopsis thaliana]
  misc_feature (46)..(264): Homolog of NCBI NO: 15240426 NR Description: drought-induced protein -related [Arabidopsis
  misc_feature (46)..(264): Homolog of NCBI NO: 28393233 NR Description: unknown protein [Arabidopsis thaliana]
  misc_feature (46)..(264): Homolog of NCBI NO: 25992529 NR Description: fiber protein Fb2 [Gossypium barbadense]
SLLLLSSPQRHRCIVLTHLSLSHFRFLNQNPNRDHNRIVNKQRPAMDGDSSWSARLSSASRRYQSALQSRSDMFMGFDENDGDDDIREEFLCPFCSEYFDIVGLCCHIDEEHPMEAKNGVCPVCALRVGVDMVAHITLQHGSIFKMQRKRKSRKGGSYSTLSLLRKELREGNLQSLFGGSSCIVSSSNADPLLSSFILPLANEHASSQPHLHTETRSSKKCLDETVSTRNVETSTLSVKDKEEKEKRCEFVQGLLLSTILDDNL

SEQ ID NO: 52292 - protein, 219 aa, Glycine max
  peptide (1)..(219): Ceres Seq. ID no. 14305965
  misc_feature (11)..(214): Pfam Name: Drought induced 19 protein (Di19) Pfam Description: Drought induced 19 protein (Di19)
  misc_feature (4)..(218): Homolog of NCBI NO: 15230782 NR Description: drought-induced protein -related [Arabidopsis
  misc_feature (12)..(217): Homolog of NCBI NO: 15239827 NR Description: drought-induced protein -related [Arabidopsis
  misc_feature (12)..(217): Homolog of NCBI NO: 13937216 NR Description: AT5g49230/K21P3_11 [Arabidopsis thaliana]
  misc_feature (11)..(217): Homolog of NCBI NO: 30696095 NR Description: drought-induced protein -related [Arabidopsis
  misc_feature (4)..(218): Homolog of NCBI NO: 18377875 NR Description: AT3g06760/F3E22_10 [Arabidopsis thaliana]
  misc_feature (11)..(217): Homolog of NCBI NO: 1076316 NR Description: drought-induced protein Di19 - Arabidopsis
  misc_feature (11)..(217): Homolog of NCBI NO: 15028023 NR Description: unknown protein [Arabidopsis thaliana]
  misc_feature (1)..(219): Homolog of NCBI NO: 15240426 NR Description: drought-induced protein -related [Arabidopsis
  misc_feature (1)..(219): Homolog of NCBI NO: 28393233 NR Description: unknown protein [Arabidopsis thaliana]
  misc_feature (1)..(219): Homolog of NCBI NO: 25992529 NR Description: fiber protein Fb2 [Gossypium barbadense]
MDGDSSWSARLSSASRRYQSALQSRSDMFMGFDENDGDDDIREEFLCPFCSEYFDIVGLCCHIDEEHPMEAKNGVCPVCALRVGVDMVAHITLQHGSIFKMQRKRKSRKGGSYSTLSLLRKELREGNLQSLFGGSSCIVSSSNADPLLSSFILPLANEHASSQPHLHTETRSSKKCLDETVSTRNVETSTLSVKDKEEKEKRCEFVQGLLLSTILDDNL

SEQ ID NO: 52293 - protein, 192 aa, Glycine max
  peptide (1)..(192): Ceres Seq. ID no. 14305966
  misc_feature (1)..(187): Pfam Name: Drought induced 19 protein (Di19) Pfam Description: Drought induced 19 protein (Di19)
  misc_feature (1)..(191): Homolog of NCBI NO: 15230782 NR Description: drought-induced protein -related [Arabidopsis
  misc_feature (1)..(190): Homolog of NCBI NO: 15239827 NR Description: drought-induced protein -related [Arabidopsis
  misc_feature (1)..(190): Homolog of NCBI NO: 13937216 NR Description: AT5g49230/K21P3_11 [Arabidopsis thaliana]
  misc_feature (1)..(190): Homolog of NCBI NO: 30696095 NR Description: drought-induced protein -related [Arabidopsis
  misc_feature (1)..(191): Homolog of NCBI NO: 18377875 NR Description: AT3g06760/F3E22_10 [Arabidopsis thaliana]
  misc_feature (1)..(190): Homolog of NCBI NO: 1076316 NR Description: drought-induced protein Di19 - Arabidopsis
  misc_feature (1)..(190): Homolog of NCBI NO: 15028023 NR Description: unknown protein [Arabidopsis thaliana]
  misc_feature (1)..(192): Homolog of NCBI NO: 15240426 NR Description: drought-induced protein -related [Arabidopsis
  misc_feature (1)..(192): Homolog of NCBI NO: 28393233 NR Description: unknown protein [Arabidopsis thaliana]
  misc_feature (1)..(192): Homolog of NCBI NO: 25992529 NR Description: fiber protein Fb2 [Gossypium barbadense]
MFMGFDENDGDDDIREEFLCPFCSEYFDIVGLCCHIDEEHPMEAKNGVCPVCALRVGVDMVAHITLQHGSIFKMQRKRKSRKGGSYSTLSLLRKELREGNLQSLFGGSSCIVSSSNADPLLSSFILPLANEHASSQPHLHTETRSSKKCLDETVSTRNVETSTLSVKDKEEKEKRCEFVQGLLLSTILDDNL

SEQ ID NO: 52294 - DNA, 694 bp, Glycine max
  misc_feature (1)..(694): Ceres Seq. ID no. 14305944
attcacaattcacaacaacacacaacatattattaagacacaccccaaaccaaaccacttcacacagaacacatatccattggtgaaggagtatcatgggtgaacaattagggctactaaaagtcatggttgtgcaagggaaaaggttggtgatccgggatttcaagaccagtgatccttatgtagtactcaaactagggaatcagactgcaaagaccaaggtaattaatagctgcttgaatcctgtttggaatgaagagctgaatttcactctgacagaaccattgggagttctgaatttggaagtgtttgataaagatcttttgaaggctgatgacaagatgggaaatgctttcttgaaccttcaaccaatagtctctgcagccagattaagagacatcttaagagtgtcctctggtgagacaacattaaggaaggtcatacctgatggtgaaaactgtcttgtccgtgaaagcagtatcaactgtgtcaatggtgaggtggtgcagaatgtttggttaaggcttcgtggagttgagtctggggaactagaattgactatcaagttggccacacctgttgctcctgcaatatagtgcaacaattgcatgtgtcataagtgtagatgtctaactattgcatgagtcacttttgccttttattttcaaatttaaatttctttctttttagttcc

SEQ ID NO: 52295 - protein, 166 aa, Glycine max
  peptide (1)..(166): Ceres Seq. ID no. 14305945
  misc_feature (8)..(86): Pfam Name: C2 domain Pfam Description: C2 domain
  misc_feature (1)..(157): Homolog of NCBI NO: 7486586 NR Description: hypothetical protein F7J7.100 - Arabidopsis
  misc_feature (5)..(157): Homolog of NCBI NO: 33146442 NR Description: zinc finger and C2 domain protein-like
  misc_feature (5)..(157): Homolog of NCBI NO: 15226306 NR Description: C2 domain-containing protein [Arabidopsis
  misc_feature (1)..(157): Homolog of NCBI NO: 25407332 NR Description: hypothetical protein AT4g05330 [imported] -
  misc_feature (1)..(157): Homolog of NCBI NO: 18412932 NR Description: zinc finger and C2 domain protein, putative
  misc_feature (1)..(157): Homolog of NCBI NO: 30684739 NR Description: C2 domain-containing protein [Arabidopsis
  misc_feature (5)..(157): Homolog of NCBI NO: 18409675 NR Description: C2 domain-containing protein [Arabidopsis
  misc_feature (1)..(157): Homolog of NCBI NO: 19386828 NR Description: putative zinc finger and C2 domain protein
  misc_feature (1)..(157): Homolog of NCBI NO: 15219500 NR Description: C2 domain-containing protein [Arabidopsis
  misc_feature (1)..(161): Homolog of NCBI NO: 15238792 NR Description: C2 domain-containing protein [Arabidopsis
MGEQLGLLKVMVVQGKRLVIRDFKTSDPYVVLKLGNQTAKTKVINSCLNPVWNEELNFTLTEPLGVLNLEVFDKDLLKADDKMGNAFLNLQPIVSAARLRDILRVSSGETTLRKVIPDGENCLVRESSINCVNGEVVQNVWLRLRGVESGELELTIKLATPVAPAI

SEQ ID NO: 52296 - protein, 156 aa, Glycine max
  peptide (1)..(156): Ceres Seq. ID no. 14305946
  misc_feature (1)..(76): Pfam Name: C2 domain Pfam Description: C2 domain
  misc_feature (1)..(147): Homolog of NCBI NO: 7486586 NR Description: hypothetical protein F7J7.100 - Arabidopsis
  misc_feature (1)..(147): Homolog of NCBI NO: 33146442 NR Description: zinc finger and C2 domain protein-like
  misc_feature (1)..(147): Homolog of NCBI NO: 15226306 NR Description: C2 domain-containing protein [Arabidopsis
  misc_feature (1)..(147): Homolog of NCBI NO: 25407332 NR Description: hypothetical protein AT4g05330 [imported] -
  misc_feature (1)..(147): Homolog of NCBI NO: 18412932 NR Description: zinc finger and C2 domain protein, putative
  misc_feature (1)..(147): Homolog of NCBI NO: 30684739 NR Description: C2 domain-containing protein [Arabidopsis
  misc_feature (1)..(147): Homolog of NCBI NO: 18409675 NR Description: C2 domain-containing protein [Arabidopsis
  misc_feature (1)..(147): Homolog of NCBI NO: 19386828 NR Description: putative zinc finger and C2 domain protein
  misc_feature (1)..(147): Homolog of NCBI NO: 15219500 NR Description: C2 domain-containing protein [Arabidopsis
  misc_feature (1)..(151): Homolog of NCBI NO: 15238792 NR Description: C2 domain-containing protein [Arabidopsis
MVVQGKRLVIRDFKTSDPYVVLKLGNQTAKTKVINSCLNPVWNEELNFTLTEPLGVLNLEVFDKDLLKADDKMGNAFLNLQPIVSAARLRDILRVSSGETTLRKVIPDGENCLVRESSINCVNGEVVQNVWLRLRGVESGELELTIKLATPVAPAI

SEQ ID NO: 52297 - protein, 84 aa, Glycine max
  peptide (1)..(84): Ceres Seq. ID no. 14305947
  misc_feature (1)..(75): Homolog of NCBI NO: 7486586 NR Description: hypothetical protein F7J7.100 - Arabidopsis
  misc_feature (1)..(75): Homolog of NCBI NO: 33146442 NR Description: zinc finger and C2 domain protein-like
  misc_feature (1)..(75): Homolog of NCBI NO: 15226306 NR Description: C2 domain-containing protein [Arabidopsis
  misc_feature (1)..(75): Homolog of NCBI NO: 25407332 NR Description: hypothetical protein AT4g05330 [imported] -
  misc_feature (1)..(75): Homolog of NCBI NO: 18412932 NR Description: zinc finger and C2 domain protein, putative
  misc_feature (1)..(75): Homolog of NCBI NO: 30684739 NR Description: C2 domain-containing protein [Arabidopsis
  misc_feature (1)..(75): Homolog of NCBI NO: 18409675 NR Description: C2 domain-containing protein [Arabidopsis
  misc_feature (1)..(75): Homolog of NCBI NO: 19386828 NR Description: putative zinc finger and C2 domain protein
  misc_feature (1)..(75): Homolog of NCBI NO: 15219500 NR Description: C2 domain-containing protein [Arabidopsis
  misc_feature (1)..(79): Homolog of NCBI NO: 15238792 NR Description: C2 domain-containing protein [Arabidopsis
MGNAFLNLQPIVSAARLRDILRVSSGETTLRKVIPDGENCLVRESSINCVNGEVVQNVWLRLRGVESGELELTIKLATPVAPAI

SEQ ID NO: 52298 - DNA, 861 bp, Glycine max
  misc_feature (1)..(861): Ceres Seq. ID no. 15171239
gccaagatttgttcattgttgggtcaattgaagtctaagaaagaaaacagagagcgaagaaggagaagagatcagaaaaatggcgtccaaagctccaaagaaggccaatctcctcgatcaccactccatcaagcacatcctcgacgagtcagtctccgaggtggtaacgagtcgtgggtttgtggaagacgtgagattgagcaatgtgaggcttctcattggggcaatcatcatcgtcattgctctcttcgcccaattctacaagaagaagttccctgaaaatagggattttctcatcgcctgcatcgccttgtatgtgatcttcaatgggttgttgcagctgatcatatacactaaggagaaaaatgccattctgttcacttatcctcctgttggatcctttactagtaccggtttggtggtttcctccaaattgcctaggttttctgacatgtacacactcactatagcaagcgcagatccaaaatcaatttctgcaaatgatcaagtacatttcaccaaaagtgtcactcagtggttcactaaggacggagtcttagttgagggcctgttctggaaggatgttgaagctttgatagttcaatatactaaagaaccaaagaagagcaagtaatatggagacatgaactttggttttgtggaaaactttttggatgagaaaacatatatttggatatggtttataattctatacttaagacatttaaaatagaactgagggaatcaagcttttaccagctttagagcacaatttattcccatatttcatcagcttatttcgtagaaaaggcttgaacctttattttcatttaattttctaaaaactattaatggttctcg

SEQ ID NO: 52299 - protein, 184 aa, Glycine max
  peptide (1)..(184): Ceres Seq. ID no. 15171240
  misc_feature (1)..(49): Homolog of NCBI NO: 15233420 NR Description: hypothetical protein [Arabidopsis thaliana]
  misc_feature (10)..(184): Homolog of NCBI NO: 31240525 NR Description: ENSANGP00000021231 [Anopheles gambiae]
  misc_feature (6)..(184): Homolog of NCBI NO: 28195697 NR Description: signal peptidase 25 kDA subunit [Gasterosteus
  misc_feature (102)..(184): Homolog of NCBI NO: 15233420 NR Description: hypothetical protein [Arabidopsis thaliana]
  misc_feature (1)..(100): Homolog of NCBI NO: 25408649 NR Description: hypothetical protein At2g39960 [imported] -
  misc_feature (2)..(181): Homolog of NCBI NO: 38344552 NR Description: OSJNBa0027P08.20 [Oryza sativa (japonica
  misc_feature (1)..(184): Homolog of NCBI NO: 34365647 NR Description: At4g04200 [Arabidopsis thaliana]
  misc_feature (1)..(184): Homolog of NCBI NO: 30688096 NR Description: expressed protein [Arabidopsis thaliana]
MASKAPKKANLLDHHSIKHILDESVSEVVTSRGFVEDVRLSNVRLLIGAIIIVIALFAQFYKKKFPENRDFLIACIALYVIFNGLLQLIIYTKEKNAILFTYPPVGSFTSTGLVVSSKLPRFSDMYTLTIASADPKSISANDQVHFTKSVTQWFTKDGVLVEGLFWKDVEALIVQYTKEPKKSK

SEQ ID NO: 52300 - protein, 92 aa, Glycine max
  peptide (1)..(92): Ceres Seq. ID no. 15171241
AKICSLLGQLKSKKENRERRRRRDQKNGVQSSKEGQSPRSPLHQAHPRRVSLRGGNESWVCGRREIEQCEASHWGNHHRHCSLRPILQEEVP

SEQ ID NO: 52301 - DNA, 1439 bp, Glycine max
  misc_feature (1)..(1439): Ceres Seq. ID no. 14314589
aaaagaagaagatttcctctattgattttctttattaaattcaggttacgtactaatgacggcccagttccagaagattgttgttgctgaccacatggatcgaattagtgatttaccaagtcatttgattgattttattctacaacgcttgcccctgcaagatgttgttagaacgagtttattatcaagtaaatggagatataagtggacttctatccccaaacttgatttttcaaatgatttttttcaaaagtgtagggatttagaacttcatgaagtttcaagtactattacagaaattcttttgattcacgatgggcaattagatgagtttgttctttgcattcccgaaaatgtgccaatcaaaattgaatcccttaataagtggattctttgtttatcaagaaaagggattaaagaacttgagctttggaaccttcaaacagatccttgtgaaacaccatctcatatcttctcttgtcaaggattgacgtatcttcaacttcacaattttaaattatcaactgtgcctaatttttctagctttaaaagtttggtttaccttatgttagttgatattatatttgagtccagtgcaattgatcttatgtttggttgtccatcacttgtgatgctctccatttgttactgttctggttttgagtgtatcaatgtgtcctctcctgctctcgaagtcttacatgtacaaggtgaacaagttatcaagtcaatttgtttggagaaagctaaaagaatgactgatgtttcactcatggctgataatcctggggataactttgacatggatacaatatcaaatttgatcaaaggcttgtcagaagttgaaagcatgtgtttaacagaaggttatattcagatcttttccacagcttatacccttccaaagagtttgcaaaaaccactcaactgcttagaatctctagaattggaaggtgtgaatttcgacgatacaacagagcttctgtttgttatttccctacttaaaagttctccaaacctagagaaactttttatacagggtaattatagcactggcgtggatctgccacaaatattggagaagtcaaagtacaatggttgttgccttagtcaccttctgactgtgcacataaaagcttacaaaccctgtgagaatacaatgaacttcatacgttttttgctggctaattccacatcattggagctccttactttctgcattattcctgctcatgatcaacaacatcattccatatctagtgttggacgagaattggaacaaatggcacgagcttcaaaaagtgcagtagttgagttcattgatttatcatttgattgattggtgattgtatttgttatcattcaatccccaactcctcctcatctcttgctttgttctattgtaatttttgctagttacagacaactctttcacaccc

SEQ ID NO: 52302 - protein, 427 aa, Glycine max
  peptide (1)..(427): Ceres Seq. ID no. 14314590
  misc_feature (17)..(59): Pfam Name: F-box domain Pfam Description: F-box domain
  misc_feature (12)..(267): Homolog of NCBI NO: 15219624 NR Description: F-box protein family [Arabidopsis thaliana]
  misc_feature (14)..(422): Homolog of NCBI NO: 15241200 NR Description: F-box protein family [Arabidopsis thaliana]
  misc_feature (14)..(203): Homolog of NCBI NO: 30693275 NR Description: F-box protein family [Arabidopsis thaliana]
  misc_feature (15)..(372): Homolog of NCBI NO: 15241633 NR Description: F-box protein family [Arabidopsis thaliana]
  misc_feature (14)..(386): Homolog of NCBI NO: 10176827 NR Description: contains similarity to heat shock transcription
  misc_feature (14)..(291): Homolog of NCBI NO: 15241216 NR Description: F-box protein family [Arabidopsis thaliana]
  misc_feature (15)..(310): Homolog of NCBI NO: 34901474 NR Description: OSJNBa0040K22.13 [Oryza sativa (japonica
  misc_feature (14)..(414): Homolog of NCBI NO: 34913044 NR Description: putative ribosomal RNA apurinic site specific
  misc_feature (15)..(386): Homolog of NCBI NO: 39104588 NR Description: unknown protein [Arabidopsis thaliana]
  misc_feature (15)..(386): Homolog of NCBI NO: 15222887 NR Description: F-box protein family [Arabidopsis thaliana]
MTAQFQKIVVADHMDRISDLPSHLIDFILQRLPLQDVVRTSLLSSKWRYKWTSIPKLDFSNDFFQKCRDLELHEVSSTITEILLIHDGQLDEFVLCIPENVPIKIESLNKWILCLSRKGIKELELWNLQTDPCETPSHIFSCQGLTYLQLHNFKLSTVPNFSSFKSLVYLMLVDIIFESSAIDLMFGCPSLVMLSICYCSGFECINVSSPALEVLHVQGEQVIKSICLEKAKRMTDVSLMADNPGDNFDMDTISNLIKGLSEVESMCLTEGYIQIFSTAYTLPKSLQKPLNCLESLELEGVNFDDTTELLFVISLLKSSPNLEKLFIQGNYSTGVDLPQILEKSKYNGCCLSHLLTVHIKAYKPCENTMNFIRFLLANSTSLELLTFCIIPAHDQQHHSISSVGRELEQMARASKSAVVEFIDLSFD

SEQ ID NO: 52303 - protein, 414 aa, Glycine max
  peptide (1)..(414): Ceres Seq. ID no. 14314591
  misc_feature (4)..(46): Pfam Name: F-box domain Pfam Description: F-box domain
  misc_feature (1)..(254): Homolog of NCBI NO: 15219624 NR Description: F-box protein family [Arabidopsis thaliana]
  misc_feature (1)..(409): Homolog of NCBI NO: 15241200 NR Description: F-box protein family [Arabidopsis thaliana]
  misc_feature (1)..(190): Homolog of NCBI NO: 30693275 NR Description: F-box protein family [Arabidopsis thaliana]
  misc_feature (2)..(359): Homolog of NCBI NO: 15241633 NR Description: F-box protein family [Arabidopsis thaliana]
  misc_feature (1)..(373): Homolog of NCBI NO: 10176827 NR Description: contains similarity to heat shock transcription
  misc_feature (1)..(278): Homolog of NCBI NO: 15241216 NR Description: F-box protein family [Arabidopsis thaliana]
  misc_feature (2)..(297): Homolog of NCBI NO: 34901474 NR Description: OSJNBa0040K22.13 [Oryza sativa (japonica
  misc_feature (1)..(401): Homolog of NCBI NO: 34913044 NR Description: putative ribosomal RNA apurinic site specific
  misc_feature (2)..(373): Homolog of NCBI NO: 39104588 NR Description: unknown protein [Arabidopsis thaliana]
  misc_feature (2)..(373): Homolog of NCBI NO: 15222887 NR Description: F-box protein family [Arabidopsis thaliana]
MDRISDLPSHLIDFILQRLPLQDVVRTSLLSSKWRYKWTSIPKLDFSNDFFQKCRDLELHEVSSTITEILLIHDGQLDEFVLCIPENVPIKIESLNKWILCLSRKGIKELELWNLQTDPCETPSHIFSCQGLTYLQLHNFKLSTVPNFSSFKSLVYLMLVDIIFESSAIDLMFGCPSLVMLSICYCSGFECINVSSPALEVLHVQGEQVIKSICLEKAKRMTDVSLMADNPGDNFDMDTISNLIKGLSEVESMCLTEGYIQIFSTAYTLPKSLQKPLNCLESLELEGVNFDDTTELLFVISLLKSSPNLEKLFIQGNYSTGVDLPQILEKSKYNGCCLSHLLTVHIKAYKPCENTMNFIRFLLANSTSLELLTFCIIPAHDQQHHSISSVGRELEQMARASKSAVVEFIDLSFD

SEQ ID NO: 52304 - protein, 257 aa, Glycine max
  peptide (1)..(257): Ceres Seq. ID no. 14314592
  misc_feature (1)..(97): Homolog of NCBI NO: 15219624 NR Description: F-box protein family [Arabidopsis thaliana]
  misc_feature (1)..(252): Homolog of NCBI NO: 15241200 NR Description: F-box protein family [Arabidopsis thaliana]
  misc_feature (1)..(33): Homolog of NCBI NO: 30693275 NR Description: F-box protein family [Arabidopsis thaliana]
  misc_feature (1)..(202): Homolog of NCBI NO: 15241633 NR Description: F-box protein family [Arabidopsis thaliana]
  misc_feature (1)..(216): Homolog of NCBI NO: 10176827 NR Description: contains similarity to heat shock transcription
  misc_feature (1)..(121): Homolog of NCBI NO: 15241216 NR Description: F-box protein family [Arabidopsis thaliana]
  misc_feature (1)..(140): Homolog of NCBI NO: 34901474 NR Description: OSJNBa0040K22.13 [Oryza sativa (japonica
  misc_feature (1)..(244): Homolog of NCBI NO: 34913044 NR Description: putative ribosomal RNA apurinic site specific
  misc_feature (1)..(216): Homolog of NCBI NO: 39104588 NR Description: unknown protein [Arabidopsis thaliana]
  misc_feature (1)..(216): Homolog of NCBI NO: 15222887 NR Description: F-box protein family [Arabidopsis thaliana]
MLVDIIFESSAIDLMFGCPSLVMLSICYCSGFECINVSSPALEVLHVQGEQVIKSICLEKAKRMTDVSLMADNPGDNFDMDTISNLIKGLSEVESMCLTEGYIQIFSTAYTLPKSLQKPLNCLESLELEGVNFDDTTELLFVISLLKSSPNLEKLFIQGNYSTGVDLPQILEKSKYNGCCLSHLLTVHIKAYKPCENTMNFIRFLLANSTSLELLTFCIIPAHDQQHHSISSVGRELEQMARASKSAVVEFIDLSFD

SEQ ID NO: 52305 - DNA, 856 bp, Glycine max
  misc_feature (1)..(856): Ceres Seq. ID no. 14305885
caacccaattaatctttgttttcaattccttatttcaataattctctttctccttcttctataactctcctctgtttactctgtttttttcacaaaacaacatggctgcatacagagaacccatgaacatgaacatgagcgacagagccccggtttctccgcagcaaccacactcgccgtggcattctccggttccgtaccttttcggtggtttagcagcgatgttgggtctcatagccttcgctctgttgatccttgcatgttcctattggaagctctccgggtacctcgaagggaacggggaaacagaacgggacctggaagctggcgaaacggaacaggaccagaaacctgcgaaaccgtacgaggagaagatcttggtgatcatggccgggcaagagaagccaacattcttggcaactccgagcgtgtcttcgagttgcagcactagcaggacctcttcgttcggcgacaacactagcacatgcacctgcgaggagaaccgaaaatcgcttgaaatggccgtcaaagagggaagcgctgccgggactgggaccaccgaaaccgcacacacctcatcagatcagaacctttgaaacatagtcacatgttgggggttttgttttgtagttaggttgctttcgtgaaaaagcaaagctcgtgacacctgggtgtctctctaggttgcatgttcaacaattggtgctgatatggggattctcttctcttctcttctctttttattttttcttttttctttttccttcttcttctctttcgattctcgtctatacattatttcgggaatgtaaattctttgaggtggaattgagacatttgctgtttcacaaatcac

SEQ ID NO: 52306 - protein, 164 aa, Glycine max
  peptide (1)..(164): Ceres Seq. ID no. 14305886
  misc_feature (89)..(157): Homolog of NCBI NO: 30983944 NR Description: fiber protein Fb24 [Gossypium barbadense]
  misc_feature (27)..(110): Homolog of NCBI NO: 30690010 NR Description: predicted protein [Arabidopsis thaliana]
  misc_feature (17)..(121): Homolog of NCBI NO: 40253746 NR Description: unknown protein [Oryza sativa (japonica
  misc_feature (23)..(114): Homolog of NCBI NO: 18400628 NR Description: expressed protein [Arabidopsis thaliana]
  misc_feature (9)..(115): Homolog of NCBI NO: 21554318 NR Description: unknown [Arabidopsis thaliana]
  misc_feature (9)..(115): Homolog of NCBI NO: 18416614 NR Description: expressed protein [Arabidopsis thaliana]
  misc_feature (22)..(114): Homolog of NCBI NO: 15238648 NR Description: hypothetical protein [Arabidopsis thaliana]
  misc_feature (23)..(157): Homolog of NCBI NO: 15236062 NR Description: expressed protein [Arabidopsis thaliana]
  misc_feature (23)..(114): Homolog of NCBI NO: 30696912 NR Description: expressed protein [Arabidopsis thaliana]
MAAYREPMNMNMSDRAPVSPQQPHSPWHSPVPYLFGGLAAMLGLIAFALLILACSYWKLSGYLEGNGETERDLEAGETEQDQKPAKPYEEKILVIMAGQEKPTFLATPSVSSSCSTSRTSSFGDNTSTCTCEENRKSLEMAVKEGSAAGTGTTETAHTSSDQNL

SEQ ID NO: 52307 - protein, 157 aa, Glycine max
  peptide (1)..(157): Ceres Seq. ID no. 14305887
  misc_feature (82)..(150): Homolog of NCBI NO: 30983944 NR Description: fiber protein Fb24 [Gossypium barbadense]
  misc_feature (20)..(103): Homolog of NCBI NO: 30690010 NR Description: predicted protein [Arabidopsis thaliana]
  misc_feature (10)..(114): Homolog of NCBI NO: 40253746 NR Description: unknown protein [Oryza sativa (japonica
  misc_feature (16)..(107): Homolog of NCBI NO: 18400628 NR Description: expressed protein [Arabidopsis thaliana]
  misc_feature (2)..(108): Homolog of NCBI NO: 21554318 NR Description: unknown [Arabidopsis thaliana]
  misc_feature (2)..(108): Homolog of NCBI NO: 18416614 NR Description: expressed protein [Arabidopsis thaliana]
  misc_feature (15)..(107): Homolog of NCBI NO: 15238648 NR Description: hypothetical protein [Arabidopsis thaliana]
  misc_feature (16)..(150): Homolog of NCBI NO: 15236062 NR Description: expressed protein [Arabidopsis thaliana]
  misc_feature (16)..(107): Homolog of NCBI NO: 30696912 NR Description: expressed protein [Arabidopsis thaliana]
MNMNMSDRAPVSPQQPHSPWHSPVPYLFGGLAAMLGLIAFALLILACSYWKLSGYLEGNGETERDLEAGETEQDQKPAKPYEEKILVIMAGQEKPTFLATPSVSSSCSTSRTSSFGDNTSTCTCEENRKSLEMAVKEGSAAGTGTTETAHTSSDQNL

SEQ ID NO: 52308 - protein, 155 aa, Glycine max
  peptide (1)..(155): Ceres Seq. ID no. 14305888
  misc_feature (80)..(148): Homolog of NCBI NO: 30983944 NR Description: fiber protein Fb24 [Gossypium barbadense]
  misc_feature (18)..(101): Homolog of NCBI NO: 30690010 NR Description: predicted protein [Arabidopsis thaliana]
  misc_feature (8)..(112): Homolog of NCBI NO: 40253746 NR Description: unknown protein [Oryza sativa (japonica
  misc_feature (14)..(105): Homolog of NCBI NO: 18400628 NR Description: expressed protein [Arabidopsis thaliana]
  misc_feature (1)..(106): Homolog of NCBI NO: 21554318 NR Description: unknown [Arabidopsis thaliana]
  misc_feature (1)..(106): Homolog of NCBI NO: 18416614 NR Description: expressed protein [Arabidopsis thaliana]
  misc_feature (13)..(105): Homolog of NCBI NO: 15238648 NR Description: hypothetical protein [Arabidopsis thaliana]
  misc_feature (14)..(148): Homolog of NCBI NO: 15236062 NR Description: expressed protein [Arabidopsis thaliana]
  misc_feature (14)..(105): Homolog of NCBI NO: 30696912 NR Description: expressed protein [Arabidopsis thaliana]
MNMSDRAPVSPQQPHSPWHSPVPYLFGGLAAMLGLIAFALLILACSYWKLSGYLEGNGETERDLEAGETEQDQKPAKPYEEKILVIMAGQEKPTFLATPSVSSSCSTSRTSSFGDNTSTCTCEENRKSLEMAVKEGSAAGTGTTETAHTSSDQNL

SEQ ID NO: 52309 - DNA, 1072 bp, Glycine max
  misc_feature (1)..(1072): Ceres Seq. ID no. 14305878
gaaacggaataattcgatacccctctcgtctcgtaactaaccatggcagcgttccgatggaagagcttcgaggagaatgaggatcgcccagccaagcctcgtcattttggcgtcaccgagattcaaagcccccactgcactctcttctcccacaaccttcttcaggatatttttgaatctatgggagactatgtagatgggttaaagttttctggaggttctcacagcatgatgccaaaggctactatcaagcaaatcattgacatggcccatcagcatgacgtgtatgttagcacgggtgattgggctgagcacatgattagcaaaagtccatcaggtttcaaggaatatgtagaggaatgcaagcagttggggtttgacacaattgagctcaatgtgggatcgcttgagattcctgaagaaacctttttgagatttgtccgcttggtcaaaagtggtggtctcaaagctaagcctcattttcaagtgaagtttaatgagtctgatattcccaaaggtggtgacagggcttatggggcttatattccccctgtacctagatcatttgaattggtagaagatgtgaatctcttgatcagaagggctgagagatgtctggaagcaggtgcagacatgataatgattgatgctgatgatgtcagcaaacatgctgataacatgcgtgcagacatcattgccaaaatcatagggcgccttggtattgagaagactatgtttgaagcatcaaatcagagaatatcggagtggttcatcaaacaatatggtccaaaggtgaacctctttattgatcattcgaacgtggtggatgtggagtgcctcagggggcgcaacttgggtagaaatcttgcttctttccttggtgcttcagatttcctgttctgaagtgagggaattttcgtatagcaccaagtggggttgatttgtttgtgcataatgcaaagacttgaggtttgccatgtgtgttacagttagtgtgttacatatttcctttagtgattgaagattggaaaattttaaatggagagactgaaataaatgaaacatatttcat

SEQ ID NO: 52310 - protein, 286 aa, Glycine max
  peptide (1)..(286): Ceres Seq. ID no. 14305879
  misc_feature (9)..(273): Pfam Name: (2R)-phospho-3-sulfolactate synthase (ComA) Pfam Description: (2R)-phospho-3-sulfolactate synthase (ComA)
  misc_feature (40)..(267): Homolog of NCBI NO: 40889456 NR Description: Chain A, Crystal Structure Of Methanococcus
  misc_feature (40)..(267): Homolog of NCBI NO: 15668430 NR Description: conserved hypothetical protein [Methanococcus
  misc_feature (15)..(275): Homolog of NCBI NO: 15679668 NR Description: conserved protein [Methanothermobacter
  misc_feature (8)..(267): Homolog of NCBI NO: 29655237 NR Description: hypothetical protein [Coxiella burnetii RSA 493]
  misc_feature (9)..(267): Homolog of NCBI NO: 40745438 NR Description: hypothetical protein AN1464.2 [Aspergillus
  misc_feature (15)..(278): Homolog of NCBI NO: 19553737 NR Description: hypothetical protein [Corynebacterium glutamicum
  misc_feature (1)..(256): Homolog of NCBI NO: 7487784 NR Description: hypothetical protein T6K22.50 - Arabidopsis
  misc_feature (1)..(286): Homolog of NCBI NO: 30685384 NR Description: expressed protein [Arabidopsis thaliana]
MAAFRWKSFEENEDRPAKPRHFGVTEIQSPHCTLFSHNLLQDIFESMGDYVDGLKFSGGSHSMMPKATIKQIIDMAHQHDVYVSTGDWAEHMISKSPSGFKEYVEECKQLGFDTIELNVGSLEIPEETFLRFVRLVKSGGLKAKPHFQVKFNESDIPKGGDRAYGAYIPPVPRSFELVEDVNLLIRRAERCLEAGADMIMIDADDVSKHADNMRADIIAKIIGRLGIEKTMFEASNQRISEWFIKQYGPKVNLFIDHSNVVDVECLRGRNLGRNLASFLGASDFLF

SEQ ID NO: 52311 - protein, 240 aa, Glycine max
  peptide (1)..(240): Ceres Seq. ID no. 14305880
  misc_feature (1)..(227): Pfam Name: (2R)-phospho-3-sulfolactate synthase (ComA) Pfam Description: (2R)-phospho-3-sulfolactate synthase (ComA)
  misc_feature (1)..(221): Homolog of NCBI NO: 40889456 NR Description: Chain A, Crystal Structure Of Methanococcus
  misc_feature (1)..(221): Homolog of NCBI NO: 15668430 NR Description: conserved hypothetical protein [Methanococcus
  misc_feature (1)..(229): Homolog of NCBI NO: 15679668 NR Description: conserved protein [Methanothermobacter
  misc_feature (1)..(221): Homolog of NCBI NO: 29655237 NR Description: hypothetical protein [Coxiella burnetii RSA 493]
  misc_feature (1)..(221): Homolog of NCBI NO: 40745438 NR Description: hypothetical protein AN1464.2 [Aspergillus
  misc_feature (1)..(232): Homolog of NCBI NO: 19553737 NR Description: hypothetical protein [Corynebacterium glutamicum
  misc_feature (1)..(210): Homolog of NCBI NO: 7487784 NR Description: hypothetical protein T6K22.50 - Arabidopsis
  misc_feature (1)..(240): Homolog of NCBI NO: 30685384 NR Description: expressed protein [Arabidopsis thaliana]
MGDYVDGLKFSGGSHSMMPKATIKQIIDMAHQHDVYVSTGDWAEHMISKSPSGFKEYVEECKQLGFDTIELNVGSLEIPEETFLRFVRLVKSGGLKAKPHFQVKFNESDIPKGGDRAYGAYIPPVPRSFELVEDVNLLIRRAERCLEAGADMIMIDADDVSKHADNMRADIIAKIIGRLGIEKTMFEASNQRISEWFIKQYGPKVNLFIDHSNVVDVECLRGRNLGRNLASFLGASDFLF

SEQ ID NO: 52312 - protein, 224 aa, Glycine max
  peptide (1)..(224): Ceres Seq. ID no. 14305881
  misc_feature (1)..(211): Pfam Name: (2R)-phospho-3-sulfolactate synthase (ComA) Pfam Description: (2R)-phospho-3-sulfolactate synthase (ComA)
  misc_feature (1)..(205): Homolog of NCBI NO: 40889456 NR Description: Chain A, Crystal Structure Of Methanococcus
  misc_feature (1)..(205): Homolog of NCBI NO: 15668430 NR Description: conserved hypothetical protein [Methanococcus
  misc_feature (1)..(213): Homolog of NCBI NO: 15679668 NR Description: conserved protein [Methanothermobacter
  misc_feature (1)..(205): Homolog of NCBI NO: 29655237 NR Description: hypothetical protein [Coxiella burnetii RSA 493]
  misc_feature (1)..(205): Homolog of NCBI NO: 40745438 NR Description: hypothetical protein AN1464.2 [Aspergillus
  misc_feature (1)..(216): Homolog of NCBI NO: 19553737 NR Description: hypothetical protein [Corynebacterium glutamicum
  misc_feature (1)..(194): Homolog of NCBI NO: 7487784 NR Description: hypothetical protein T6K22.50 - Arabidopsis
  misc_feature (1)..(224): Homolog of NCBI NO: 30685384 NR Description: expressed protein [Arabidopsis thaliana]
MMPKATIKQIIDMAHQHDVYVSTGDWAEHMISKSPSGFKEYVEECKQLGFDTIELNVGSLEIPEETFLRFVRLVKSGGLKAKPHFQVKFNESDIPKGGDRAYGAYIPPVPRSFELVEDVNLLIRRAERCLEAGADMIMIDADDVSKHADNMRADIIAKIIGRLGIEKTMFEASNQRISEWFIKQYGPKVNLFIDHSNVVDVECLRGRNLGRNLASFLGASDFLF

SEQ ID NO: 52313 - DNA, 1339 bp, Glycine max
  misc_feature (1)..(1339): Ceres Seq. ID no. 14314593
agggaaagtaaaccttgaaacaatcatgagcatcggaacaacactactttcaacaccaccacattactgtttccactccaacactcaaaccacattcctcagcaccgttactccaattcaaaacctctctatccgcaataacaatttcagagtcctctgtttctcttcggacccgtcgcagttgccgccggtggtggtggtggggtccgccaacgccgacatctacgtcgaggtagaccggctcccgggcgagggcgagaccctggcggcgaggtccgggcagacgattgccggcggcaagggcgccaaccaggccacgtgctccgccaagctcgcgtacccgacctacttcgtcgggcaggtcggggacgacgcttacgggagactcgtcacggcgggcctccgcggtggcggggttcgcctcgataatctcgccgtggtggcttcggcggcaacgggtcatgcagttgtgatgctccagtccaacggccagaactccatcgtctacattgggggtgccaacttgagctgctggcctagttccctgccacgtcagcatttggacctcgttgcccaagctggcatcgttttgctgcagagggagattcctgatgctgtcaatgctcaagtcgcacaggctgccaaaaatgctggggtgccagtagtgttggatgctggaggcatggatgggccacttccgccacaattaataaattttgttgatattttgagtcctaatgaaactgaacttgcacgccttacgggaatgccaacagaaagttttgaagagattcaacaggctgctttgaaatgccatgaaatgggagctaagcaagttcttgtgaaacttggacacaaaggatctgccctttttgtagaaggagaaaaaacaattcagcagcctgccatacttgctaaaacagttgttgatacaactggtgctggtgatacttttactgctgcttttgccgtggccttggttgagggcaagtccaaaaaggaatgcctcagatttgccgctgctgcagcttgtctctgtgttcaagtgaagggagcctctcccagcatgcctgataggaaatctgttttggatcttcttaattgtcaatgataatactcgcaaaaggtcacaattcgaactatcaggaatagaataactgtgtatggcagagggaaagacccttgaaaatggcagcaaggaaagcaaaaatccttttacagagtatatctgcaagatggattcttcaacataatagtttgttgtcattgtaataagattaggacaaacactttaccgtttggtaatggaaggaaaatgaaaagaaaaatgttttatatg

SEQ ID NO: 52314 - protein, 369 aa, Glycine max
  peptide (1)..(369): Ceres Seq. ID no. 14314594
  misc_feature (62)..(359): Pfam Name: pfkB family carbohydrate kinase Pfam Description: pfkB family carbohydrate kinase
  misc_feature (64)..(365): Homolog of NCBI NO: 28869568 NR Description: ribokinase [Pseudomonas syringae pv. tomato str.
  misc_feature (64)..(362): Homolog of NCBI NO: 32042037 NR Description: hypothetical protein [Pseudomonas aeruginosa
  misc_feature (64)..(362): Homolog of NCBI NO: 15597146 NR Description: ribokinase [Pseudomonas aeruginosa PA01]
  misc_feature (54)..(362): Homolog of NCBI NO: 32042035 NR Description: hypothetical protein [Pseudomonas aeruginosa
  misc_feature (64)..(362): Homolog of NCBI NO: 23061262 NR Description: hypothetical protein [Pseudomonas fluorescens
  misc_feature (64)..(361): Homolog of NCBI NO: 23039770 NR Description: hypothetical protein [Trichodesmium erythraeum
  misc_feature (273)..(366): Homolog of NCBI NO: 34910896 NR Description: P0003E08.15 [Oryza sativa (japonica
  misc_feature (55)..(281): Homolog of NCBI NO: 34910896 NR Description: P0003E08.15 [Oryza sativa (japonica
  misc_feature (33)..(366): Homolog of NCBI NO: 25518633 NR Description: hypothetical protein F20D23.14 - Arabidopsis
  misc_feature (33)..(366): Homolog of NCBI NO: 15220039 NR Description: putative ribokinase; protein id: At1g17160.1
GKVNLETIMSIGTTLLSTPPHYCFHSNTQTTFLSTVTPIQNLSIRNNNFRVLCFSSDPSQLPPVVVVGSANADIYVEVDRLPGEGETLAARSGQTIAGGKGANQATCSAKLAYPTYFVGQVGDDAYGRLVTAGLRGGGVRLDNLAVVASAATGHAVVMLQSNGQNSIVYIGGANLSCWPSSLPRQHLDLVAQAGIVLLQREIPDAVNAQVAQAAKNAGVPVVLDAGGMDGPLPPQLINFVDILSPNETELARLTGMPTESFEEIQQAALKCHEMGAKQVLVKLGHKGSALFVEGEKTIQQPAILAKTVVDTTGAGDTFTAAFAVALVEGKSKKECLRFAAAAACLCVQVKGASPSMPDRKSVLDLLNCQ

SEQ ID NO: 52315 - protein, 361 aa, Glycine max
  peptide (1)..(361): Ceres Seq. ID no. 14314595
  misc_feature (54)..(351): Pfam Name: pfkB family carbohydrate kinase Pfam Description: pfkB family carbohydrate kinase
  misc_feature (56)..(357): Homolog of NCBI NO: 28869568 NR Description: ribokinase [Pseudomonas syringae pv. tomato str.
  misc_feature (56)..(354): Homolog of NCBI NO: 32042037 NR Description: hypothetical protein [Pseudomonas aeruginosa
  misc_feature (56)..(354): Homolog of NCBI NO: 15597146 NR Description: ribokinase [Pseudomonas aeruginosa PA01]
  misc_feature (46)..(354): Homolog of NCBI NO: 32042035 NR Description: hypothetical protein [Pseudomonas aeruginosa
  misc_feature (56)..(354): Homolog of NCBI NO: 23061262 NR Description: hypothetical protein [Pseudomonas fluorescens
  misc_feature (56)..(353): Homolog of NCBI NO: 23039770 NR Description: hypothetical protein [Trichodesmium erythraeum
  misc_feature (265)..(358): Homolog of NCBI NO: 34910896 NR Description: P0003E08.15 [Oryza sativa (japonica
  misc_feature (47)..(273): Homolog of NCBI NO: 34910896 NR Description: P0003E08.15 [Oryza sativa (japonica
  misc_feature (25)..(358): Homolog of NCBI NO: 25518633 NR Description: hypothetical protein F20D23.14 - Arabidopsis
  misc_feature (25)..(358): Homolog of NCBI NO: 15220039 NR Description: putative ribokinase; protein id: At1g17160.1
MSIGTTLLSTPPHYCFHSNTQTTFLSTVTPIQNLSIRNNNFRVLCFSSDPSQLPPVVVVGSANADIYVEVDRLPGEGETLAARSGQTIAGGKGANQATCSAKLAYPTYFVGQVGDDAYGRLVTAGLRGGGVRLDNLAVVASAATGHAVVMLQSNGQNSIVYIGGANLSCWPSSLPRQHLDLVAQAGIVLLQREIPDAVNAQVAQAAKNAGVPVVLDAGGMDGPLPPQLINFVDILSPNETELARLTGMPTESFEEIQQAALKCHEMGAKQVLVKLGHKGSALFVEGEKTIQQPAILAKTVVDTTGAGDTFTAAFAVALVEGKSKKECLRFAAAAACLCVQVKGASPSMPDRKSVLDLLNCQ

SEQ ID NO: 52316 - protein, 212 aa, Glycine max
  peptide (1)..(212): Ceres Seq. ID no. 14314596
  misc_feature (1)..(202): Pfam Name: pfkB family carbohydrate kinase Pfam Description: pfkB family carbohydrate kinase
  misc_feature (1)..(208): Homolog of NCBI NO: 28869568 NR Description: ribokinase [Pseudomonas syringae pv. tomato str.
  misc_feature (1)..(205): Homolog of NCBI NO: 32042037 NR Description: hypothetical protein [Pseudomonas aeruginosa
  misc_feature (1)..(205): Homolog of NCBI NO: 15597146 NR Description: ribokinase [Pseudomonas aeruginosa PA01]
  misc_feature (1)..(205): Homolog of NCBI NO: 32042035 NR Description: hypothetical protein [Pseudomonas aeruginosa
  misc_feature (1)..(205): Homolog of NCBI NO: 23061262 NR Description: hypothetical protein [Pseudomonas fluorescens
  misc_feature (1)..(204): Homolog of NCBI NO: 23039770 NR Description: hypothetical protein [Trichodesmium erythraeum
  misc_feature (116)..(209): Homolog of NCBI NO: 34910896 NR Description: P0003E08.15 [Oryza sativa (japonica
  misc_feature (1)..(124): Homolog of NCBI NO: 34910896 NR Description: P0003E08.15 [Oryza sativa (japonica
  misc_feature (1)..(209): Homolog of NCBI NO: 25518633 NR Description: hypothetical protein F20D23.14 - Arabidopsis
  misc_feature (1)..(209): Homolog of NCBI NO: 15220039 NR Description: putative ribokinase; protein id: At1g17160.1
MLQSNGQNSIVYIGGANLSCWPSSLPRQHLDLVAQAGIVLLQREIPDAVNAQVAQAAKNAGVPVVLDAGGMDGPLPPQLINFVDILSPNETELARLTGMPTESFEEIQQAALKCHEMGAKQVLVKLGHKGSALFVEGEKTIQQPAILAKTVVDTTGAGDTFTAAFAVALVEGKSKKECLRFAAAAACLCVQVKGASPSMPDRKSVLDLLNCQ

SEQ ID NO: 52317 - DNA, 1512 bp, Glycine max
  misc_feature (1)..(1512): Ceres Seq. ID no. 14314559
gcaccgcttgagcagacttaacaacagcacaaagcgggttactgtctgttcaagctaccatctctctctctctttcttagtgcctccttgccagaagttaaaatggcccaagaaactttcctattcacatctgaatcagtgaacgaggggcaccctgacaagctctgtgaccagatctccgatgctgtgctcgatgcatgcttggagcaggaccctgacagcaaggttgcctgtgaaacctgcaccaagaccaacatggtgatggttttcggagagatcacaaccaaggccaacgtggactatgagaagattgtgcgtgacacatgcaggaacattggttttgtctctgatgatgttggtcttgatgctgacaactgcaaggtcctcgtcaacattgagcaacagagtcctgatattgctcaaggtgtgcacggccacctcacaaagaggcctgaggagattggtgctggtgaccaaggtcatatgttcggctatgccactgacgagactcccgagctcatgcccttgagccatgtccttgccacgaagctcggtgccaagctcaccgaggttcggaagaacgggacatgcccttggctgagacctgatggcaagacccaagtcactgttgagtactacaatgacaagggtgccatggttccaatccgcgtccacactgtgctcatctccacacagcatgatgagactgtcacaaatgatgagattgcagctgatcttaaagaacacgtgattaagcctgtgattcctgagaagtaccttgatgagaagaccattttccatttgaacccttctggcaggtttgtcattggagggccgcatggcgatgctggtctcaccggccgcaagatcatcatcgacacctatggaggatggggtgcacatggtggtggtgccttctctgggaaggatcctaccaaggttgataggagtggtgcctacattgtgaggcaagctgcaaagagcattgttgcaaatggacttgttaggagggcaattgtgcaagtttcctatgccattggtgtgcctgagcccttgtctgtgtttgttgacacttatggcactgggaagatccctgacaaggaaatcctcagcattgtgaaggagagttttgacttcaggcctggcatgatctccatcaaccttgatctcaagaggggtggaaatggcaggttcttgaagactgctgcatatggacactttggcagagatgaccctgacttcacatgggaagtggtgaagccactcaagggggagaaggtacctgcttaactaaaaggggttccaacactcttggcaagggacttttgcactactactggcttcttattatctgattgctaaaattttctctatgtttccttccctcttactcaattctgtttttttttttctgtatttttttatgaatttcccccttttttttgtgtacttgtatgtgttctttcagaacatatatattttatatgatgaaacaaaaaaaaatgttctccc

SEQ ID NO: 52318 - protein, 395 aa, Glycine max
  peptide (1)..(395): Ceres Seq. ID no. 14314560
  misc_feature (242)..(384): Pfam Name: S-adenosylmethionine synthetase, C-terminal domain Pfam Description: S-adenosylmethionine synthetase, C-terminal
  misc_feature (1)..(395): Homolog of NCBI NO: 16226059 NR Description: S-adenosyl-L-methionine synthetase [Dendrobium
  misc_feature (4)..(395): Homolog of NCBI NO: 14600072 NR Description: S-adenosylmethionine synthetase [Brassica juncea]
  misc_feature (4)..(395): Homolog of NCBI NO: 11992267 NR Description: S-adenosylmethionine sythetase 2 [Suaeda maritima
  misc_feature (4)..(392): Homolog of NCBI NO: 5726594 NR Description: S-adenosyl-L-methionine synthetase [Petunia x
  misc_feature (4)..(392): Homolog of NCBI NO: 13540316 NR Description: S-adenosyl-L-methionine synthetase [Elaeagnus
  misc_feature (4)..(395): Homolog of NCBI NO: 10443981 NR Description: S-adenosylmethionine synthetase [Brassica juncea]
  misc_feature (4)..(392): Homolog of NCBI NO: 18157331 NR Description: S-adenosylmethionine synthetase [Phaseolus
  misc_feature (4)..(392): Homolog of NCBI NO: 13540318 NR Description: S-adenosyl-L-methionine synthetase [Elaeagnus
  misc_feature (4)..(392): Homolog of NCBI NO: 3024126 NR Description: S-adenosylmethionine synthetase 1 (Methionine
  misc_feature (4)..(395): Homolog of NCBI NO: 3024127 NR Description: S-adenosylmethionine synthetase 2 (Methionine
MAQETFLFTSESVNEGHPDKLCDQISDAVLDACLEQDPDSKVACETCTKTNMVMVFGEITTKANVDYEKIVRDTCRNIGFVSDDVGLDADNCKVLVNIEQQSPDIAQGVHGHLTKRPEEIGAGDQGHMFGYATDETPELMPLSHVLATKLGAKLTEVRKNGTCPWLRPDGKTQVTVEYYNDKGAMVPIRVHTVLISTQHDETVTNDEIAADLKEHVIKPVIPEKYLDEKTIFHLNPSGRFVIGGPHGDAGLTGRKIIIDTYGGWGAHGGGAFSGKDPTKVDRSGAYIVRQAAKSIVANGLVRRAIVQVSYAIGVPEPLSVFVDTYGTGKIPDKEILSIVKESFDFRPGMISINLDLKRGGNGRFLKTAAYGHFGRDDPDFTWEVVKPLKGEKVPA

SEQ ID NO: 52319 - protein, 344 aa, Glycine max
  peptide (1)..(344): Ceres Seq. ID no. 14314561
  misc_feature (191)..(333): Pfam Name: S-adenosylmethionine synthetase, C-terminal domain Pfam Description: S-adenosylmethionine synthetase, C-terminal
  misc_feature (1)..(344): Homolog of NCBI NO: 16226059 NR Description: S-adenosyl-L-methionine synthetase [Dendrobium
  misc_feature (1)..(344): Homolog of NCBI NO: 14600072 NR Description: S-adenosylmethionine synthetase [Brassica juncea]
  misc_feature (1)..(344): Homolog of NCBI NO: 11992267 NR Description: S-adenosylmethionine sythetase 2 [Suaeda maritima
  misc_feature (1)..(341): Homolog of NCBI NO: 5726594 NR Description: S-adenosyl-L-methionine synthetase [Petunia x
  misc_feature (1)..(341): Homolog of NCBI NO: 13540316 NR Description: S-adenosyl-L-methionine synthetase [Elaeagnus
  misc_feature (1)..(344): Homolog of NCBI NO: 10443981 NR Description: S-adenosylmethionine synthetase [Brassica juncea]
  misc_feature (1)..(341): Homolog of NCBI NO: 18157331 NR Description: S-adenosylmethionine synthetase [Phaseolus
  misc_feature (1)..(341): Homolog of NCBI NO: 13540318 NR Description: S-adenosyl-L-methionine synthetase [Elaeagnus
  misc_feature (1)..(341): Homolog of NCBI NO: 3024126 NR Description: S-adenosylmethionine synthetase 1 (Methionine
  misc_feature (1)..(344): Homolog of NCBI NO: 3024127 NR Description: S-adenosylmethionine synthetase 2 (Methionine
MVMVFGEITTKANVDYEKIVRDTCRNIGFVSDDVGLDADNCKVLVNIEQQSPDIAQGVHGHLTKRPEEIGAGDQGHMFGYATDETPELMPLSHVLATKLGAKLTEVRKNGTCPWLRPDGKTQVTVEYYNDKGAMVPIRVHTVLISTQHDETVTNDEIAADLKEHVIKPVIPEKYLDEKTIFHLNPSGRFVIGGPHGDAGLTGRKIIIDTYGGWGAHGGGAFSGKDPTKVDRSGAYIVRQAAKSIVANGLVRRAIVQVSYAIGVPEPLSVFVDTYGTGKIPDKEILSIVKESFDFRPGMISINLDLKRGGNGRFLKTAAYGHFGRDDPDFTWEVVKPLKGEKVPA

SEQ ID NO: 52320 - protein, 342 aa, Glycine max
  peptide (1)..(342): Ceres Seq. ID no. 14314562
  misc_feature (189)..(331): Pfam Name: S-adenosylmethionine synthetase, C-terminal domain Pfam Description: S-adenosylmethionine synthetase, C-terminal
  misc_feature (1)..(342): Homolog of NCBI NO: 16226059 NR Description: S-adenosyl-L-methionine synthetase [Dendrobium
  misc_feature (1)..(342): Homolog of NCBI NO: 14600072 NR Description: S-adenosylmethionine synthetase [Brassica juncea]
  misc_feature (1)..(342): Homolog of NCBI NO: 11992267 NR Description: S-adenosylmethionine sythetase 2 [Suaeda maritima
  misc_feature (1)..(339): Homolog of NCBI NO: 5726594 NR Description: S-adenosyl-L-methionine synthetase [Petunia x
  misc_feature (1)..(339): Homolog of NCBI NO: 13540316 NR Description: S-adenosyl-L-methionine synthetase [Elaeagnus
  misc_feature (1)..(342): Homolog of NCBI NO: 10443981 NR Description: S-adenosylmethionine synthetase [Brassica juncea]
  misc_feature (1)..(339): Homolog of NCBI NO: 18157331 NR Description: S-adenosylmethionine synthetase [Phaseolus
  misc_feature (1)..(339): Homolog of NCBI NO: 13540318 NR Description: S-adenosyl-L-methionine synthetase [Elaeagnus
  misc_feature (1)..(339): Homolog of NCBI NO: 3024126 NR Description: S-adenosylmethionine synthetase 1 (Methionine
  misc_feature (1)..(342): Homolog of NCBI NO: 3024127 NR Description: S-adenosylmethionine synthetase 2 (Methionine
MVFGEITTKANVDYEKIVRDTCRNIGFVSDDVGLDADNCKVLVNIEQQSPDIAQGVHGHLTKRPEEIGAGDQGHMFGYATDETPELMPLSHVLATKLGAKLTEVRKNGTCPWLRPDGKTQVTVEYYNDKGAMVPIRVHTVLISTQHDETVTNDEIAADLKEHVIKPVIPEKYLDEKTIFHLNPSGRFVIGGPHGDAGLTGRKIIIDTYGGWGAHGGGAFSGKDPTKVDRSGAYIVRQAAKSIVANGLVRRAIVQVSYAIGVPEPLSVFVDTYGTGKIPDKEILSIVKESFDFRPGMISINLDLKRGGNGRFLKTAAYGHFGRDDPDFTWEVVKPLKGEKVPA

SEQ ID NO: 52321 - DNA, 1136 bp, Glycine max
  misc_feature (1)..(1136): Ceres Seq. ID no. 14314550
atgggaccaaactaagtaaaggcacgcgcagcacaactcaaagcaatggagtgagttgcttatgagcatattgagaaaaaaaggcagaggcagaagcagaagcaaaaccccactttttcatggccaaaatcattggcaagagcagaagaagaagaacaacgacgactcaacaactatgccacagaatggttcaccatgtcaacgtccactgcaacctgttccatagggtgtcctttcttggccggttcatttgggacaggatgcttctctgctctcttggaaggccttcttacctcaggctgcccctccgtgacccgccaccgcaggccaccgtccacggtggcgcctccatgcatggataccccttcaccaccaccaccccctccccctgtgactctgactctgatttggtcaacctcaagatcagcttgcttggtgattgccatattggaaaaactagttttgtgatcaagtatgtaggggatgagcaagaaaaaaggagcttgcagatgaagggacttaatttgatggacaaaactttatttgttcaaggagctaggatttcgtttagtatatgggatgttgcaggtgacacagggtccctttatcaaattccaatggcttgtaaagattcagttgcaattttgattatgtttgatctcaccagtcggtgtacactgaatagtgttgttggatggtacagtaaagcaagaaagtggaatcagattgcaattcccattctaataggaaccaaatttgatgattttgttaaactccccccagatgtgcaatggacaattgtaacacaggcaagggcatatgcaagggcaatgaatgctactcttttcttctcaagtgcaacccacaatataaatgtcaacaaaatcttcaagtttatcatggccaagctcttcaacttgccatggaaagtggaacgaaatctgacactaggagaacccacaattgacttctgaaatgtactttacattattgatttatatgtaaatagcaggacaaagaaaagaaaaaggaaaaaagaaaaaagaagaggtccactcatattaactactcttgctttgtagagttcatcgcctaagaacctaattcatttatcttcattgggccattttaactac

SEQ ID NO: 52322 - protein, 284 aa, Glycine max
  peptide (1)..(284): Ceres Seq. ID no. 14314551
  misc_feature (104)..(266): Pfam Name: Ras family Pfam Description: Ras family
  misc_feature (98)..(282): Homolog of NCBI NO: 6323576 NR Description: Gtp-binding protein of the ras superfamily
  misc_feature (98)..(282): Homolog of NCBI NO: 32421653 NR Description: hypothetical protein [Neurospora crassa]
  misc_feature (92)..(282): Homolog of NCBI NO: 38105787 NR Description: hypothetical protein MG04862.4 [Magnaporthe
  misc_feature (92)..(284): Homolog of NCBI NO: 2408103 NR Description: sid3 [Schizosaccharomyces pombe]
  misc_feature (92)..(284): Homolog of NCBI NO: 19114197 NR Description: sid3 protein; gtpase; inducer of septum formation
  misc_feature (47)..(230): Homolog of NCBI NO: 30686347 NR Description: SGP1 monomeric G-protein -related [Arabidopsis
  misc_feature (47)..(284): Homolog of NCBI NO: 18403119 NR Description: SGP1 monomeric G-protein -related [Arabidopsis
  misc_feature (47)..(284): Homolog of NCBI NO: 30686351 NR Description: SGP1 monomeric G-protein -related [Arabidopsis
  misc_feature (37)..(284): Homolog of NCBI NO: 33146727 NR Description: putative Septum-promoting GTP-binding protein 1
  misc_feature (20)..(284): Homolog of NCBI NO: 15239761 NR Description: SGP1 monomeric G-protein (emb|CAB54517.1)
MAKIIGKSRRRRTTTTQQLCHRMVHHVNVHCNLFHRVSFLGRFIWDRMLLCSLGRPSYLRLPLRDPPPQATVHGGASMHGYPFTTTTPSPCDSDSDLVNLKISLLGDCHIGKTSFVIKYVGDEQEKRSLQMKGLNLMDKTLFVQGARISFSIWDVAGDTGSLYQIPMACKDSVAILIMFDLTSRCTLNSVVGWYSKARKWNQIAIPILIGTKFDDFVKLPPDVQWTIVTQARAYARAMNATLFFSSATHNINVNKIFKFIMAKLFNLPWKVERNLTLGEPTIDF

SEQ ID NO: 52323 - protein, 262 aa, Glycine max
  peptide (1)..(262): Ceres Seq. ID no. 14314552
  misc_feature (82)..(244): Pfam Name: Ras family Pfam Description: Ras family
  misc_feature (76)..(260): Homolog of NCBI NO: 6323576 NR Description: Gtp-binding protein of the ras superfamily
  misc_feature (76)..(260): Homolog of NCBI NO: 32421653 NR Description: hypothetical protein [Neurospora crassa]
  misc_feature (70)..(260): Homolog of NCBI NO: 38105787 NR Description: hypothetical protein MG04862.4 [Magnaporthe
  misc_feature (70)..(262): Homolog of NCBI NO: 2408103 NR Description: sid3 [Schizosaccharomyces pombe]
  misc_feature (70)..(262): Homolog of NCBI NO: 19114197 NR Description: sid3 protein; gtpase; inducer of septum formation
  misc_feature (25)..(208): Homolog of NCBI NO: 30686347 NR Description: SGP1 monomeric G-protein -related [Arabidopsis
  misc_feature (25)..(262): Homolog of NCBI NO: 18403119 NR Description: SGP1 monomeric G-protein -related [Arabidopsis
  misc_feature (25)..(262): Homolog of NCBI NO: 30686351 NR Description: SGP1 monomeric G-protein -related [Arabidopsis
  misc_feature (15)..(262): Homolog of NCBI NO: 33146727 NR Description: putative Septum-promoting GTP-binding protein 1
  misc_feature (1)..(262): Homolog of NCBI NO: 15239761 NR Description: SGP1 monomeric G-protein (emb|CAB54517.1)
MVHHVNVHCNLFHRVSFLGRFIWDRMLLCSLGRPSYLRLPLRDPPPQATVHGGASMHGYPFTTTTPSPCDSDSDLVNLKISLLGDCHIGKTSFVIKYVGDEQEKRSLQMKGLNLMDKTLFVQGARISFSIWDVAGDTGSLYQIPMACKDSVAILIMFDLTSRCTLNSVVGWYSKARKWNQIAIPILIGTKFDDFVKLPPDVQWTIVTQARAYARAMNATLFFSSATHNINVNKIFKFIMAKLFNLPWKVERNLTLGEPTIDF

SEQ ID NO: 52324 - protein, 237 aa, Glycine max
  peptide (1)..(237): Ceres Seq. ID no. 14314553
  misc_feature (57)..(219): Pfam Name: Ras family Pfam Description: Ras family
  misc_feature (51)..(235): Homolog of NCBI NO: 6323576 NR Description: Gtp-binding protein of the ras superfamily
  misc_feature (51)..(235): Homolog of NCBI NO: 32421653 NR Description: hypothetical protein [Neurospora crassa]
  misc_feature (45)..(235): Homolog of NCBI NO: 38105787 NR Description: hypothetical protein MG04862.4 [Magnaporthe
  misc_feature (45)..(237): Homolog of NCBI NO: 2408103 NR Description: sid3 [Schizosaccharomyces pombe]
  misc_feature (45)..(237): Homolog of NCBI NO: 19114197 NR Description: sid3 protein; gtpase; inducer of septum formation
  misc_feature (1)..(183): Homolog of NCBI NO: 30686347 NR Description: SGP1 monomeric G-protein -related [Arabidopsis
  misc_feature (1)..(237): Homolog of NCBI NO: 18403119 NR Description: SGP1 monomeric G-protein -related [Arabidopsis
  misc_feature (1)..(237): Homolog of NCBI NO: 30686351 NR Description: SGP1 monomeric G-protein -related [Arabidopsis
  misc_feature (1)..(237): Homolog of NCBI NO: 33146727 NR Description: putative Septum-promoting GTP-binding protein 1
  misc_feature (1)..(237): Homolog of NCBI NO: 15239761 NR Description: SGP1 monomeric G-protein (emb|CAB54517.1)
MLLCSLGRPSYLRLPLRDPPPQATVHGGASMHGYPFTTTTPSPCDSDSDLVNLKISLLGDCHIGKTSFVIKYVGDEQEKRSLQMKGLNLMDKTLFVQGARISFSIWDVAGDTGSLYQIPMACKDSVAILIMFDLTSRCTLNSVVGWYSKARKWNQIAIPILIGTKFDDFVKLPPDVQWTIVTQARAYARAMNATLFFSSATHNINVNKIFKFIMAKLFNLPWKVERNLTLGEPTIDF

SEQ ID NO: 52325 - protein, 207 aa, Glycine max
  peptide (1)..(207): Ceres Seq. ID no. 14314554
  misc_feature (27)..(189): Pfam Name: Ras family Pfam Description: Ras family
  misc_feature (21)..(205): Homolog of NCBI NO: 6323576 NR Description: Gtp-binding protein of the ras superfamily
  misc_feature (21)..(205): Homolog of NCBI NO: 32421653 NR Description: hypothetical protein [Neurospora crassa]
  misc_feature (15)..(205): Homolog of NCBI NO: 38105787 NR Description: hypothetical protein MG04862.4 [Magnaporthe
  misc_feature (15)..(207): Homolog of NCBI NO: 2408103 NR Description: sid3 [Schizosaccharomyces pombe]
  misc_feature (15)..(207): Homolog of NCBI NO: 19114197 NR Description: sid3 protein; gtpase; inducer of septum formation
  misc_feature (1)..(153): Homolog of NCBI NO: 30686347 NR Description: SGP1 monomeric G-protein -related [Arabidopsis
  misc_feature (1)..(207): Homolog of NCBI NO: 18403119 NR Description: SGP1 monomeric G-protein -related [Arabidopsis
  misc_feature (1)..(207): Homolog of NCBI NO: 30686351 NR Description: SGP1 monomeric G-protein -related [Arabidopsis
  misc_feature (1)..(207): Homolog of NCBI NO: 33146727 NR Description: putative Septum-promoting GTP-binding protein 1
  misc_feature (1)..(207): Homolog of NCBI NO: 15239761 NR Description: SGP1 monomeric G-protein (emb|CAB54517.1)
MHGYPFTTTTPSPCDSDSDLVNLKISLLGDCHIGKTSFVIKYVGDEQEKRSLQMKGLNLMDKTLFVQGARISFSIWDVAGDTGSLYQIPMACKDSVAILIMFDLTSRCTLNSVVGWYSKARKWNQIAIPILIGTKFDDFVKLPPDVQWTIVTQARAYARAMNATLFFSSATHNINVNKIFKFIMAKLFNLPWKVERNLTLGEPTIDF

SEQ ID NO: 52326 - DNA, 1183 bp, Glycine max
  misc_feature (1)..(1183): Ceres Seq. ID no. 15171265
atctccccctcctcactcgaccacaccactctctctctcttatctaatcttcgccatgtctagactccctcctcctcctctactctcagtcaacctccctctcatagagaaaacaaccgactccgagttaaccccgactcgactcagtttccccaacgagttcccctacgagttcgactctccagcgttctcccctggcttcacctccccagggaactccaccgagacggaagacgagagcagcgacgacgaagaagacttcctcgccgggctgactcgccgactcgctccctccactcaccgcctccctcctccctccttcaagtccgaggagaaacgtcaggtggcagcaacttcgccacttctcccaccgtcgcatgcgcatacgacgtcgtttcggagagacaatgcgtgggaggtgatatccgctgctgctggagaagtcgctaggctcaaactcggaagctacgagcctcaccttcctcgtgaaagcccaagtctcactcttcgccaccaaaacgctgcgtttcaaaccgaacgttatcttcagcagcagcgtcttcttgaccagatgtggctctgttctcagacaagaaccaagtcctccgagaatcttttcccgaagagggcattgaacgaggacatcgcgtttcagaacatgagacgcaatgctacgtccaacgccgccacgtggatacctcaacacgctgtagctcccgtgaagcgtccttctgccggcaccggagtattccttccccggcgatacccaacagcctcctcagagccaatcaagaagtcagtaccagttaacagaagtgttatctcgcagtcgagagtctgtcctccgcagactctgagctttgatgagttcacaaacgttgggtcaagactcagccagttcgattacgagtgtatgttagcaagaagtacactacttgcgcgtcagggaaattacagagcagttggttgtctgaaccaagaaagacgtcttcctcaagactggatgtattgaagctgttctgtctgagaagtttgaagaatcagaaggagcgtagttagaagttgtgtgtgtttaggttataaactgagattgttatgttatgattagtaataaggatgataattagaataaaggttgggatattacaagtttgttacattttattattatatttttagtaac

SEQ ID NO: 52327 - protein, 336 aa, Glycine max
  peptide (1)..(336): Ceres Seq. ID no. 15171266
  misc_feature (19)..(120): Homolog of NCBI NO: 18405186 NR Description: expressed protein [Arabidopsis thaliana]
  misc_feature (50)..(336): Homolog of NCBI NO: 18405186 NR Description: expressed protein [Arabidopsis thaliana]
SPPPHSTTPLSLSYLIFAMSRLPPPPLLSVNLPLIEKTTDSELTPTRLSFPNEFPYEFDSPAFSPGFTSPGNSTETEDESSDDEEDFLAGLTRRLAPSTHRLPPPSFKSEEKRQVAATSPLLPPSHAHTTSFRRDNAWEVISAAAGEVARLKLGSYEPHLPRESPSLTLRHQNAAFQTERYLQQQRLLDQMWLCSQTRTKSSENLFPKRALNEDIAFQNMRRNATSNAATWIPQHAVAPVKRPSAGTGVFLPRRYPTASSEPIKKSVPVNRSVISQSRVCPPQTLSFDEFTNVGSRLSQFDYECMLARSTLLARQGNYRAVGCLNQERRLPQDWMY

SEQ ID NO: 52328 - protein, 318 aa, Glycine max
  peptide (1)..(318): Ceres Seq. ID no. 15171267
  misc_feature (1)..(102): Homolog of NCBI NO: 18405186 NR Description: expressed protein [Arabidopsis thaliana]
  misc_feature (32)..(318): Homolog of NCBI NO: 18405186 NR Description: expressed protein [Arabidopsis thaliana]
MSRLPPPPLLSVNLPLIEKTTDSELTPTRLSFPNEFPYEFDSPAFSPGFTSPGNSTETEDESSDDEEDFLAGLTRRLAPSTHRLPPPSFKSEEKRQVAATSPLLPPSHAHTTSFRRDNAWEVISAAAGEVARLKLGSYEPHLPRESPSLTLRHQNAAFQTERYLQQQRLLDQMWLCSQTRTKSSENLFPKRALNEDIAFQNMRRNATSNAATWIPQHAVAPVKRPSAGTGVFLPRRYPTASSEPIKKSVPVNRSVISQSRVCPPQTLSFDEFTNVGSRLSQFDYECMLARSTLLARQGNYRAVGCLNQERRLPQDWMY

SEQ ID NO: 52329 - DNA, 919 bp, Glycine max
  misc_feature (1)..(919): Ceres Seq. ID no. 14305858
acctccattgagttgagttcaaaactctgttctttcctccatgaattcaatttctttaggttccttcatcctcacaccatgcaagttccgcccttttcttcaaaccaaacaccaacccatattccgcactctctccccaattcccctgacacaaaaacccacttttcttcgagccacagactcgaacatcgacgcccccatttccctccccgagggcgcgtccttcgtttccatcccagaaatcatcgagaaggactggtccgtgcttgattgcgccgaacaccgaaccactgaccgcattatagcttccggaaacatcgaacagagttcgagggttttggtctcaactgggtcagaagactttgttgattccttagcgggtttaactccctctgtgtttgttgttcatgactcgcttctgacactggcttgcattaaagaaaaatatgacagggttaagtgttggcaaggggagattatttatgttccggaaaagtgggctccttttgatgctgtgtttctttatttccttcccgcgttgcccttcaagctccaccaaattttggagtctttggctgggaaatgtgcaccgggtggaagggtgattatcagtcatcctaaagggaaagaagtattagaacagcaacgaaaacagtacccagatgtagtagtttctgacctacctaataaaacatatttacaaagtgttgcagctgcccattcttttgacgtggctgaatttgtggatgaacctggcctttatttagccgttttgatctgctcgagagcttaaaaactagagtgtgtacatttgaatacacaatttgattgaactttttatatggtgttttccttcttgattattagcttgaatttttggttgaaaaattataaaataatataatttgattgatatgat

SEQ ID NO: 52330 - protein, 250 aa, Glycine max
  peptide (1)..(250): Ceres Seq. ID no. 14305859
  misc_feature (1)..(245): Homolog of NCBI NO: 34902316 NR Description: Unknown protein [Oryza sativa (japonica
  misc_feature (55)..(185): Homolog of NCBI NO: 28207166 NR Description: hypothetical protein [Arabidopsis thaliana]
  misc_feature (55)..(249): Homolog of NCBI NO: 15227474 NR Description: expressed protein [Arabidopsis thaliana]
  misc_feature (55)..(249): Homolog of NCBI NO: 28207164 NR Description: hypothetical protein [Arabidopsis thaliana]
MNSISLGSFILTPCKFRPFLQTKHQPIFRTLSPIPLTQKPTFLRATDSNIDAPISLPEGASFVSIPEIIEKDWSVLDCAEHRTTDRIIASGNIEQSSRVLVSTGSEDFVDSLAGLTPSVFVVHDSLLTLACIKEKYDRVKCWQGEIIYVPEKWAPFDAVFLYFLPALPFKLHQILESLAGKCAPGGRVIISHPKGKEVLEQQRKQYPDVVVSDLPNKTYLQSVAAAHSFDVAEFVDEPGLYLAVLICSRA

SEQ ID NO: 52331 - DNA, 977 bp, Glycine max
  misc_feature (1)..(977): Ceres Seq. ID no. 14305854
actcaaaattaaccacaagcataagcacaagcacaagcacaagcacttctctaattccctttcacactctattacagatttcacaagtgcttacacttcaaatggctttggaagctcttcaatcacccaccacagccactccatcgtttagtccctttgaagaaaccagtctcagttacttagagacaccgtggacgaaaggaaagcgttctaagcgtagccgcacggagcaacaactgcaacacccttcatgcaccgaggaagagtacctcgctctttgtctcatcatgctcgctcgcggcggcgccggcagtgtctccaccgccaaacccgctgtctccgacaacaattctgcgccgctatccgccgccaaactgagctacaaatgttcggtttgcaacaaagccttctcctcttaccaagcactcggaggacacaaggccagccaccggaagctcgccggagaaaaccacccgacctcctccgccgtgacgacgagttcggcgtcgaacggtggtggtaggacccacgagtgctccatctgccacaagacgttttcgacaggacaggccttgggaggacacaaacgttgtcactacgaaggcggtaacagcgccgtaaccgcctctgagggagtggggtccactcacacaggaagccaccgcgatttcgatctcaacctcccggcttttccggacttctcagcaaggttcttcgtcgatgacgaggttaccagtcctcatccatccaagaagtcccgtttcaatttgaccatacccaagattgaaatccctcaatactgatccatagatccaaaaaaattattcagtgtttttttatatatttttttaagttatttgggattaatttgttcttgtacatatatagtacttgggccttattcgctagttttagcttttagattgtagtatacttttgacagtggtgattcaattcaattcatttatttttatttt

SEQ ID NO: 52332 - protein, 266 aa, Glycine max
  peptide (1)..(266): Ceres Seq. ID no. 14305855
  misc_feature (176)..(198): Pfam Name: Zinc finger, C2H2 type Pfam Description: Zinc finger, C2H2 type
  misc_feature (34)..(259): Homolog of NCBI NO: 7228329 NR Description: putative TFIIIA (or kruppel)-like zinc finger
SKLTTSISTSTSTSTSLIPFHTLLQISQVLTLQMALEALQSPTTATPSFSPFEETSLSYLETPWTKGKRSKRSRTEQQLQHPSCTEEEYLALCLIMLARGGAGSVSTAKPAVSDNNSAPLSAAKLSYKCSVCNKAFSSYQALGGHKASHRKLAGENHPTSSAVTTSSASNGGGRTHECSICHKTFSTGQALGGHKRCHYEGGNSAVTASEGVGSTHTGSHRDFDLNLPAFPDFSARFFVDDEVTSPHPSKKSRFNLTIPKIEIPQY

SEQ ID NO: 52333 - protein, 233 aa, Glycine max
  peptide (1)..(233): Ceres Seq. ID no. 14305856
  misc_feature (143)..(165): Pfam Name: Zinc finger, C2H2 type Pfam Description: Zinc finger, C2H2 type
  misc_feature (1)..(226): Homolog of NCBI NO: 7228329 NR Description: putative TFIIIA (or kruppel)-like zinc finger
MALEALQSPTTATPSFSPFEETSLSYLETPWTKGKRSKRSRTEQQLQHPSCTEEEYLALCLIMLARGGAGSVSTAKPAVSDNNSAPLSAAKLSYKCSVCNKAFSSYQALGGHKASHRKLAGENHPTSSAVTTSSASNGGGRTHECSICHKTFSTGQALGGHKRCHYEGGNSAVTASEGVGSTHTGSHRDFDLNLPAFPDFSARFFVDDEVTSPHPSKKSRFNLTIPKIEIPQY

SEQ ID NO: 52334 - protein, 171 aa, Glycine max
  peptide (1)..(171): Ceres Seq. ID no. 14305857
  misc_feature (81)..(103): Pfam Name: Zinc finger, C2H2 type Pfam Description: Zinc finger, C2H2 type
  misc_feature (1)..(164): Homolog of NCBI NO: 7228329 NR Description: putative TFIIIA (or kruppel)-like zinc finger
MLARGGAGSVSTAKPAVSDNNSAPLSAAKLSYKCSVCNKAFSSYQALGGHKASHRKLAGENHPTSSAVTTSSASNGGGRTHECSICHKTFSTGQALGGHKRCHYEGGNSAVTASEGVGSTHTGSHRDFDLNLPAFPDFSARFFVDDEVTSPHPSKKSRFNLTIPKIEIPQY

SEQ ID NO: 52335 - DNA, 1540 bp, Glycine max
  misc_feature (1)..(1540): Ceres Seq. ID no. 14314567
atttttgagctttccatttttctctctttttcaactttcaattcaagcagctttggaaaaaccaaccagccaacgggttttttttttttttcacctcctgaaatttctttggaagaagcttgcacaaggtggagtcgcagagacaggtgttggtttggtaatataggccttggagtgaaaattcaatattttgcatggaagccagagaaggtattagttctggggttacagtgataggggcagaagctccatcagcttaccatgtggctccgaggagtgaagctccaaaccaggttcatgtccctgatggtggtggtggtggtgctgctacagctgcacctgttggtgtctcacctgtgagtgtggggttggatggaacagttaagaagaaacggggtagaccgaggaaatatgggcctgatgggtctgtaactatggcattgtcgccaatgccaatctcgtcttctgctccgccttcgaatgacttttcatccgggaagcgggggaaaatgcgggggatggaccataagccgtcgaaaaaagttggcttggattatataggtgacttgaatgtatgctctgatggtacaaattttatgccacatatcatcactgtcaatgctggcgaggacatcacaatgaaggtgatatccttttctcaacaaggaccacgagctatatgtatcttatctgctaatggtgtaatttcaaatgttacacttcgtcagcctgattcttctgggggtactttaacttatgagggccgttttgagatactttccttgtctggatcattcatgcctactgataaccaaggaacaagaagcaggaccggtggaatgtctgtgtcgttggctagtcctgatggccgtgttgtaggtggtggagttgctggtcttcttgtagctgccagccctgtgcaggtggtggtgggaagctttttaccaagcagccagcaagaacagaaaataaagaagccaaagtctagtgattatgcaccggtaactgttactccagcgattgcagtgtcttctgcaccgccacctccaaccaatgctgaaaaagaggatgtgaatgttatgggtggagcacatgtactgcaaaattctggaacccttaactctaacctcactcctcccaatgcctttagaagagacaactgggtcaacatgcactctatgccagactctagaaaatcagctacagatattaacatatctttgcctgatagttaggttggcgatcgaggggcgcactctctatcctcaagaactcttgctgacaacattcatgactcagctgttttattaatgtttagtgttctctctctttctctcactctcatttaaagattgtttcaatcgtgtctaatgtctatcaccataggatgtagtttcagtgttgtaagttgcagctagttagagtatctgatatatttatcggctgattaggtagatgctgcattctgcagatttatgagtaggctaatttggatgtaatgaaaacttgtttgcctatttatttatgactgaatttgtgg

SEQ ID NO: 52336 - protein, 346 aa, Glycine max
  peptide (1)..(346): Ceres Seq. ID no. 14314568
  misc_feature (15)..(315): Homolog of NCBI NO: 18403332 NR Description: AT-hook DNA-binding protein (AHP1) [Arabidopsis
  misc_feature (15)..(315): Homolog of NCBI NO: 2598227 NR Description: AT-hook protein 1 [Arabidopsis thaliana]
  misc_feature (15)..(315): Homolog of NCBI NO: 14326504 NR Description: At2g33620/F4P9.39 [Arabidopsis thaliana]
  misc_feature (26)..(322): Homolog of NCBI NO: 8809639 NR Description: contains similarity to DNA-binding
  misc_feature (17)..(257): Homolog of NCBI NO: 15235023 NR Description: expressed protein [Arabidopsis thaliana]
  misc_feature (26)..(113): Homolog of NCBI NO: 15241763 NR Description: expressed protein [Arabidopsis thaliana]
  misc_feature (128)..(322): Homolog of NCBI NO: 15241763 NR Description: expressed protein [Arabidopsis thaliana]
  misc_feature (1)..(344): Homolog of NCBI NO: 15236743 NR Description: transcription factor -related [Arabidopsis
  misc_feature (19)..(281): Homolog of NCBI NO: 22328578 NR Description: DNA-binding protein -related [Arabidopsis
  misc_feature (6)..(274): Homolog of NCBI NO: 15235790 NR Description: DNA binding protein -related [Arabidopsis
MEAREGISSGVTVIGAEAPSAYHVAPRSEAPNQVHVPDGGGGGAATAAPVGVSPVSVGLDGTVKKKRGRPRKYGPDGSVTMALSPMPISSSAPPSNDFSSGKRGKMRGMDHKPSKKVGLDYIGDLNVCSDGTNFMPHIITVNAGEDITMKVISFSQQGPRAICILSANGVISNVTLRQPDSSGGTLTYEGRFEILSLSGSFMPTDNQGTRSRTGGMSVSLASPDGRVVGGGVAGLLVAASPVQVVVGSFLPSSQQEQKIKKPKSSDYAPVTVTPAIAVSSAPPPPTNAEKEDVNVMGGAHVLQNSGTLNSNLTPPNAFRRDNWVNMHSMPDSRKSATDINISLPDS

SEQ ID NO: 52337 - protein, 266 aa, Glycine max
  peptide (1)..(266): Ceres Seq. ID no. 14314569
  misc_feature (1)..(235): Homolog of NCBI NO: 18403332 NR Description: AT-hook DNA-binding protein (AHP1) [Arabidopsis
  misc_feature (1)..(235): Homolog of NCBI NO: 2598227 NR Description: AT-hook protein 1 [Arabidopsis thaliana]
  misc_feature (1)..(235): Homolog of NCBI NO: 14326504 NR Description: At2g33620/F4P9.39 [Arabidopsis thaliana]
  misc_feature (1)..(242): Homolog of NCBI NO: 8809639 NR Description: contains similarity to DNA-binding
  misc_feature (1)..(177): Homolog of NCBI NO: 15235023 NR Description: expressed protein [Arabidopsis thaliana]
  misc_feature (1)..(33): Homolog of NCBI NO: 15241763 NR Description: expressed protein [Arabidopsis thaliana]
  misc_feature (48)..(242): Homolog of NCBI NO: 15241763 NR Description: expressed protein [Arabidopsis thaliana]
  misc_feature (1)..(264): Homolog of NCBI NO: 15236743 NR Description: transcription factor -related [Arabidopsis
  misc_feature (1)..(201): Homolog of NCBI NO: 22328578 NR Description: DNA-binding protein -related [Arabidopsis
  misc_feature (1)..(194): Homolog of NCBI NO: 15235790 NR Description: DNA binding protein -related [Arabidopsis
MALSPMPISSSAPPSNDFSSGKRGKMRGMDHKPSKKVGLDYIGDLNVCSDGTNFMPHIITVNAGEDITMKVISFSQQGPRAICILSANGVISNVTLRQPDSSGGTLTYEGRFEILSLSGSFMPTDNQGTRSRTGGMSVSLASPDGRVVGGGVAGLLVAASPVQVVVGSFLPSSQQEQKIKKPKSSDYAPVTVTPAIAVSSAPPPPTNAEKEDVNVMGGAHVLQNSGTLNSNLTPPNAFRRDNWVNMHSMPDSRKSATDINISLPDS

SEQ ID NO: 52338 - protein, 261 aa, Glycine max
  peptide (1)..(261): Ceres Seq. ID no. 14314570
  misc_feature (1)..(230): Homolog of NCBI NO: 18403332 NR Description: AT-hook DNA-binding protein (AHP1) [Arabidopsis
  misc_feature (1)..(230): Homolog of NCBI NO: 2598227 NR Description: AT-hook protein 1 [Arabidopsis thaliana]
  misc_feature (1)..(230): Homolog of NCBI NO: 14326504 NR Description: At2g33620/F4P9.39 [Arabidopsis thaliana]
  misc_feature (1)..(237): Homolog of NCBI NO: 8809639 NR Description: contains similarity to DNA-binding
  misc_feature (1)..(172): Homolog of NCBI NO: 15235023 NR Description: expressed protein [Arabidopsis thaliana]
  misc_feature (1)..(28): Homolog of NCBI NO: 15241763 NR Description: expressed protein [Arabidopsis thaliana]
  misc_feature (43)..(237): Homolog of NCBI NO: 15241763 NR Description: expressed protein [Arabidopsis thaliana]
  misc_feature (1)..(259): Homolog of NCBI NO: 15236743 NR Description: transcription factor -related [Arabidopsis
  misc_feature (1)..(196): Homolog of NCBI NO: 22328578 NR Description: DNA-binding protein -related [Arabidopsis
  misc_feature (1)..(189): Homolog of NCBI NO: 15235790 NR Description: DNA binding protein -related [Arabidopsis
MPISSSAPPSNDFSSGKRGKMRGMDHKPSKKVGLDYIGDLNVCSDGTNFMPHIITVNAGEDITMKVISFSQQGPRAICILSANGVISNVTLRQPDSSGGTLTYEGRFEILSLSGSFMPTDNQGTRSRTGGMSVSLASPDGRVVGGGVAGLLVAASPVQVVVGSFLPSSQQEQKIKKPKSSDYAPVTVTPAIAVSSAPPPPTNAEKEDVNVMGGAHVLQNSGTLNSNLTPPNAFRRDNWVNMHSMPDSRKSATDINISLPDS

SEQ ID NO: 52339 - DNA, 557 bp, Glycine max
  misc_feature (1)..(557): Ceres Seq. ID no. 14305840
aagaaataaaaagcgcttcattttcttgtcttctggtgcttatataatgacgtactagctagcctcatttttcttcatccttattatttctctctctttctttccctatattcattttctgtgctttgaaagatgactggggttcctcaagaagcacccgtttctcttgatcagctcaagcagatactggatgagtttgcaaaggagagggattgggagcagtatcatagcccaaggaacctccttttggctttggtgggtgaagtgggagaattgtctgagatatttcagtggaaaggggaggttccaaagggtcttccagattggaaagaagaggaaaaggttcatcttggtgaagagctttcagatgtgttgctttaccttgtgaggctctcagacatttgtggtgttgatcttggcaaagctgctctaagaaaggtccaactcaatgccataaaatacccaaaaaaggttaatgatgatgcaattactcaagatgctaattgatgataatccattggtgcctatggttgttgtagttgctattttagggggga

SEQ ID NO: 52340 - protein, 124 aa, Glycine max
  peptide (1)..(124): Ceres Seq. ID no. 14305841
  misc_feature (1)..(111): Homolog of NCBI NO: 32477343 NR Description: conserved hypothetical protein [Pirellula sp.]
  misc_feature (5)..(111): Homolog of NCBI NO: 33593049 NR Description: conserved hypothetical protein [Bordetella
  misc_feature (21)..(111): Homolog of NCBI NO: 34877104 NR Description: similar to RS21-C6 protein [Rattus norvegicus]
  misc_feature (11)..(111): Homolog of NCBI NO: 13129100 NR Description: hypothetical protein MGC5627 [Homo sapiens]
  misc_feature (11)..(111): Homolog of NCBI NO: 12963573 NR Description: RIKEN cDNA 2410015N17 [Mus musculus]
  misc_feature (11)..(111): Homolog of NCBI NO: 20302079 NR Description: RS21-C6 protein [Rattus norvegicus]
  misc_feature (11)..(118): Homolog of NCBI NO: 33468615 NR Description: SI:zC150A22.2 (novel protein) [Danio rerio]
  misc_feature (10)..(111): Homolog of NCBI NO: 32482945 NR Description: OSJNBb0072M01.10 [Oryza sativa (japonica
  misc_feature (8)..(111): Homolog of NCBI NO: 32352194 NR Description: hypothetical protein [Oryza sativa (japonica
  misc_feature (10)..(119): Homolog of NCBI NO: 30687841 NR Description: expressed protein [Arabidopsis thaliana]
MTGVPQEAPVSLDQLKQILDEFAKERDWEQYHSPRNLLLALVGEVGELSEIFQWKGEVPKGLPDWKEEEKVHLGEELSDVLLYLVRLSDICGVDLGKAALRKVQLNAIKYPKKVNDDAITQDAN

SEQ ID NO: 52341 - protein, 65 aa, Glycine max
  peptide (1)..(65): Ceres Seq. ID no. 14305842
MSLQRRGIGSSIIAQGTSFWLWWVKWENCLRYFSGKGRFQRVFQIGKKRKRFILVKSFQMCCFTL

SEQ ID NO: 52342 - DNA, 1165 bp, Glycine max
  misc_feature (1)..(1165): Ceres Seq. ID no. 14314999
agtgtatatctttacaagatggtgaatacgtaaaggaaatgtacatcttgtatcacaaattcaaattacatcgcctttgtcttgttcttggaaatcaaacatattactctaaattgccatgtgaaataattttgctcttgtttggcatttgacttaccttgtttgcttctctataaataccatactatccatatatagcatctatttcttacatatcacaattaactatcaacatccaattagggatttcgtgataatatggcttctacacttcatcgtgcattgtctcatttactcactcttgtagcttcactttcaatactccttgtgctcccttcctcttgtttcaatcccagaaagattgtcaatgcttcatacaactcaaacggtttatattggtcaccagctgtggccacttggtatggacctccccatggggatggaagtgaaggtggtgcttgtggttttggcagtgttgttggggtacctccattctcatcaatgatatctgcgggaagccctcttttgtttgaatcaggcaaaggatgtggtttttgttatgaggtgaagtgcacagggaattctggatgttcaggcaaccctgtgagggtagtgatcactgatgagtgtgctggatgctcggatgctcaattccattttgatttgagtggcactgcttttggtgccatggcagtttctggccaagatgaaaagctacgcaacgctggcaaaattgccattcaatatagaagagttgaatgcaactatcccggtgtatacatagcttttcacgtggacttaggatccaaccccgaatattttgcagtttgtgctgaatacgaggatgggaatggtgatcttgacaaagttgaactcaaggaagcattttcagcctcatggtattccatgcagcgatcatggggtgcaatttggaaactcagcaaaggttcaccacttaaagcaccattctccatcaggctaacagactctggcaaatctgttgtggctaacaatgtgatcccttcgggctggaaacctggccagacttatagatcaattgtgaattttagaatctaagttgtccattggtttggatcatcagcttgtagctctctccaacttaatgtaatatataaataagaagataaccctaatcttaatttct

SEQ ID NO: 52343 - protein, 272 aa, Glycine max
  peptide (1)..(272): Ceres Seq. ID no. 14315000
  misc_feature (175)..(255): Pfam Name: Pollen allergen Pfam Description: Pollen allergen
  misc_feature (44)..(270): Homolog of NCBI NO: 8118428 NR Description: beta-expansin [Oryza sativa]
  misc_feature (44)..(270): Homolog of NCBI NO: 16303229 NR Description: beta-expansin 5 [Oryza sativa]
  misc_feature (47)..(270): Homolog of NCBI NO: 16517013 NR Description: beta-expansin [Oryza sativa]
  misc_feature (11)..(270): Homolog of NCBI NO: 12082326 NR Description: beta-expansin [Atriplex lentiformis]
  misc_feature (12)..(270): Homolog of NCBI NO: 2190552 NR Description: Similar to Holcus major pollen allergen
  misc_feature (19)..(270): Homolog of NCBI NO: 21666630 NR Description: beta-expansin [Oryza sativa]
  misc_feature (12)..(261): Homolog of NCBI NO: 30697231 NR Description: beta-expansin, putative (EXBP2) [Arabidopsis
  misc_feature (12)..(261): Homolog of NCBI NO: 25404942 NR Description: protein F1E22.6 [imported] - Arabidopsis thaliana
  misc_feature (12)..(270): Homolog of NCBI NO: 20138423 NR Description: Putative beta-expansin 2 precursor (At-EXPB2)
  misc_feature (1)..(270): Homolog of NCBI NO: 1076486 NR Description: cim1 protein - soybean
MASTLHRALSHLLTLVASLSILLVLPSSCFNPRKIVNASYNSNGLYWSPAVATWYGPPHGDGSEGGACGFGSVVGVPPFSSMISAGSPLLFESGKGCGFCYEVKCTGNSGCSGNPVRVVITDECAGCSDAQFHFDLSGTAFGAMAVSGQDEKLRNAGKIAIQYRRVECNYPGVYIAFHVDLGSNPEYFAVCAEYEDGNGDLDKVELKEAFSASWYSMQRSWGAIWKLSKGSPLKAPFSIRLTDSGKSVVANNVIPSGWKPGQTYRSIVNFRI

SEQ ID NO: 52344 - protein, 191 aa, Glycine max
  peptide (1)..(191): Ceres Seq. ID no. 14315001
  misc_feature (94)..(174): Pfam Name: Pollen allergen Pfam Description: Pollen allergen
  misc_feature (1)..(189): Homolog of NCBI NO: 8118428 NR Description: beta-expansin [Oryza sativa]
  misc_feature (1)..(189): Homolog of NCBI NO: 16303229 NR Description: beta-expansin 5 [Oryza sativa]
  misc_feature (1)..(189): Homolog of NCBI NO: 16517013 NR Description: beta-expansin [Oryza sativa]
  misc_feature (1)..(189): Homolog of NCBI NO: 12082326 NR Description: beta-expansin [Atriplex lentiformis]
  misc_feature (1)..(189): Homolog of NCBI NO: 2190552 NR Description: Similar to Holcus major pollen allergen
  misc_feature (1)..(189): Homolog of NCBI NO: 21666630 NR Description: beta-expansin [Oryza sativa]
  misc_feature (1)..(180): Homolog of NCBI NO: 30697231 NR Description: beta-expansin, putative (EXBP2) [Arabidopsis
  misc_feature (1)..(180): Homolog of NCBI NO: 25404942 NR Description: protein F1E22.6 [imported] - Arabidopsis thaliana
  misc_feature (1)..(189): Homolog of NCBI NO: 20138423 NR Description: Putative beta-expansin 2 precursor (At-EXPB2)
  misc_feature (1)..(189): Homolog of NCBI NO: 1076486 NR Description: cim1 protein - soybean
MISAGSPLLFESGKGCGFCYEVKCTGNSGCSGNPVRVVITDECAGCSDAQFHFDLSGTAFGAMAVSGQDEKLRNAGKIAIQYRRVECNYPGVYIAFHVDLGSNPEYFAVCAEYEDGNGDLDKVELKEAFSASWYSMQRSWGAIWKLSKGSPLKAPFSIRLTDSGKSVVANNVIPSGWKPGQTYRSIVNFRI

SEQ ID NO: 52345 - DNA, 1232 bp, Glycine max
  misc_feature (1)..(1232): Ceres Seq. ID no. 14315045
tgcttgtaacagtattgttattactttgttgattgaaaaccattaaatataatgatttttacctaaactaattgtcatccatttaatataacacctttcaacaaggtatttttaggtgctggttttatttatttataatgattcgtccttctggactccctattctgcattttactactatcaaagatataaaattatttactcatcattttaaaaatggttgcttatcttgcgtgtttgcgtgctgtttactctgggtaagaattggtactgggaggcattttactgttcttctgcctaccattagtattataatagtttttaattaacaggaatctttgcttacttttttctttgacaggctgtgagagtagaacactgcgaacgagttcatgtaatcgtagcagcaaagcgtatttgtattgctaattgtcgtgaatgtgttttctttttgggagtgaaccagcaacctcttattcttggtgataatcataaactgcaggtggctccctataatacattttactcccaattggaaaagcatatgaatgaagttggaattgtgcccacagttaaccgatgggatgagcctctagcattgggcatggttgatccccatgattcattatctcatccagcaggtgtctctgatgttcaagctgagtctgctacacgggtggaccctgatcagttcactgattttgtgattccaaactggtttggaggagagtccactggggctacaaaaggcaacccattcacgttaccagatgcctatatggtatctcagcataaaaatcaaaaaaatttaggggagataaggcacctcttgcgagaagcacctttagaagatagtcgcaaacgagaattgtcatctgcacttcatgtctacttcaaggactggttatatgcttcaggaaacattcgtcagctttattgtttacaaggcgattgatctttgtcagacaatggaatggcacagttaatggtataggaacgaggtttctggtttcctttttgtacttcctcttcaattcctcttgccaattctattggcggcataggtagctgagatcaaatgaggtgaattagagtaaaacctatttatgccgtgacatcagcggtgcacagaatcaaatgaaaaatacagttgctaatctgattgtaatatttttttgtttgtgaaaataattactgtaatattttgttagcctaaattaatggcttttggg

SEQ ID NO: 52346 - protein, 136 aa, Glycine max
  peptide (1)..(136): Ceres Seq. ID no. 14315046
  misc_feature (1)..(122): Homolog of NCBI NO: 7452467 NR Description: hypothetical protein At2g42230 [imported] -
  misc_feature (1)..(136): Homolog of NCBI NO: 11280529 NR Description: hypothetical protein T10K17.100 - Arabidopsis
  misc_feature (1)..(136): Homolog of NCBI NO: 30688947 NR Description: expressed protein [Arabidopsis thaliana]
  misc_feature (1)..(136): Homolog of NCBI NO: 18410836 NR Description: expressed protein [Arabidopsis thaliana]
MNEVGIVPTVNRWDEPLALGMVDPHDSLSHPAGVSDVQAESATRVDPDQFTDFVIPNWFGGESTGATKGNPFTLPDAYMVSQHKNQKNLGEIRHLLREAPLEDSRKRELSSALHVYFKDWLYASGNIRQLYCLQGD

SEQ ID NO: 52347 - protein, 116 aa, Glycine max
  peptide (1)..(116): Ceres Seq. ID no. 14315047
  misc_feature (1)..(102): Homolog of NCBI NO: 7452467 NR Description: hypothetical protein At2g42230 [imported] -
  misc_feature (1)..(116): Homolog of NCBI NO: 11280529 NR Description: hypothetical protein T10K17.100 - Arabidopsis
  misc_feature (1)..(116): Homolog of NCBI NO: 30688947 NR Description: expressed protein [Arabidopsis thaliana]
  misc_feature (1)..(116): Homolog of NCBI NO: 18410836 NR Description: expressed protein [Arabidopsis thaliana]
MVDPHDSLSHPAGVSDVQAESATRVDPDQFTDFVIPNWFGGESTGATKGNPFTLPDAYMVSQHKNQKNLGEIRHLLREAPLEDSRKRELSSALHVYFKDWLYASGNIRQLYCLQGD

SEQ ID NO: 52348 - DNA, 1695 bp, Glycine max
  misc_feature (1)..(1695): Ceres Seq. ID no. 15171224
accatattcttgaacctcacacacatgtacagtagcatggctgcaaccaacgaagcagaagaagcagcaggaggcaaaagggtccaatacccactggactcttcctcctacaagctcctgaacgagatcggcgaaggcgtgagcgccgtcgtctacaaagccctctgcatccccatgaactccgccgccgtcgcaatcaaatccatcgacctcgaccgctcccggcccgacttagacgacgtccgtcgcgaggccaaaaccctatccctcctttcccaccccaacatcctcaaagcacactgttccttcaccgtggaccgccgcctctgggtggtgatgccgttcatggccgcaggatcacttcaatccatcatttctcattcccaccccaacggcttaacggagccctgcatcgccgtggttctcagagacacgctcaacgcactctcctacctccacggccagggccatctccacagagacattaaagccggtaacatcctcgtagacaccaatgggcaagtgaagctcgctgatttcggtgtctccgcttccatatacgagtccaccaccaccacgtcttcttcttcgtctctcaagttcaccgatgttgccggcacgccctattggatggctcctgaggtgattcactcacacacgggttacagtttcaaggctgatatatggtcctttgggataaccgcgttggagcttgcgcatggaaggcctcccctctcgcaccttccaccttccaagtccatgatgctcaagatcaccaagaggtttcgtttctccgatgatttcgatgacaagtataggaaggggaatgggaagaagttctctaaggcgttcaaggacatggtggcttcttgtctcgaccaagatccttccaagagacctactgctgataagttgctcaaacaccctttctttaagaactgtaagggaaccgattttctggtgaagaatgtgctgcaagggttgcccagtgtggagaaaaggtacagggagagcaagggtaatttgcatgaagatgatgatgatggtgatgatgatgatgatgatccctccatgcaggtgaagcagagaaggataagtgggtggaacttcaatcaagacggcttggaacttgaccctgtgtttccaaacgatgttaaagaggttcggtttggaggagaaacggttatccaacaagctgcaggaatggaaaaagtgaacaacaacagtagcagtagggaagggatgttggcgactctgaatgtattgaaagggagcctggagcaagagctgtggcaagtgaagtttctggtgaatacgatacaaggagatcatcacgacactcaagttcctgaggagcaggagatttctaggctgagggctcaattggaaaatgagaggatgaagaacttgcagttggagttgcagcttcagacctccaagctccaccagaaatctgattccaactaaaatctgattccaacgatcatacatctaccatatgtagaggaattctgtgtactttctgctcctgtaccacttatattatgtgtgtcaacgtcaatgtttgtatttttaattgaaagattaaatttctgttgtacggattaatgttacacttaccataattttttataatttgtcttttatctttttcttatcatactcatcttattcaaaacttttggcttatttcct

SEQ ID NO: 52349 - protein, 488 aa, Glycine max
  peptide (1)..(488): Ceres Seq. ID no. 15171225
  misc_feature (37)..(311): Pfam Name: Protein kinase domain Pfam Description: Protein kinase domain
  misc_feature (13)..(336): Homolog of NCBI NO: 30681538 NR Description: protein kinase family [Arabidopsis thaliana]
  misc_feature (13)..(336): Homolog of NCBI NO: 25407517 NR Description: hypothetical protein AT4g10730 [imported] -
  misc_feature (23)..(488): Homolog of NCBI NO: 22328895 NR Description: protein kinase family [Arabidopsis thaliana]
  misc_feature (23)..(488): Homolog of NCBI NO: 7487178 NR Description: hypothetical protein T19F6.90 - Arabidopsis
  misc_feature (23)..(436): Homolog of NCBI NO: 7485682 NR Description: hypothetical protein F17O7.3 - Arabidopsis
  misc_feature (25)..(384): Homolog of NCBI NO: 11358725 NR Description: protein kinase-like protein - Arabidopsis
  misc_feature (26)..(285): Homolog of NCBI NO: 29150394 NR Description: putative MAP kinase [Oryza sativa (japonica
  misc_feature (29)..(384): Homolog of NCBI NO: 17529280 NR Description: putative protein kinase [Arabidopsis thaliana]
  misc_feature (25)..(384): Homolog of NCBI NO: 30685021 NR Description: protein kinase family [Arabidopsis thaliana]
  misc_feature (27)..(382): Homolog of NCBI NO: 15233460 NR Description: protein kinase family [Arabidopsis thaliana]
TIFLNLTHMYSSMAATNEAEEAAGGKRVQYPLDSSSYKLLNEIGEGVSAVVYKALCIPMNSAAVAIKSIDLDRSRPDLDDVRREAKTLSLLSHPNILKAHCSFTVDRRLWVVMPFMAAGSLQSIISHSHPNGLTEPCIAVVLRDTLNALSYLHGQGHLHRDIKAGNILVDTNGQVKLADFGVSASIYESTTTTSSSSSLKFTDVAGTPYWMAPEVIHSHTGYSFKADIWSFGITALELAHGRPPLSHLPPSKSMMLKITKRFRFSDDFDDKYRKGNGKKFSKAFKDMVASCLDQDPSKRPTADKLLKHPFFKNCKGTDFLVKNVLQGLPSVEKRYRESKGNLHEDDDDGDDDDDDPSMQVKQRRISGWNFNQDGLELDPVFPNDVKEVRFGGETVIQQAAGMEKVNNNSSSREGMLATLNVLKGSLEQELWQVKFLVNTIQGDHHDTQVPEEQEISRLRAQLENERMKNLQLELQLQTSKLHQKSDSN

SEQ ID NO: 52350 - protein, 480 aa, Glycine max
  peptide (1)..(480): Ceres Seq. ID no. 15171226
  misc_feature (29)..(303): Pfam Name: Protein kinase domain Pfam Description: Protein kinase domain
  misc_feature (5)..(328): Homolog of NCBI NO: 30681538 NR Description: protein kinase family [Arabidopsis thaliana]
  misc_feature (5)..(328): Homolog of NCBI NO: 25407517 NR Description: hypothetical protein AT4g10730 [imported] -
  misc_feature (15)..(480): Homolog of NCBI NO: 22328895 NR Description: protein kinase family [Arabidopsis thaliana]
  misc_feature (15)..(480): Homolog of NCBI NO: 7487178 NR Description: hypothetical protein T19F6.90 - Arabidopsis
  misc_feature (15)..(428): Homolog of NCBI NO: 7485682 NR Description: hypothetical protein F17O7.3 - Arabidopsis
  misc_feature (17)..(376): Homolog of NCBI NO: 11358725 NR Description: protein kinase-like protein - Arabidopsis
  misc_feature (18)..(277): Homolog of NCBI NO: 29150394 NR Description: putative MAP kinase [Oryza sativa (japonica
  misc_feature (21)..(376): Homolog of NCBI NO: 17529280 NR Description: putative protein kinase [Arabidopsis thaliana]
  misc_feature (17)..(376): Homolog of NCBI NO: 30685021 NR Description: protein kinase family [Arabidopsis thaliana]
  misc_feature (19)..(374): Homolog of NCBI NO: 15233460 NR Description: protein kinase family [Arabidopsis thaliana]
MYSSMAATNEAEEAAGGKRVQYPLDSSSYKLLNEIGEGVSAVVYKALCIPMNSAAVAIKSIDLDRSRPDLDDVRREAKTLSLLSHPNILKAHCSFTVDRRLWVVMPFMAAGSLQSIISHSHPNGLTEPCIAVVLRDTLNALSYLHGQGHLHRDIKAGNILVDTNGQVKLADFGVSASIYESTTTTSSSSSLKFTDVAGTPYWMAPEVIHSHTGYSFKADIWSFGITALELAHGRPPLSHLPPSKSMMLKITKRFRFSDDFDDKYRKGNGKKFSKAFKDMVASCLDQDPSKRPTADKLLKHPFFKNCKGTDFLVKNVLQGLPSVEKRYRESKGNLHEDDDDGDDDDDDPSMQVKQRRISGWNFNQDGLELDPVFPNDVKEVRFGGETVIQQAAGMEKVNNNSSSREGMLATLNVLKGSLEQELWQVKFLVNTIQGDHHDTQVPEEQEISRLRAQLENERMKNLQLELQLQTSKLHQKSDSN

SEQ ID NO: 52351 - protein, 476 aa, Glycine max
  peptide (1)..(476): Ceres Seq. ID no. 15171227
  misc_feature (25)..(299): Pfam Name: Protein kinase domain Pfam Description: Protein kinase domain
  misc_feature (1)..(324): Homolog of NCBI NO: 30681538 NR Description: protein kinase family [Arabidopsis thaliana]
  misc_feature (1)..(324): Homolog of NCBI NO: 25407517 NR Description: hypothetical protein AT4g10730 [imported] -
  misc_feature (11)..(476): Homolog of NCBI NO: 22328895 NR Description: protein kinase family [Arabidopsis thaliana]
  misc_feature (11)..(476): Homolog of NCBI NO: 7487178 NR Description: hypothetical protein T19F6.90 - Arabidopsis
  misc_feature (11)..(424): Homolog of NCBI NO: 7485682 NR Description: hypothetical protein F17O7.3 - Arabidopsis
  misc_feature (13)..(372): Homolog of NCBI NO: 11358725 NR Description: protein kinase-like protein - Arabidopsis
  misc_feature (14)..(273): Homolog of NCBI NO: 29150394 NR Description: putative MAP kinase [Oryza sativa (japonica
  misc_feature (17)..(372): Homolog of NCBI NO: 17529280 NR Description: putative protein kinase [Arabidopsis thaliana]
  misc_feature (13)..(372): Homolog of NCBI NO: 30685021 NR Description: protein kinase family [Arabidopsis thaliana]
  misc_feature (15)..(370): Homolog of NCBI NO: 15233460 NR Description: protein kinase family [Arabidopsis thaliana]
MAATNEAEEAAGGKRVQYPLDSSSYKLLNEIGEGVSAVVYKALCIPMNSAAVAIKSIDLDRSRPDLDDVRREAKTLSLLSHPNILKAHCSFTVDRRLWVVMPFMAAGSLQSIISHSHPNGLTEPCIAVVLRDTLNALSYLHGQGHLHRDIKAGNILVDTNGQVKLADFGVSASIYESTTTTSSSSSLKFTDVAGTPYWMAPEVIHSHTGYSFKADIWSFGITALELAHGRPPLSHLPPSKSMMLKITKRFRFSDDFDDKYRKGNGKKFSKAFKDMVASCLDQDPSKRPTADKLLKHPFFKNCKGTDFLVKNVLQGLPSVEKRYRESKGNLHEDDDDGDDDDDDPSMQVKQRRISGWNFNQDGLELDPVFPNDVKEVRFGGETVIQQAAGMEKVNNNSSSREGMLATLNVLKGSLEQELWQVKFLVNTIQGDHHDTQVPEEQEISRLRAQLENERMKNLQLELQLQTSKLHQKSDSN

SEQ ID NO: 52352 - DNA, 1313 bp, Glycine max
  misc_feature (1)..(1313): Ceres Seq. ID no. 14314423
aaaaacaaccatttttattttagttttcctaccatttaaacttgtacttgtaattgcagttgtcacaatagtaattatctatacaatgaaaatgtagcttgtctcatcacttccatcctaagaagctgtaagtttttaatctcaagtttttgggtctcctggtgaaaacccatgttgaactagacccttttctggccagaatctcaccagtattaggcaactgtatctagattaatggtgtagtgtgctgatgccactgcttaacctgtaagaattgagcatgtcatggtgcggtctctcatgacccttggatccttccttgaaaagagttgataatctatcaatcattgttcttgattggaacaaattatcatcccagtgcccgaaacattttcccattacaaaaatctcaccatccttagtcttaataattgcgggttgactggaacatttccacataagatcttcaacattggaacattgtcggttattgacatatcttggaacaacaatctccatggtttcttgactgaatttccatccaggggatctccatgggaatccgaaaagaaaagaatggttatttatgccgcataacatttgtctgaagctccattcttcttagacaataatatcctttcatctcttccatgtcttcttcctctagttatgactacgatctccatgatgatgacgagatggactttctgcgtgatcggtacaaggaggacaacataaactatgatgtgtttttgagtttcagaggggaagacacgcgtgcttctttcacttcacatctctatacagctcttcacaacttgggaatctttgttttcaaggatgatgagacacttccaaggggaaataaaatttcaccctcgctgcggttagcaattgaagagtctcgactttctgttgttattttctctagaaactatgcagagtcgcggtggtgtttgaaagagttgcagaaaataatggagtgtcacagaacaacagggcaagtggtagtgccagtgttctatgatgtagatccctctgaagtacgtcatcaaacaggccactttggaaaagcatttcgaaaccttgagaacaaacttttaaaaggggaagaggaagaggaagagctacaacgatggtggaagacgcttgctgaggccgctggcatctcagggctttctgtagtccgaaattgcaagtaataaaaacacttccagctttctcgtatttttactgaacattgtctctggaattttagtttatgaaattcataacatgtacatgtatgaagtggtcaaagtgagattttggat

SEQ ID NO: 52353 - protein, 183 aa, Glycine max
  peptide (1)..(183): Ceres Seq. ID no. 14314424
  misc_feature (33)..(162): Pfam Name: TIR domain Pfam Description: TIR domain
  misc_feature (31)..(178): Homolog of NCBI NO: 3947735 NR Description: NL27 [Solanum tuberosum]
  misc_feature (31)..(178): Homolog of NCBI NO: 16944811 NR Description: resistance gene-like [Solanum tuberosum subsp.
  misc_feature (28)..(181): Homolog of NCBI NO: 15787897 NR Description: resistance gene analog NBS5 [Helianthus annuus]
  misc_feature (31)..(175): Homolog of NCBI NO: 23477203 NR Description: TIR-NBS disease resistance protein
  misc_feature (30)..(175): Homolog of NCBI NO: 40644191 NR Description: part I of G08 TIR/NBS/LRR protein [Populus
  misc_feature (31)..(175): Homolog of NCBI NO: 40644187 NR Description: TIR/NBS/LRR protein [Populus deltoides]
  misc_feature (30)..(181): Homolog of NCBI NO: 15787887 NR Description: resistance gene analog PU3 [Helianthus annuus]
  misc_feature (30)..(181): Homolog of NCBI NO: 15787895 NR Description: resistance gene analog NBS4 [Helianthus annuus]
  misc_feature (30)..(183): Homolog of NCBI NO: 15787901 NR Description: resistance gene analog NBS7 [Helianthus annuus]
  misc_feature (30)..(181): Homolog of NCBI NO: 25247262 NR Description: NBS-LRR resistance protein RAS5-1 [Helianthus
MSSSSSYDYDLHDDDEMDFLRDRYKEDNINYDVFLSFRGEDTRASFTSHLYTALHNLGIFVFKDDETLPRGNKISPSLRLAIEESRLSVVIFSRNYAESRWCLKELQKIMECHRTTGQVVVPVFYDVDPSEVRHQTGHFGKAFRNLENKLLKGEEEEEELQRWWKTLAEAAGISGLSVVRNCK

SEQ ID NO: 52354 - protein, 167 aa, Glycine max
  peptide (1)..(167): Ceres Seq. ID no. 14314425
  misc_feature (17)..(146): Pfam Name: TIR domain Pfam Description: TIR domain
  misc_feature (15)..(162): Homolog of NCBI NO: 3947735 NR Description: NL27 [Solanum tuberosum]
  misc_feature (15)..(162): Homolog of NCBI NO: 16944811 NR Description: resistance gene-like [Solanum tuberosum subsp.
  misc_feature (12)..(165): Homolog of NCBI NO: 15787897 NR Description: resistance gene analog NBS5 [Helianthus annuus]
  misc_feature (15)..(159): Homolog of NCBI NO: 23477203 NR Description: TIR-NBS disease resistance protein
  misc_feature (14)..(159): Homolog of NCBI NO: 40644191 NR Description: part I of G08 TIR/NBS/LRR protein [Populus
  misc_feature (15)..(159): Homolog of NCBI NO: 40644187 NR Description: TIR/NBS/LRR protein [Populus deltoides]
  misc_feature (14)..(165): Homolog of NCBI NO: 15787887 NR Description: resistance gene analog PU3 [Helianthus annuus]
  misc_feature (14)..(165): Homolog of NCBI NO: 15787895 NR Description: resistance gene analog NBS4 [Helianthus annuus]
  misc_feature (14)..(167): Homolog of NCBI NO: 15787901 NR Description: resistance gene analog NBS7 [Helianthus annuus]
  misc_feature (14)..(165): Homolog of NCBI NO: 25247262 NR Description: NBS-LRR resistance protein RAS5-1 [Helianthus
MDFLRDRYKEDNINYDVFLSFRGEDTRASFTSHLYTALHNLGIFVFKDDETLPRGNKISPSLRLAIEESRLSVVIFSRNYAESRWCLKELQKIMECHRTTGQVVVPVFYDVDPSEVRHQTGHFGKAFRNLENKLLKGEEEEEELQRWWKTLAEAAGISGLSVVRNCK

SEQ ID NO: 52355 - DNA, 1121 bp, Glycine max
  misc_feature (1)..(1121): Ceres Seq. ID no. 14314461
atcaacagcatattctagccatgtcaagtcctcagtgttttgagaatccaccaaaccttaactcggacatccatggagcaggaactgtccaagaacttggaggacttaattcctacgtcactggatcttccgattccaaattggcactcatcctggtttctgatgtttttgggtatgaagcaccaaaactaaggaaacttgcggacaaagtagcagcagctggattcttggttgttgttcctgatcttctgtatggtgattacattgttgaccttaataatcctcaatttgatcgagagtcatggcgaaaggctcatggaaaggataaggcatgtgaagacaccaaacctctaatttctgctctaaagagtaaaggtgttaaatccataggggctgcaggtttttgctggggaggggttgtggttgtgaaacttgcaatgtccactgatattcaggctgcagttattctgcatcctggtctaatcgcagataatgaatttaatgaggtcaggattcctattgctatactgggagctgaaatcgaccatcttttcccaccagaaaggttgaagcaaattgaagaaatgttgtctgtaaaagctgagtttgagagctttgtgaaactataccctggtgttagtcatggatggactttgcggtacaatgatgatgatgaagcaactgttaagagtgcaaaagaggcgcatcaagacatgttgaattggtttatcaagcacgtcaagtgaaaattgttttcaccaccagaagatgcctgtcattgatttgcagttaatttttttagtagcaaataaatattacttattattgaaaagggccaatttcatgtacaagatgtgtccaaagcggcccaaccaccatgatacaaaaattataatatcccaccagaatatcactagcatttctcttataataacaatactacaactgcctaagaaaaagatacagcatagacaaaagctgcactatgcggcttaactcctagccttcatgttattggtgtgacgtatccattgccaccgaatttactaatgattaattctcgttgaaaaatctgatgatgatcacttttaatgatatatatatgctattttttcttaaat

SEQ ID NO: 52356 - protein, 247 aa, Glycine max
  peptide (1)..(247): Ceres Seq. ID no. 14314462
  misc_feature (35)..(246): Pfam Name: Dienelactone hydrolase family Pfam Description: Dienelactone hydrolase family
  misc_feature (12)..(242): Homolog of NCBI NO: 6319267 NR Description: Hypothetical ORF; Yal049cp [Saccharomyces
  misc_feature (7)..(246): Homolog of NCBI NO: 38181938 NR Description: Unknown (protein for MGC:76315) [Silurana
  misc_feature (77)..(247): Homolog of NCBI NO: 40253308 NR Description: Endo-1,3;1,4-beta-D-glucanase precursor-like
  misc_feature (6)..(201): Homolog of NCBI NO: 8928122 NR Description: Endo-1,3;1,4-beta-D-glucanase precursor
  misc_feature (12)..(247): Homolog of NCBI NO: 40253306 NR Description: putative Endo-1,3;1,4-beta-D-glucanase precursor
  misc_feature (43)..(247): Homolog of NCBI NO: 9294513 NR Description: contains similarity to
  misc_feature (11)..(247): Homolog of NCBI NO: 40253303 NR Description: putative Endo-1,3;1,4-beta-D-glucanase precursor
  misc_feature (7)..(247): Homolog of NCBI NO: 24899687 NR Description: Unknown protein [Arabidopsis thaliana]
  misc_feature (7)..(247): Homolog of NCBI NO: 18403812 NR Description: expressed protein [Arabidopsis thaliana]
  misc_feature (7)..(247): Homolog of NCBI NO: 18403820 NR Description: expressed protein [Arabidopsis thaliana]
QQHILAMSSPQCFENPPNLNSDIHGAGTVQELGGLNSYVTGSSDSKLALILVSDVFGYEAPKLRKLADKVAAAGFLVVVPDLLYGDYIVDLNNPQFDRESWRKAHGKDKACEDTKPLISALKSKGVKSIGAAGFCWGGVVVVKLAMSTDIQAAVILHPGLIADNEFNEVRIPIAILGAEIDHLFPPERLKQIEEMLSVKAEFESFVKLYPGVSHGWTLRYNDDDEATVKSAKEAHQDMLNWFIKHVK

SEQ ID NO: 52357 - protein, 241 aa, Glycine max
  peptide (1)..(241): Ceres Seq. ID no. 14314463
  misc_feature (29)..(240): Pfam Name: Dienelactone hydrolase family Pfam Description: Dienelactone hydrolase family
  misc_feature (6)..(236): Homolog of NCBI NO: 6319267 NR Description: Hypothetical ORF; Yal049cp [Saccharomyces
  misc_feature (1)..(240): Homolog of NCBI NO: 38181938 NR Description: Unknown (protein for MGC:76315) [Silurana
  misc_feature (71)..(241): Homolog of NCBI NO: 40253308 NR Description: Endo-1,3;1,4-beta-D-glucanase precursor-like
  misc_feature (1)..(195): Homolog of NCBI NO: 8928122 NR Description: Endo-1,3;1,4-beta-D-glucanase precursor
  misc_feature (6)..(241): Homolog of NCBI NO: 40253306 NR Description: putative Endo-1,3;1,4-beta-D-glucanase precursor
  misc_feature (37)..(241): Homolog of NCBI NO: 9294513 NR Description: contains similarity to
  misc_feature (5)..(241): Homolog of NCBI NO: 40253303 NR Description: putative Endo-1,3;1,4-beta-D-glucanase precursor
  misc_feature (1)..(241): Homolog of NCBI NO: 24899687 NR Description: Unknown protein [Arabidopsis thaliana]
  misc_feature (1)..(241): Homolog of NCBI NO: 18403812 NR Description: expressed protein [Arabidopsis thaliana]
  misc_feature (1)..(241): Homolog of NCBI NO: 18403820 NR Description: expressed protein [Arabidopsis thaliana]
MSSPQCFENPPNLNSDIHGAGTVQELGGLNSYVTGSSDSKLALILVSDVFGYEAPKLRKLADKVAAAGFLVVVPDLLYGDYIVDLNNPQFDRESWRKAHGKDKACEDTKPLISALKSKGVKSIGAAGFCWGGVVVVKLAMSTDIQAAVILHPGLIADNEFNEVRIPIAILGAEIDHLFPPERLKQIEEMLSVKAEFESFVKLYPGVSHGWTLRYNDDDEATVKSAKEAHQDMLNWFIKHVK

SEQ ID NO: 52358 - DNA, 1263 bp, Glycine max
  misc_feature (1)..(1263): Ceres Seq. ID no. 14314442
atatatatactaggtagcacataagactatagataaataatgaagatgatcccttcttcagaatccctgctttccttttttgacttagatacttcttatgcaactatagtgaggctaagagttggtgcataattaatcaaaatgttggccatattccacaaagcttttgctcatccacctgaagagctgaacagtcctgcatcttacaaaggttccaagaagcctaaggttcctgaggaaactctcaaagatttcctttcccaccatcctcacaacacttgctccatgagctttggtgaagctgctgtgctagcttatgttcgtcctgatcaatccttctctcgtcatcaaaggttgttttgtgggattgataacatatactgtctcttcttggggagcttgaacaatttgtccctactcaacaagcaatatggattgtcaaagagtactgacgaggccatgtttgtgattgaagcttataagactctccgtgaccggggtccataccctgcagatcaagtggtcaaggaacttgatggcagttttgcttttgttgtctatgacagcaaggttggcagtgtctttgcagcactgggttctgatggaggagtgaagttgtattggggtattgcagctgatggatctgtggtgatctctgatgatctagaagtcataaaagagggttgtgccaaatcctttgctccctttccaacagggtgtatgtttcacagtgaaggaggtctgatgagttttgagcatccaatgaacaagttgaaggcaatgccaagggtggacagtgaaggggccatgtgtggggccaacttcaaagttgataagttcgccagagtcaacagcattcctcgagtgggaagtcaatctaattggatggaatgggaccaacattagcttagaaataaaaccttaggataatgtaaaataaaaaagtgccatctatgtatgttcctttcctaacttaccattctgaatttgttttgttttctgcttgcttgtgctgttttcccgtttccctttccggcattgtacatattgaattactttttcatacatgttaattgttcatcatggtacttgtgagtgagagagattaacacggttcaagtcaggaacttctgtatcacagtgttaagatcgatgcactgagtgggtcataggaattttaatgtaacatggatgacataatctacaaaaatggaaataaatggatgaacaagggcaaacttgagttactgcattcaatgtgtc

SEQ ID NO: 52359 - protein, 254 aa, Glycine max
  peptide (1)..(254): Ceres Seq. ID no. 14314443
MLAIFHKAFAHPPEELNSPASYKGSKKPKVPEETLKDFLSHHPHNTCSMSFGEAAVLAYVRPDQSFSRHQRLFCGIDNIYCLFLGSLNNLSLLNKQYGLSKSTDEAMFVIEAYKTLRDRGPYPADQVVKELDGSFAFVVYDSKVGSVFAALGSDGGVKLYWGIAADGSVVISDDLEVIKEGCAKSFAPFPTGCMFHSEGGLMSFEHPMNKLKAMPRVDSEGAMCGANFKVDKFARVNSIPRVGSQSNWMEWDQH

SEQ ID NO: 52360 - protein, 206 aa, Glycine max
  peptide (1)..(206): Ceres Seq. ID no. 14314444
MSFGEAAVLAYVRPDQSFSRHQRLFCGIDNIYCLFLGSLNNLSLLNKQYGLSKSTDEAMFVIEAYKTLRDRGPYPADQVVKELDGSFAFVVYDSKVGSVFAALGSDGGVKLYWGIAADGSVVISDDLEVIKEGCAKSFAPFPTGCMFHSEGGLMSFEHPMNKLKAMPRVDSEGAMCGANFKVDKFARVNSIPRVGSQSNWMEWDQH

SEQ ID NO: 52361 - protein, 148 aa, Glycine max
  peptide (1)..(148): Ceres Seq. ID no. 14314445
MFVIEAYKTLRDRGPYPADQVVKELDGSFAFVVYDSKVGSVFAALGSDGGVKLYWGIAADGSVVISDDLEVIKEGCAKSFAPFPTGCMFHSEGGLMSFEHPMNKLKAMPRVDSEGAMCGANFKVDKFARVNSIPRVGSQSNWMEWDQH

SEQ ID NO: 52362 - DNA, 1567 bp, Glycine max
  misc_feature (1)..(1567): Ceres Seq. ID no. 14314480
aacaagcatacatatcatatctttgattcagcttccaaacgcgccattcccatttctctctctctgcttcttcttcagatacctaacctaatctcccaaacaaacaaaccaactcaaccttatcaatatcgtttaaataaattttgatcgcgcacgcgctttgagatagatcatgctgcgtttgtgctacggccctctggattgctgcttcggacgccgtggtggccgcgccgccgacggacttctctggcacaccgacttgaagccccacgcctccggcgacttctccatcgccgtcgcccaggcgaattacagtcttgaggatcagagccaagtcttcacctccccctccgccacctacgtcggcgtctacgacggccacggcggccccgaagcttccagattcgtcaacaagcgtctcttcccttatttgcacaaattcgccactgagcaagggggtttgtcagtggatgtgattaaaaaggcgttcagtgccacagaggaggaattcttgcatttggtgaagctatccatgcccattagtccccagattgcttccgtcggatcctgttgcctttttggtgcaatttctaataatgtgttgtatgttgcaaaccttggagactcgagagctgttcttggcaggagggatacagagagaaagaacagtccggtggtggcacagcgtttgtcaactgatcataatgtagctgatgaggaggtgagaaaagaagttgaagctctccatcccgatgactcacacattgtggtttatagccgtggagtttggaggattaagggcattatacaggtgtcaagatctattggtgatgtgtatttgaagaaaccagatttctaccgtgacctgggttttcagcagtttggaaatcctattcctttgaagcgttctgtaatgacagctgaaccatcaatcattattagggagcttgagtcagaggatttattcttgatatttgcatcagatggcctctgggaacaattaagtgatgaggctgcggttcagatcgttttcaaacatccaagagctggaattgccaagagactggtgagagctgctcttcatgaagctgcaaagaagagagagatgagatacgatgacataaagaaaattgacaaaggaataagacgacacttccatgatgatatcactgtggttgtaatctatcttgatcaccatgcaggctcctctaagcaaactgctgttggctatacaactgccccagttgatattttttccctaaatgcggatgggatgcttggtacagttgcctaagagtgaaattgcttcaaaggatcatacactgacattatttggggcaaaaattatttataggtgaagattaatattgttggtaaatgaagggaattcttgagaaaaatatacaaaaaattactgcatagatatagtagctgggagttgctgacagattctttctggtgcagatatgcatttgtatagttgtgaagtttattttttgggtttgatggtatcaattttgtttttctttggaaagaaagaaaataaaattatattgattggttagcc

SEQ ID NO: 52363 - protein, 373 aa, Glycine max
  peptide (1)..(373): Ceres Seq. ID no. 14314481
  misc_feature (38)..(311): Pfam Name: Protein phosphatase 2C Pfam Description: Protein phosphatase 2C
  misc_feature (20)..(341): Homolog of NCBI NO: 9759303 NR Description: protein phosphatase 2C-like [Arabidopsis thaliana]
  misc_feature (17)..(341): Homolog of NCBI NO: 38346816 NR Description: OSJNBa0088A01.23 [Oryza sativa (japonica
  misc_feature (22)..(340): Homolog of NCBI NO: 15239244 NR Description: protein phosphatase 2C-related protein
  misc_feature (22)..(346): Homolog of NCBI NO: 20340237 NR Description: protein phosphatase 2c-like protein
  misc_feature (22)..(346): Homolog of NCBI NO: 11282001 NR Description: protein phosphatase 2C-like protein - Arabidopsis
  misc_feature (1)..(340): Homolog of NCBI NO: 34915296 NR Description: protein phosphatase 2C-like
  misc_feature (1)..(340): Homolog of NCBI NO: 33147010 NR Description: protein phosphatase 2C-like
  misc_feature (14)..(366): Homolog of NCBI NO: 26006493 NR Description: Putative protein phosphatase
  misc_feature (11)..(372): Homolog of NCBI NO: 14488375 NR Description: putative protein phosphatase
  misc_feature (1)..(366): Homolog of NCBI NO: 15235152 NR Description: expressed protein [Arabidopsis thaliana]
MLRLCYGPLDCCFGRRGGRAADGLLWHTDLKPHASGDFSIAVAQANYSLEDQSQVFTSPSATYVGVYDGHGGPEASRFVNKRLFPYLHKFATEQGGLSVDVIKKAFSATEEEFLHLVKLSMPISPQIASVGSCCLFGAISNNVLYVANLGDSRAVLGRRDTERKNSPVVAQRLSTDHNVADEEVRKEVEALHPDDSHIVVYSRGVWRIKGIIQVSRSIGDVYLKKPDFYRDLGFQQFGNPIPLKRSVMTAEPSIIIRELESEDLFLIFASDGLWEQLSDEAAVQIVFKHPRAGIAKRLVRAALHEAAKKREMRYDDIKKIDKGIRRHFHDDITVVVIYLDHHAGSSKQTAVGYTTAPVDIFSLNADGMLGTVA

SEQ ID NO: 52364 - protein, 253 aa, Glycine max
  peptide (1)..(253): Ceres Seq. ID no. 14314482
  misc_feature (1)..(191): Pfam Name: Protein phosphatase 2C Pfam Description: Protein phosphatase 2C
  misc_feature (1)..(221): Homolog of NCBI NO: 9759303 NR Description: protein phosphatase 2C-like [Arabidopsis thaliana]
  misc_feature (1)..(221): Homolog of NCBI NO: 38346816 NR Description: OSJNBa0088A01.23 [Oryza sativa (japonica
  misc_feature (1)..(220): Homolog of NCBI NO: 15239244 NR Description: protein phosphatase 2C-related protein
  misc_feature (1)..(226): Homolog of NCBI NO: 20340237 NR Description: protein phosphatase 2c-like protein
  misc_feature (1)..(226): Homolog of NCBI NO: 11282001 NR Description: protein phosphatase 2C-like protein - Arabidopsis
  misc_feature (1)..(220): Homolog of NCBI NO: 34915296 NR Description: protein phosphatase 2C-like
  misc_feature (1)..(220): Homolog of NCBI NO: 33147010 NR Description: protein phosphatase 2C-like
  misc_feature (1)..(246): Homolog of NCBI NO: 26006493 NR Description: Putative protein phosphatase
  misc_feature (1)..(252): Homolog of NCBI NO: 14488375 NR Description: putative protein phosphatase
  misc_feature (1)..(246): Homolog of NCBI NO: 15235152 NR Description: expressed protein [Arabidopsis thaliana]
MPISPQIASVGSCCLFGAISNNVLYVANLGDSRAVLGRRDTERKNSPVVAQRLSTDHNVADEEVRKEVEALHPDDSHIVVYSRGVWRIKGIIQVSRSIGDVYLKKPDFYRDLGFQQFGNPIPLKRSVMTAEPSIIIRELESEDLFLIFASDGLWEQLSDEAAVQIVFKHPRAGIAKRLVRAALHEAAKKREMRYDDIKKIDKGIRRHFHDDITVVVIYLDHHAGSSKQTAVGYTTAPVDIFSLNADGMLGTVA

SEQ ID NO: 52365 - DNA, 527 bp, Glycine max
  misc_feature (1)..(527): Ceres Seq. ID no. 14305801
atttgcaggtcctcctcatatacagtacaaacttcagctggtagatagtgcttccaaatggagaagaaaaggaagactttactattgctgctgctcatggctgcaactctcttctgcatgccaattgtgtcgtatgctgtttctagtgtcaacattcaaggtcatctcacccattctgagctggtaaaaggtcccaatagaaggcttttgccatttgtggattgtggagcgaggtgcagggtgaggtgcagtttgcactcaaggccaaaaatttgctcaagagcttgcgggacatgctgtttcaggtgcaggtgtgttcctccaggcacttacgggaacagagagatgtgtggcaagtgttacactgacatgatcactcatggcaacaaacctaagtgcccctaaacctgtgcatgcatgcccatgtgtgtctacaccttatgatgtttatcactagttaacacaaatttgaattcccatttttttgttttttctaccttaatttcttaatgcattgtgtttctcat

SEQ ID NO: 52366 - protein, 115 aa, Glycine max
  peptide (1)..(115): Ceres Seq. ID no. 14305802
  misc_feature (54)..(115): Pfam Name: Gibberellin regulated protein Pfam Description: Gibberellin regulated protein
  misc_feature (54)..(115): Homolog of NCBI NO: 25313155 NR Description: protein F10A5.6 [imported] - Arabidopsis thaliana
  misc_feature (54)..(115): Homolog of NCBI NO: 21592790 NR Description: unknown [Arabidopsis thaliana]
  misc_feature (54)..(115): Homolog of NCBI NO: 15242165 NR Description: expressed protein [Arabidopsis thaliana]
  misc_feature (54)..(115): Homolog of NCBI NO: 5102600 NR Description: GEG protein [Gerbera hybrid cultivar]
  misc_feature (45)..(115): Homolog of NCBI NO: 2792297 NR Description: GAST-like gene product [Fragaria x ananassa]
  misc_feature (12)..(115): Homolog of NCBI NO: 887939 NR Description: GAST1 protein homolog
  misc_feature (12)..(115): Homolog of NCBI NO: 22530936 NR Description: expressed protein [Arabidopsis thaliana]
  misc_feature (12)..(115): Homolog of NCBI NO: 18410924 NR Description: GAST1 protein homolog [Arabidopsis thaliana]
  misc_feature (54)..(115): Homolog of NCBI NO: 14625945 NR Description: snakin2 [Solanum tuberosum]
  misc_feature (54)..(115): Homolog of NCBI NO: 2253442 NR Description: LTCOR11 [Lavatera thuringiaca]
MEKKRKTLLLLLLMAATLFCMPIVSYAVSSVNIQGHLTHSELVKGPNRRLLPFVDCGARCRVRCSLHSRPKICSRACGTCCFRCRCVPPGTYGNREMCGKCYTDMITHGNKPKCP

SEQ ID NO: 52367 - protein, 102 aa, Glycine max
  peptide (1)..(102): Ceres Seq. ID no. 14305803
  misc_feature (41)..(102): Pfam Name: Gibberellin regulated protein Pfam Description: Gibberellin regulated protein
  misc_feature (41)..(102): Homolog of NCBI NO: 25313155 NR Description: protein F10A5.6 [imported] - Arabidopsis thaliana
  misc_feature (41)..(102): Homolog of NCBI NO: 15242165 NR Description: expressed protein [Arabidopsis thaliana]
  misc_feature (41)..(102): Homolog of NCBI NO: 21592790 NR Description: unknown [Arabidopsis thaliana]
  misc_feature (41)..(102): Homolog of NCBI NO: 5102600 NR Description: GEG protein [Gerbera hybrid cultivar]
  misc_feature (32)..(102): Homolog of NCBI NO: 2792297 NR Description: GAST-like gene product [Fragaria x ananassa]
  misc_feature (1)..(102): Homolog of NCBI NO: 887939 NR Description: GAST1 protein homolog
  misc_feature (1)..(102): Homolog of NCBI NO: 22530936 NR Description: expressed protein [Arabidopsis thaliana]
  misc_feature (1)..(102): Homolog of NCBI NO: 18410924 NR Description: GAST1 protein homolog [Arabidopsis thaliana]
  misc_feature (41)..(102): Homolog of NCBI NO: 14625945 NR Description: snakin2 [Solanum tuberosum]
  misc_feature (41)..(102): Homolog of NCBI NO: 2253442 NR Description: LTCOR11 [Lavatera thuringiaca]
MAATLFCMPIVSYAVSSVNIQGHLTHSELVKGPNRRLLPFVDCGARCRVRCSLHSRPKICSRACGTCCFRCRCVPPGTYGNREMCGKCYTDMITHGNKPKCP

SEQ ID NO: 52368 - protein, 95 aa, Glycine max
  peptide (1)..(95): Ceres Seq. ID no. 14305804
  misc_feature (34)..(95): Pfam Name: Gibberellin regulated protein Pfam Description: Gibberellin regulated protein
  misc_feature (34)..(95): Homolog of NCBI NO: 25313155 NR Description: protein F10A5.6 [imported] - Arabidopsis thaliana
  misc_feature (34)..(95): Homolog of NCBI NO: 21592790 NR Description: unknown [Arabidopsis thaliana]
  misc_feature (34)..(95): Homolog of NCBI NO: 15242165 NR Description: expressed protein [Arabidopsis thaliana]
  misc_feature (34)..(95): Homolog of NCBI NO: 5102600 NR Description: GEG protein [Gerbera hybrid cultivar]
  misc_feature (25)..(95): Homolog of NCBI NO: 2792297 NR Description: GAST-like gene product [Fragaria x ananassa]
  misc_feature (1)..(95): Homolog of NCBI NO: 887939 NR Description: GAST1 protein homolog
  misc_feature (1)..(95): Homolog of NCBI NO: 22530936 NR Description: expressed protein [Arabidopsis thaliana]
  misc_feature (1)..(95): Homolog of NCBI NO: 18410924 NR Description: GAST1 protein homolog [Arabidopsis thaliana]
  misc_feature (34)..(95): Homolog of NCBI NO: 14625945 NR Description: snakin2 [Solanum tuberosum]
  misc_feature (34)..(95): Homolog of NCBI NO: 2253442 NR Description: LTCOR11 [Lavatera thuringiaca]
MPIVSYAVSSVNIQGHLTHSELVKGPNRRLLPFVDCGARCRVRCSLHSRPKICSRACGTCCFRCRCVPPGTYGNREMCGKCYTDMITHGNKPKCP

SEQ ID NO: 52369 - DNA, 1316 bp, Glycine max
  misc_feature (1)..(1316): Ceres Seq. ID no. 14314471
atggttttgcaataatcgaaagcaattgaaattgtcctaaggtaaggtgtttgaatgcttacatacatagattaaggattttaggaccaaagagggagtcatgaatgtgacaaacaaaccaaacccatatggttccaccaatgggtttcagtctcagcttcaacaaaatgggtgggaacagggatcatctagactcagacccactaagctttaccctgcaccaacggctggctaccaggacattgttcgtgatgcaaacctcttctggggaacgcttcaagcttttcacaaaacacttggcaccaaatataagatttctactgtgggaggaacgccacttgatctacatcgtctttttgtcgaagttacatctcgcggtgggattgaaaaggtgattgttgatcgtaagtggaaggaagtgattctgaccttcaatttcaaagataccataaccaatgcatcatttatggtgcgcaaatcctacctctcgatgctttatcactttgagcaagtgtattattttgggaggcaaggcattcctcccacaacacctgatcttatgattagaggccaatcatgccaaccctatagctccacaaccattccagaagttgctgctgtgaatgattcacctgttcagagtactccagtacaggcacatgatgatatggtttctggaacaattgatgcgaaatttgatgttggatatgtagttacagtgactctaggttctgagcagctgcaaggtgtcctgtttcatgttcctgataacgtgtcccagagttctcatgccgaaggcacatctagttcacagaatcttggtgatgacacgtctaatttacagagtcgaaagagagcaaaatatgcaccacgtgatccatttcggccaaagtcaaacaggagcggttacaactttttctttgctgaaaattatgccaggctgaagccctcgtatcatgggcaggagagagcaattagtaagaggattgggtttctgtggaacaatctgtcagaagcagaaagacaggtttatcaagagaaagggataagagataaggaaagatacaggactgaactgatggagtacaaatccaataattcaactccaaatgctcaataggctgttttatgtaatccttagactgtcatttcatatgcttcatctgttgttcttttcatgcctttgctatagttaattttcttatccattctacagagaaacttagaagagtagctttgtgacaattctggtgtaaattatgctgaatggttttaataaacatcttgtagcggttaattcattgtagttactcttg

SEQ ID NO: 52370 - protein, 339 aa, Glycine max
  peptide (1)..(339): Ceres Seq. ID no. 14314472
  misc_feature (48)..(145): Pfam Name: ARID/BRIGHT DNA binding domain Pfam Description: ARID/BRIGHT DNA binding domain
  misc_feature (45)..(75): Homolog of NCBI NO: 25405992 NR Description: protein F20N2.8 [imported] - Arabidopsis thaliana
  misc_feature (103)..(141): Homolog of NCBI NO: 25405992 NR Description: protein F20N2.8 [imported] - Arabidopsis thaliana
  misc_feature (248)..(331): Homolog of NCBI NO: 25405992 NR Description: protein F20N2.8 [imported] - Arabidopsis thaliana
  misc_feature (191)..(330): Homolog of NCBI NO: 15220344 NR Description: expressed protein [Arabidopsis thaliana]
  misc_feature (41)..(230): Homolog of NCBI NO: 15220344 NR Description: expressed protein [Arabidopsis thaliana]
  misc_feature (190)..(292): Homolog of NCBI NO: 15222755 NR Description: hypothetical protein [Arabidopsis thaliana]
  misc_feature (248)..(331): Homolog of NCBI NO: 15222755 NR Description: hypothetical protein [Arabidopsis thaliana]
  misc_feature (45)..(141): Homolog of NCBI NO: 15222755 NR Description: hypothetical protein [Arabidopsis thaliana]
  misc_feature (34)..(330): Homolog of NCBI NO: 15222957 NR Description: expressed protein [Arabidopsis thaliana]
  misc_feature (43)..(335): Homolog of NCBI NO: 18399977 NR Description: expressed protein [Arabidopsis thaliana]
MNVTNKPNPYGSTNGFQSQLQQNGWEQGSSRLRPTKLYPAPTAGYQDIVRDANLFWGTLQAFHKTLGTKYKISTVGGTPLDLHRLFVEVTSRGGIEKVIVDRKWKEVILTFNFKDTITNASFMVRKSYLSMLYHFEQVYYFGRQGIPPTTPDLMIRGQSCQPYSSTTIPEVAAVNDSPVQSTPVQAHDDMVSGTIDAKFDVGYVVTVTLGSEQLQGVLFHVPDNVSQSSHAEGTSSSQNLGDDTSNLQSRKRAKYAPRDPFRPKSNRSGYNFFFAENYARLKPSYHGQERAISKRIGFLWNNLSEAERQVYQEKGIRDKERYRTELMEYKSNNSTPNAQ

SEQ ID NO: 52371 - protein, 217 aa, Glycine max
  peptide (1)..(217): Ceres Seq. ID no. 14314473
  misc_feature (141)..(208): Pfam Name: HMG (high mobility group) box Pfam Description: HMG (high mobility group) box
  misc_feature (68)..(170): Homolog of NCBI NO: 25405992 NR Description: protein F20N2.8 [imported] - Arabidopsis thaliana
  misc_feature (1)..(19): Homolog of NCBI NO: 25405992 NR Description: protein F20N2.8 [imported] - Arabidopsis thaliana
  misc_feature (126)..(209): Homolog of NCBI NO: 25405992 NR Description: protein F20N2.8 [imported] - Arabidopsis thaliana
  misc_feature (69)..(208): Homolog of NCBI NO: 15220344 NR Description: expressed protein [Arabidopsis thaliana]
  misc_feature (1)..(108): Homolog of NCBI NO: 15220344 NR Description: expressed protein [Arabidopsis thaliana]
  misc_feature (68)..(170): Homolog of NCBI NO: 15222755 NR Description: hypothetical protein [Arabidopsis thaliana]
  misc_feature (126)..(209): Homolog of NCBI NO: 15222755 NR Description: hypothetical protein [Arabidopsis thaliana]
  misc_feature (1)..(19): Homolog of NCBI NO: 15222755 NR Description: hypothetical protein [Arabidopsis thaliana]
  misc_feature (1)..(208): Homolog of NCBI NO: 15222957 NR Description: expressed protein [Arabidopsis thaliana]
  misc_feature (1)..(213): Homolog of NCBI NO: 18399977 NR Description: expressed protein [Arabidopsis thaliana]
MVRKSYLSMLYHFEQVYYFGRQGIPPTTPDLMIRGQSCQPYSSTTIPEVAAVNDSPVQSTPVQAHDDMVSGTIDAKFDVGYVVTVTLGSEQLQGVLFHVPDNVSQSSHAEGTSSSQNLGDDTSNLQSRKRAKYAPRDPFRPKSNRSGYNFFFAENYARLKPSYHGQERAISKRIGFLWNNLSEAERQVYQEKGIRDKERYRTELMEYKSNNSTPNAQ

SEQ ID NO: 52372 - protein, 209 aa, Glycine max
  peptide (1)..(209): Ceres Seq. ID no. 14314474
  misc_feature (133)..(200): Pfam Name: HMG (high mobility group) box Pfam Description: HMG (high mobility group) box
  misc_feature (60)..(162): Homolog of NCBI NO: 25405992 NR Description: protein F20N2.8 [imported] - Arabidopsis thaliana
  misc_feature (1)..(11): Homolog of NCBI NO: 25405992 NR Description: protein F20N2.8 [imported] - Arabidopsis thaliana
  misc_feature (118)..(201): Homolog of NCBI NO: 25405992 NR Description: protein F20N2.8 [imported] - Arabidopsis thaliana
  misc_feature (61)..(200): Homolog of NCBI NO: 15220344 NR Description: expressed protein [Arabidopsis thaliana]
  misc_feature (1)..(100): Homolog of NCBI NO: 15220344 NR Description: expressed protein [Arabidopsis thaliana]
  misc_feature (60)..(162): Homolog of NCBI NO: 15222755 NR Description: hypothetical protein [Arabidopsis thaliana]
  misc_feature (118)..(201): Homolog of NCBI NO: 15222755 NR Description: hypothetical protein [Arabidopsis thaliana]
  misc_feature (1)..(11): Homolog of NCBI NO: 15222755 NR Description: hypothetical protein [Arabidopsis thaliana]
  misc_feature (1)..(200): Homolog of NCBI NO: 15222957 NR Description: expressed protein [Arabidopsis thaliana]
  misc_feature (1)..(205): Homolog of NCBI NO: 18399977 NR Description: expressed protein [Arabidopsis thaliana]
MLYHFEQVYYFGRQGIPPTTPDLMIRGQSCQPYSSTTIPEVAAVNDSPVQSTPVQAHDDMVSGTIDAKFDVGYVVTVTLGSEQLQGVLFHVPDNVSQSSHAEGTSSSQNLGDDTSNLQSRKRAKYAPRDPFRPKSNRSGYNFFFAENYARLKPSYHGQERAISKRIGFLWNNLSEAERQVYQEKGIRDKERYRTELMEYKSNNSTPNAQ

SEQ ID NO: 52373 - DNA, 1625 bp, Glycine max
  misc_feature (1)..(1625): Ceres Seq. ID no. 15177870
agtttgggttaagtagtgaggtttcttcttataagctattgcctttccgcaattggcttctccactgactcaattctatagtctagcttctctctctttcttatcacatatgccaaatccaattttgacccgcaatagactttcaatattctaatgctactttacttcatcacttgcatctccttcttcttgtttttaaagtccctccttctcaagcctctcccatcatgggcatctgagatgtggctgtttccccttttgttttctcaagagttttctatgagcacaatctccaagctgttcaggaaccggttttggattggttttctgtgtcaaattcccataggaatgtctctggtgaggaagagtctgacttcaagagtggagaatgttgaggaaagccttgacatgtcagtgttggacttgcctgagttggccttggattgcattcttgagaggcttcccccctcttcgctgtgtcgaatcgccgccgtgtgccgcaccttgagggagaggtgtgtgagtgatcacctttgggagaagcacatgaggaagaagtggggtagagttattggccctgctgcttatagggagtggaaatggcatgttgcttccaaaaggaatgttgggggtcttaaacatggcaggcaaaagggtttgatgagatttatgtctcttcattggcctttccaatggattagaccaaaggttgatgcaaattataataacccaaagctgaggagctctctgcctgttgactcagtcatgaactggtatcttgctcttgagtctggcaatttttggttccctgctcaagtctataaccgtgagaatggtcatgttggattcatgctatcttgctatgatgctgaacttagctatgatccgcgaactgatacctttcaagccagatatcctccacatggaagaagggcagatgctagagagtgtggcatcccatgggaaaggctaagagcacctcctattgatacttctccgcatgatcttcatgtctccgactgtttaaatgatttgtatccgggtgatcacatagagattcaatggaggagaaacaaagaatttccttatggttggtggtatggtgttgtaggccacttggagtcatgcaatgggagtgaaaattattgccgatgtcatagtagtgacactgtggtgctagagttcaatcattacactcctggctcacgatggaggctgaccactgtcagtaggaaagatcatagggaggaggggaacgaggctgatggattttatggcggaataagaaagattaccagcgaggctgagattgccacttggaaatgcctttggccatctgaagtcttggattagtaggcactagcactggatctgatcaaattctctacaacttagcatgatttcaatatagaagctttgtttcagaaactgaagcattgactggttctggattatacatggcaatatacaacctgaagtggacttcagttcagatatttaggccaacccgattttcttctcttttttgtcacattttttcatgaaaaaatttatgcatattcatgtggtttccctcattgtaaattgttcatttaagcacaaatgtagaatattcattccactat

SEQ ID NO: 52374 - protein, 399 aa, Glycine max
  peptide (1)..(399): Ceres Seq. ID no. 15177871
  misc_feature (88)..(133): Pfam Name: F-box domain Pfam Description: F-box domain
  misc_feature (86)..(127): Homolog of NCBI NO: 7459607 NR Description: hypothetical protein At2g41170 [imported] -
  misc_feature (200)..(336): Homolog of NCBI NO: 7459607 NR Description: hypothetical protein At2g41170 [imported] -
  misc_feature (86)..(313): Homolog of NCBI NO: 7487431 NR Description: hypothetical protein At2g32560 [imported] -
  misc_feature (338)..(399): Homolog of NCBI NO: 34909060 NR Description: P0702B09.33 [Oryza sativa (japonica
  misc_feature (78)..(312): Homolog of NCBI NO: 34909060 NR Description: P0702B09.33 [Oryza sativa (japonica
  misc_feature (338)..(399): Homolog of NCBI NO: 15225802 NR Description: F-box protein family [Arabidopsis thaliana]
  misc_feature (86)..(312): Homolog of NCBI NO: 15225802 NR Description: F-box protein family [Arabidopsis thaliana]
  misc_feature (70)..(399): Homolog of NCBI NO: 30688559 NR Description: F-box protein family [Arabidopsis thaliana]
  misc_feature (86)..(399): Homolog of NCBI NO: 30685347 NR Description: F-box protein family [Arabidopsis thaliana]
  misc_feature (87)..(399): Homolog of NCBI NO: 34903372 NR Description: unnamed protein product [Oryza sativa (japonica
MLLYFITCISFFLFLKSLLLKPLPSWASEMWLFPLLFSQEFSMSTISKLFRNRFWIGFLCQIPIGMSLVRKSLTSRVENVEESLDMSVLDLPELALDCILERLPPSSLCRIAAVCRTLRERCVSDHLWEKHMRKKWGRVIGPAAYREWKWHVASKRNVGGLKHGRQKGLMRFMSLHWPFQWIRPKVDANYNNPKLRSSLPVDSVMNWYLALESGNFWFPAQVYNRENGHVGFMLSCYDAELSYDPRTDTFQARYPPHGRRADARECGIPWERLRAPPIDTSPHDLHVSDCLNDLYPGDHIEIQWRRNKEFPYGWWYGVVGHLESCNGSENYCRCHSSDTVVLEFNHYTPGSRWRLTTVSRKDHREEGNEADGFYGGIRKITSEAEIATWKCLWPSEVLD

SEQ ID NO: 52375 - protein, 370 aa, Glycine max
  peptide (1)..(370): Ceres Seq. ID no. 15177872
  misc_feature (59)..(104): Pfam Name: F-box domain Pfam Description: F-box domain
  misc_feature (57)..(98): Homolog of NCBI NO: 7459607 NR Description: hypothetical protein At2g41170 [imported] -
  misc_feature (171)..(307): Homolog of NCBI NO: 7459607 NR Description: hypothetical protein At2g41170 [imported] -
  misc_feature (57)..(284): Homolog of NCBI NO: 7487431 NR Description: hypothetical protein At2g32560 [imported] -
  misc_feature (309)..(370): Homolog of NCBI NO: 34909060 NR Description: P0702B09.33 [Oryza sativa (japonica
  misc_feature (49)..(283): Homolog of NCBI NO: 34909060 NR Description: P0702B09.33 [Oryza sativa (japonica
  misc_feature (309)..(370): Homolog of NCBI NO: 15225802 NR Description: F-box protein family [Arabidopsis thaliana]
  misc_feature (57)..(283): Homolog of NCBI NO: 15225802 NR Description: F-box protein family [Arabidopsis thaliana]
  misc_feature (41)..(370): Homolog of NCBI NO: 30688559 NR Description: F-box protein family [Arabidopsis thaliana]
  misc_feature (57)..(370): Homolog of NCBI NO: 30685347 NR Description: F-box protein family [Arabidopsis thaliana]
  misc_feature (58)..(370): Homolog of NCBI NO: 34903372 NR Description: unnamed protein product [Oryza sativa (japonica
MWLFPLLFSQEFSMSTISKLFRNRFWIGFLCQIPIGMSLVRKSLTSRVENVEESLDMSVLDLPELALDCILERLPPSSLCRIAAVCRTLRERCVSDHLWEKHMRKKWGRVIGPAAYREWKWHVASKRNVGGLKHGRQKGLMRFMSLHWPFQWIRPKVDANYNNPKLRSSLPVDSVMNWYLALESGNFWFPAQVYNRENGHVGFMLSCYDAELSYDPRTDTFQARYPPHGRRADARECGIPWERLRAPPIDTSPHDLHVSDCLNDLYPGDHIEIQWRRNKEFPYGWWYGVVGHLESCNGSENYCRCHSSDTVVLEFNHYTPGSRWRLTTVSRKDHREEGNEADGFYGGIRKITSEAEIATWKCLWPSEVLD

SEQ ID NO: 52376 - protein, 357 aa, Glycine max
  peptide (1)..(357): Ceres Seq. ID no. 15177873
  misc_feature (46)..(91): Pfam Name: F-box domain Pfam Description: F-box domain
  misc_feature (44)..(85): Homolog of NCBI NO: 7459607 NR Description: hypothetical protein At2g41170 [imported] -
  misc_feature (158)..(294): Homolog of NCBI NO: 7459607 NR Description: hypothetical protein At2g41170 [imported] -
  misc_feature (44)..(271): Homolog of NCBI NO: 7487431 NR Description: hypothetical protein At2g32560 [imported] -
  misc_feature (296)..(357): Homolog of NCBI NO: 34909060 NR Description: P0702B09.33 [Oryza sativa (japonica
  misc_feature (36)..(270): Homolog of NCBI NO: 34909060 NR Description: P0702B09.33 [Oryza sativa (japonica
  misc_feature (296)..(357): Homolog of NCBI NO: 15225802 NR Description: F-box protein family [Arabidopsis thaliana]
  misc_feature (44)..(270): Homolog of NCBI NO: 15225802 NR Description: F-box protein family [Arabidopsis thaliana]
  misc_feature (28)..(357): Homolog of NCBI NO: 30688559 NR Description: F-box protein family [Arabidopsis thaliana]
  misc_feature (44)..(357): Homolog of NCBI NO: 30685347 NR Description: F-box protein family [Arabidopsis thaliana]
  misc_feature (45)..(357): Homolog of NCBI NO: 34903372 NR Description: unnamed protein product [Oryza sativa (japonica
MSTISKLFRNRFWIGFLCQIPIGMSLVRKSLTSRVENVEESLDMSVLDLPELALDCILERLPPSSLCRIAAVCRTLRERCVSDHLWEKHMRKKWGRVIGPAAYREWKWHVASKRNVGGLKHGRQKGLMRFMSLHWPFQWIRPKVDANYNNPKLRSSLPVDSVMNWYLALESGNFWFPAQVYNRENGHVGFMLSCYDAELSYDPRTDTFQARYPPHGRRADARECGIPWERLRAPPIDTSPHDLHVSDCLNDLYPGDHIEIQWRRNKEFPYGWWYGVVGHLESCNGSENYCRCHSSDTVVLEFNHYTPGSRWRLTTVSRKDHREEGNEADGFYGGIRKITSEAEIATWKCLWPSEVLD

SEQ ID NO: 52377 - DNA, 879 bp, Glycine max
  misc_feature (1)..(879): Ceres Seq. ID no. 14316155
aaaaaccccaggggctccacttagttgttcctctctggcctcttttctttctacttctcatcagggttttacttttagcttaaacccgcggccatggcgacgagagcagcagtggcggcgccgcgcgttttgcggcggtttttctgcacaaactcagcctcttcttctttccccttcgtttctacgctgcctcccggtgccacccccgccccaacccgacccacggcggagcccaacaccaacctcttcgtctctggtcttagtaaacgtactaatacagaaaggcttcgagaggagtttgcaaagttcggtgaagttgttcatgcgagggtggtaactgatcgagtctcaggttactctaaggggtttggttttgttcaatatgctacaatagaagatgctgcaaagggcattgaaggcatggatggcaagtttttggacggttgggttatatttgcagagtatgcgagaccaagaccaccaccaggccaacctctaaatagcaacagttctcagtatggccggcagtgattcctgttatttatctaaaacattcttatgcccattgaactggttgtctcaattagcaattgcaattcaaaaagtattatttattagggcatggatgctcgggtgatctttaattatctatagaagttctagattattgtaatggaaggataacttatgacattgttgtaatgcaagatttctcgttgatagtcttgcatattttgtggttatggttactccaaagtagcttcctgtttgtacttaagtatagattgatgccaatgtctggacacgatggggttatctggtctgataatcccttacccttatacttgaaacgagataaaaatgattattgtctacgat

SEQ ID NO: 52378 - protein, 145 aa, Glycine max
  peptide (1)..(145): Ceres Seq. ID no. 14316156
  misc_feature (51)..(122): Pfam Name: RNA recognition motif. (a.k.a. RRM, RBD, or RNP domain) Pfam Description: RNA recognition motif. (a.k.a. RRM, RBD, or RNP
  misc_feature (48)..(130): Homolog of NCBI NO: 7489099 NR Description: RNA-binding protein RGP-3 - wood tobacco
  misc_feature (48)..(143): Homolog of NCBI NO: 7439995 NR Description: RNA binding protein 3 - wood tobacco
  misc_feature (49)..(145): Homolog of NCBI NO: 21388662 NR Description: glycine-rich RNA-binding protein [Physcomitrella
  misc_feature (48)..(129): Homolog of NCBI NO: 7439994 NR Description: glycine-rich RNA-binding protein - garden pea
  misc_feature (30)..(145): Homolog of NCBI NO: 34906972 NR Description: putative glycine-rich RNA-binding protein 2
  misc_feature (30)..(128): Homolog of NCBI NO: 15219486 NR Description: RNA recognition motif (RRM)-containing protein
  misc_feature (51)..(135): Homolog of NCBI NO: 15224298 NR Description: RNA-binding protein, putative [Arabidopsis
  misc_feature (5)..(145): Homolog of NCBI NO: 34898598 NR Description: P0534A03.25 [Oryza sativa (japonica
  misc_feature (29)..(141): Homolog of NCBI NO: 38636774 NR Description: putative RNA recognition motif (RRM)-containing
  misc_feature (1)..(145): Homolog of NCBI NO: 15239676 NR Description: RNA recognition motif (RRM)-containing protein
MATRAAVAAPRVLRRFFCTNSASSSFPFVSTLPPGATPAPTRPTAEPNTNLFVSGLSKRTNTERLREEFAKFGEVVHARVVTDRVSGYSKGFGFVQYATIEDAAKGIEGMDGKFLDGWVIFAEYARPRPPPGQPLNSNSSQYGRQ

SEQ ID NO: 52379 - protein, 111 aa, Glycine max
  peptide (1)..(111): Ceres Seq. ID no. 14316157
KTPGAPLSCSSLASFLSTSHQGFTFSLNPRPWRREQQWRRRAFCGGFSAQTQPLLLSPSFLRCLPVPPPPQPDPRRSPTPTSSSLVLVNVLIQKGFERSLQSSVKLFMRGW

SEQ ID NO: 52380 - DNA, 1445 bp, Glycine max
  misc_feature (1)..(1445): Ceres Seq. ID no. 14316128
cattttttcagaaaggtttaggaaaaacgcgtaagcgtcaacgatcatattcacttttacaaaccccacaactttgttctcttctctgcaattcgttcaatctttttctgagcaaagcattcaacttttggcatttttaggttatcttgaatccgattatcaatggagaccccatcgtccaccagaagagtaataacaagatcacagactttatctgcttccaatgatgctctcatcacagttttcagtgagtgattttttctcttacaatttcaatttttctttctccaaactcacccaaaacaacattactcgtttgtcttttgcaggaaatattgaagattccgaaaagaacacatcaaagtcaaaaacaagggtgcaacaacaacaagatcaatcagcactaatagacataacaaatgattctccaatcgcggggcttgcgaatggggtaattcttggtaccccattggcgaagcagagaagaagcaaaatgaagaacactccagggtctggggaagccttgctgaggggacaagtgaagacccttttgcttaaggtggaagaagaggtcgagctttccaagttctcgcttgaaagcatggaacttgttgcaccaatgcccgtgaatacgcctcaatttcagaatctttctggtttggcttcagttaccaacccttctgttgttctcaaaaacccactaattcctcaggtggtgaatcatgtatttgatggttctgaatctgaaaagagtgtaataagcaggtcccttttatttgacttctcagagaaatctcaactttcgaatgcatcagaagaatttttctctgcgctgagttatgaggaactagtacaagctggaaaggaaattagtagctgctgcatagaaggtgatgatgcttctatctggtcaatgcaggtcaatgcaagcacccatgatgaagaagaagatgatgaggttacaactgcatacgaagaagattgttgtgaggatgttgaaggagaagaagaaaaggaagagtatgatgaaggaggtttgctgcttgatgaactgtgtgaagggttgaacaacattagcatgaatgaaaggatagctccaaaatttgaaggaaagcacacaagatttgtttacaacagtgatgatgagattgtgaaagaagaggtggaagagaactttggtgagagtgcttcttcaactaagatattgcgtttgaaaggattgccgactccaaaagggaaacacttacgcttttatgaggaagaggatggaaaatctgctttgtgattcctagatagactttttggcatatttgtgaatgctctaaaataatggtcatttaaagtttttgtttctttgggtcccgacagagttcactagtagattctttggattttttgttcgagaaatgaaaaacgagtgaccacacaatttagtggtccaattt

SEQ ID NO: 52381 - protein, 353 aa, Glycine max
  peptide (1)..(353): Ceres Seq. ID no. 14316129
  misc_feature (110)..(348): Homolog of NCBI NO: 37537140 NR Description: putative proline and glutamic acid rich nuclear
  misc_feature (283)..(348): Homolog of NCBI NO: 15230432 NR Description: hypothetical protein [Arabidopsis thaliana]
  misc_feature (41)..(144): Homolog of NCBI NO: 15230432 NR Description: hypothetical protein [Arabidopsis thaliana]
  misc_feature (25)..(347): Homolog of NCBI NO: 15239303 NR Description: expressed protein [Arabidopsis thaliana]
MMLSSQFSVSDFFSYNFNFSFSKLTQNNITRLSFAGNIEDSEKNTSKSKTRVQQQQDQSALIDITNDSPIAGLANGVILGTPLAKQRRSKMKNTPGSGEALLRGQVKTLLLKVEEEVELSKFSLESMELVAPMPVNTPQFQNLSGLASVTNPSVVLKNPLIPQVVNHVFDGSESEKSVISRSLLFDFSEKSQLSNASEEFFSALSYEELVQAGKEISSCCIEGDDASIWSMQVNASTHDEEEDDEVTTAYEEDCCEDVEGEEEKEEYDEGGLLLDELCEGLNNISMNERIAPKFEGKHTRFVYNSDDEIVKEEVEENFGESASSTKILRLKGLPTPKGKHLRFYEEEDGKSAL

SEQ ID NO: 52382 - protein, 352 aa, Glycine max
  peptide (1)..(352): Ceres Seq. ID no. 14316130
  misc_feature (109)..(347): Homolog of NCBI NO: 37537140 NR Description: putative proline and glutamic acid rich nuclear
  misc_feature (282)..(347): Homolog of NCBI NO: 15230432 NR Description: hypothetical protein [Arabidopsis thaliana]
  misc_feature (40)..(143): Homolog of NCBI NO: 15230432 NR Description: hypothetical protein [Arabidopsis thaliana]
  misc_feature (24)..(346): Homolog of NCBI NO: 15239303 NR Description: expressed protein [Arabidopsis thaliana]
MLSSQFSVSDFFSYNFNFSFSKLTQNNITRLSFAGNIEDSEKNTSKSKTRVQQQQDQSALIDITNDSPIAGLANGVILGTPLAKQRRSKMKNTPGSGEALLRGQVKTLLLKVEEEVELSKFSLESMELVAPMPVNTPQFQNLSGLASVTNPSVVLKNPLIPQVVNHVFDGSESEKSVISRSLLFDFSEKSQLSNASEEFFSALSYEELVQAGKEISSCCIEGDDASIWSMQVNASTHDEEEDDEVTTAYEEDCCEDVEGEEEKEEYDEGGLLLDELCEGLNNISMNERIAPKFEGKHTRFVYNSDDEIVKEEVEENFGESASSTKILRLKGLPTPKGKHLRFYEEEDGKSAL

SEQ ID NO: 52383 - protein, 263 aa, Glycine max
  peptide (1)..(263): Ceres Seq. ID no. 14316131
  misc_feature (20)..(258): Homolog of NCBI NO: 37537140 NR Description: putative proline and glutamic acid rich nuclear
  misc_feature (193)..(258): Homolog of NCBI NO: 15230432 NR Description: hypothetical protein [Arabidopsis thaliana]
  misc_feature (1)..(54): Homolog of NCBI NO: 15230432 NR Description: hypothetical protein [Arabidopsis thaliana]
  misc_feature (1)..(257): Homolog of NCBI NO: 15239303 NR Description: expressed protein [Arabidopsis thaliana]
MKNTPGSGEALLRGQVKTLLLKVEEEVELSKFSLESMELVAPMPVNTPQFQNLSGLASVTNPSVVLKNPLIPQVVNHVFDGSESEKSVISRSLLFDFSEKSQLSNASEEFFSALSYEELVQAGKEISSCCIEGDDASIWSMQVNASTHDEEEDDEVTTAYEEDCCEDVEGEEEKEEYDEGGLLLDELCEGLNNISMNERIAPKFEGKHTRFVYNSDDEIVKEEVEENFGESASSTKILRLKGLPTPKGKHLRFYEEEDGKSAL

SEQ ID NO: 52384 - DNA, 1227 bp, Glycine max
  misc_feature (1)..(1227): Ceres Seq. ID no. 14316161
cccccttctcccttttgcttccttcaataacttataacttagcattgtattgtgttcaaactttgtttcttccataccctcttcttctttggccttaaccgtcatatttggctttgaaatggagttcgaggaccgcttcagacaccaggttcagagaccaaaatatgattgccttctttttgatttagatgacactttgtatcctctcaaatctggtctggcaaaatcatgtctccaaaatattaaacactacatggttgagaagcttggcatagaccctagcaaaattgatgacctgtccaacctcctttacaagaattatggaactactatggctggtctaagggcaattggatatgactttgactatgatgaatatcatagctttgttcatgggagattaccttatgagaacctaaaaccagacccagttctgaggaacctgttgctgagcctaccctataggaaacttatcttcacaaacgcagacaaagtccacgcggctaaggcgcttagcaggcttggattagaagactgctttgaaggaatcatatgctttgagacccttaatcctatccacaagagcactgtttctgatgatgaagatgatattgagtttgtgggttcaaggaccaccaatcctaccacttgtaatggttcaggcacctctcaaatctttgacattatagggcattttgctcagcccaatcccggtgcagtcctgccaaagacaccaattgtttgcaagccatcagaaaatgccattgaattggccatcaagatagccaaccttaacccacaaagaactttgttctttgaggacagtacccgcaacatacaagctggaaaacgtgtggggcttcacactgtgctggttggtacatcacaaagatgtaaaggagcagattatgccttggaaagcattcacaaccttagggaggctgtgcctgaactatgggaggctgatataaaatcagaagttgcataccctggaaagctagctgtggagacatctgtcactgcttgagattattattaagtgcatgaaattaattaagtcccttcaaaattgttcatttaatcaaaattgaaaatccaaccaccaacaacaaaaaaaaaaacgaacaaaagagagaagaagcccacgggaattcccccaacttcagatgtagtagttgtagttgatgtagatgctttgtaagattgcaataaaatagtcattcaaat

SEQ ID NO: 52385 - protein, 302 aa, Glycine max
  peptide (1)..(302): Ceres Seq. ID no. 14316162
  misc_feature (16)..(169): Pfam Name: haloacid dehalogenase-like hydrolase Pfam Description: haloacid dehalogenase-like hydrolase
  misc_feature (1)..(175): Homolog of NCBI NO: 30697234 NR Description: haloacid dehalogenase-like hydrolase family
  misc_feature (207)..(280): Homolog of NCBI NO: 19033569 NR Description: putative sugar-starvation induced protein
  misc_feature (16)..(152): Homolog of NCBI NO: 19033569 NR Description: putative sugar-starvation induced protein
  misc_feature (206)..(280): Homolog of NCBI NO: 25408214 NR Description: probable hydrolase [imported] - Arabidopsis
  misc_feature (17)..(162): Homolog of NCBI NO: 25408214 NR Description: probable hydrolase [imported] - Arabidopsis
  misc_feature (1)..(169): Homolog of NCBI NO: 21593165 NR Description: unknown [Arabidopsis thaliana]
  misc_feature (1)..(169): Homolog of NCBI NO: 15241720 NR Description: haloacid dehalogenase-like hydrolase family
  misc_feature (206)..(280): Homolog of NCBI NO: 18402886 NR Description: haloacid dehalogenase-like hydrolase family
  misc_feature (17)..(162): Homolog of NCBI NO: 18402886 NR Description: haloacid dehalogenase-like hydrolase family
  misc_feature (1)..(302): Homolog of NCBI NO: 7406669 NR Description: putative ripening-related protein [Vitis vinifera]
MEFEDRFRHQVQRPKYDCLLFDLDDTLYPLKSGLAKSCLQNIKHYMVEKLGIDPSKIDDLSNLLYKNYGTTMAGLRAIGYDFDYDEYHSFVHGRLPYENLKPDPVLRNLLLSLPYRKLIFTNADKVHAAKALSRLGLEDCFEGIICFETLNPIHKSTVSDDEDDIEFVGSRTTNPTTCNGSGTSQIFDIIGHFAQPNPGAVLPKTPIVCKPSENAIELAIKIANLNPQRTLFFEDSTRNIQAGKRVGLHTVLVGTSQRCKGADYALESIHNLREAVPELWEADIKSEVAYPGKLAVETSVTA

SEQ ID NO: 52386 - protein, 257 aa, Glycine max
  peptide (1)..(257): Ceres Seq. ID no. 14316163
  misc_feature (1)..(124): Pfam Name: haloacid dehalogenase-like hydrolase Pfam Description: haloacid dehalogenase-like hydrolase
  misc_feature (1)..(130): Homolog of NCBI NO: 30697234 NR Description: haloacid dehalogenase-like hydrolase family
  misc_feature (162)..(235): Homolog of NCBI NO: 19033569 NR Description: putative sugar-starvation induced protein
  misc_feature (1)..(107): Homolog of NCBI NO: 19033569 NR Description: putative sugar-starvation induced protein
  misc_feature (161)..(235): Homolog of NCBI NO: 25408214 NR Description: probable hydrolase [imported] - Arabidopsis
  misc_feature (1)..(117): Homolog of NCBI NO: 25408214 NR Description: probable hydrolase [imported] - Arabidopsis
  misc_feature (1)..(124): Homolog of NCBI NO: 21593165 NR Description: unknown [Arabidopsis thaliana]
  misc_feature (1)..(124): Homolog of NCBI NO: 15241720 NR Description: haloacid dehalogenase-like hydrolase family
  misc_feature (161)..(235): Homolog of NCBI NO: 18402886 NR Description: haloacid dehalogenase-like hydrolase family
  misc_feature (1)..(117): Homolog of NCBI NO: 18402886 NR Description: haloacid dehalogenase-like hydrolase family
  misc_feature (1)..(257): Homolog of NCBI NO: 7406669 NR Description: putative ripening-related protein [Vitis vinifera]
MVEKLGIDPSKIDDLSNLLYKNYGTTMAGLRAIGYDFDYDEYHSFVHGRLPYENLKPDPVLRNLLLSLPYRKLIFTNADKVHAAKALSRLGLEDCFEGIICFETLNPIHKSTVSDDEDDIEFVGSRTTNPTTCNGSGTSQIFDIIGHFAQPNPGAVLPKTPIVCKPSENAIELAIKIANLNPQRTLFFEDSTRNIQAGKRVGLHTVLVGTSQRCKGADYALESIHNLREAVPELWEADIKSEVAYPGKLAVETSVTA

SEQ ID NO: 52387 - protein, 231 aa, Glycine max
  peptide (1)..(231): Ceres Seq. ID no. 14316164
  misc_feature (1)..(98): Pfam Name: haloacid dehalogenase-like hydrolase Pfam Description: haloacid dehalogenase-like hydrolase
  misc_feature (1)..(104): Homolog of NCBI NO: 30697234 NR Description: haloacid dehalogenase-like hydrolase family
  misc_feature (136)..(209): Homolog of NCBI NO: 19033569 NR Description: putative sugar-starvation induced protein
  misc_feature (1)..(81): Homolog of NCBI NO: 19033569 NR Description: putative sugar-starvation induced protein
  misc_feature (135)..(209): Homolog of NCBI NO: 25408214 NR Description: probable hydrolase [imported] - Arabidopsis
  misc_feature (1)..(91): Homolog of NCBI NO: 25408214 NR Description: probable hydrolase [imported] - Arabidopsis
  misc_feature (1)..(98): Homolog of NCBI NO: 21593165 NR Description: unknown [Arabidopsis thaliana]
  misc_feature (1)..(98): Homolog of NCBI NO: 15241720 NR Description: haloacid dehalogenase-like hydrolase family
  misc_feature (135)..(209): Homolog of NCBI NO: 18402886 NR Description: haloacid dehalogenase-like hydrolase family
  misc_feature (1)..(91): Homolog of NCBI NO: 18402886 NR Description: haloacid dehalogenase-like hydrolase family
  misc_feature (1)..(231): Homolog of NCBI NO: 7406669 NR Description: putative ripening-related protein [Vitis vinifera]
MAGLRAIGYDFDYDEYHSFVHGRLPYENLKPDPVLRNLLLSLPYRKLIFTNADKVHAAKALSRLGLEDCFEGIICFETLNPIHKSTVSDDEDDIEFVGSRTTNPTTCNGSGTSQIFDIIGHFAQPNPGAVLPKTPIVCKPSENAIELAIKIANLNPQRTLFFEDSTRNIQAGKRVGLHTVLVGTSQRCKGADYALESIHNLREAVPELWEADIKSEVAYPGKLAVETSVTA

SEQ ID NO: 52388 - DNA, 1189 bp, Glycine max
  misc_feature (1)..(1189): Ceres Seq. ID no. 14314468
aatttgattggatttcgatatcaggatttgccagaacctctggtcatggctttctctttagtaccgagctgtttccatggctatctcaccagctcctcgttctcctccaccactcattttctcccgacttctctctcttgcggcggcgtctctgtttctcccgtttcgaagctaagaacatgtgccaaattcgataagtttcagggtgattctcctcttgaacagaccacatcagcttctgcttcgcaggaagtagtaccgttagaagctgaagacccaccagaagaagaagaagacgatagctgcttgcctaatgatttggtgggagctgttaggcaatcaggtgaagcaagtgcttcgtttgtgaactcgggaggaacaagagctatcgtggagctcttgattcctcagctgcagttcttagacgatgaaggtgcgcaagctgaactctgggagctttctcgcgttttcttggagacactcatcaaagaaactggctgtgagagagttaaagctgtgtttccagatgctggagctgctgcgttgctaaaatataagtggaaggatgcagcttttggattcgctagcttaagtgaccgtaaaccagtggagaaagaagatgagatcattgtcatggttgttcctgattaccaaatgcttgaatacgttgagaaaattgcaaaagggcttgctgatgacccgccaaggcctctggttatgtggaaccctcgtctgataagcgaggaagttggggttgggtttaacgtaagaaagctaaggcgttacttcttaagttcttttactacggtttactccatgagacctctagctgctggtgctgttttcagatgttatcctggtaaatggaaagtgttctatgacaataaagacagacctggccggtacctactcgccaaagaactcattggtcgacctgatgctgaggatcttgagattatatatgggaacgtggaagagaaaccagatgaagagccatctttattgacccaagctgctggaatcttctcgtccattaacaggttcatgaaagctatgtgaagatgatttcttttctcacagagtagtcctgttcactagtctggtattatgaatgtagaccaaagggaatgtttgtatatctttgtatgctattacaccataacgaatagaatacatacttcttctgtgc

SEQ ID NO: 52389 - protein, 352 aa, Glycine max
  peptide (1)..(352): Ceres Seq. ID no. 14314469
  misc_feature (155)..(352): Homolog of NCBI NO: 33865786 NR Description: conserved hypothetical protein [Synechococcus sp.
  misc_feature (103)..(318): Homolog of NCBI NO: 37522361 NR Description: hypothetical protein glr2792 [Gloeobacter
  misc_feature (103)..(352): Homolog of NCBI NO: 16329818 NR Description: unknown protein [Synechocystis sp. PCC 6803]
  misc_feature (103)..(320): Homolog of NCBI NO: 23040759 NR Description: hypothetical protein [Trichodesmium erythraeum
  misc_feature (103)..(352): Homolog of NCBI NO: 17230608 NR Description: hypothetical protein [Nostoc sp. PCC 7120]
  misc_feature (16)..(352): Homolog of NCBI NO: 18421131 NR Description: expressed protein [Arabidopsis thaliana]
NLIGFRYQDLPEPLVMAFSLVPSCFHGYLTSSSFSSTTHFLPTSLSCGGVSVSPVSKLRTCAKFDKFQGDSPLEQTTSASASQEVVPLEAEDPPEEEEDDSCLPNDLVGAVRQSGEASASFVNSGGTRAIVELLIPQLQFLDDEGAQAELWELSRVFLETLIKETGCERVKAVFPDAGAAALLKYKWKDAAFGFASLSDRKPVEKEDEIIVMVVPDYQMLEYVEKIAKGLADDPPRPLVMWNPRLISEEVGVGFNVRKLRRYFLSSFTTVYSMRPLAAGAVFRCYPGKWKVFYDNKDRPGRYLLAKELIGRPDAEDLEIIYGNVEEKPDEEPSLLTQAAGIFSSINRFMKAM

SEQ ID NO: 52390 - protein, 337 aa, Glycine max
  peptide (1)..(337): Ceres Seq. ID no. 14314470
  misc_feature (140)..(337): Homolog of NCBI NO: 33865786 NR Description: conserved hypothetical protein [Synechococcus sp.
  misc_feature (88)..(303): Homolog of NCBI NO: 37522361 NR Description: hypothetical protein glr2792 [Gloeobacter
  misc_feature (88)..(337): Homolog of NCBI NO: 16329818 NR Description: unknown protein [Synechocystis sp. PCC 6803]
  misc_feature (88)..(305): Homolog of NCBI NO: 23040759 NR Description: hypothetical protein [Trichodesmium erythraeum
  misc_feature (88)..(337): Homolog of NCBI NO: 17230608 NR Description: hypothetical protein [Nostoc sp. PCC 7120]
  misc_feature (1)..(337): Homolog of NCBI NO: 18421131 NR Description: expressed protein [Arabidopsis thaliana]
MAFSLVPSCFHGYLTSSSFSSTTHFLPTSLSCGGVSVSPVSKLRTCAKFDKFQGDSPLEQTTSASASQEVVPLEAEDPPEEEEDDSCLPNDLVGAVRQSGEASASFVNSGGTRAIVELLIPQLQFLDDEGAQAELWELSRVFLETLIKETGCERVKAVFPDAGAAALLKYKWKDAAFGFASLSDRKPVEKEDEIIVMVVPDYQMLEYVEKIAKGLADDPPRPLVMWNPRLISEEVGVGFNVRKLRRYFLSSFTTVYSMRPLAAGAVFRCYPGKWKVFYDNKDRPGRYLLAKELIGRPDAEDLEIIYGNVEEKPDEEPSLLTQAAGIFSSINRFMKAM

SEQ ID NO: 52391 - DNA, 996 bp, Glycine max
  misc_feature (1)..(996): Ceres Seq. ID no. 14316118
aatcaccctttgctttcttccaatattccacatcaaagcacctttccacttttccattctatatcccccatcttttcctcccttattaaaagccgcatgcagcacctaagctaagcataacttgtacacacttacacttgcacacatagggagagagggtgaaggtgagaatctcaattgtttagcttattccgtgagtgactctattctattccattaacatgacagggaagagaaaccaaattacaacaagtcctgtgggaagtccaacatctggtaacatctcagacagctcctcctcaaaagaacaagacaggttcctccctatagccaatgttagccgaatcatgaaaagggcactcccagccaatgccaaaatctcaaaggaagccaaggaaacagttcaagagtgtgtgtctgagttcataagcttcatcactggtgaggcctcagacaagtgccagagggaaaagaggaagacaatcaatggtgatgatcttctttgggccatgacaacactaggatttgagaactatgttggacccttgaagctctacctgaacaactacagggaaactgagggagaaaagagttctatggcaaaacaagaagaacactctccaactcatcaaaccaatattgatggggtggtggttgaaatcaacaagttgcatcattctgtggcagcaaccaacaaagctgcagacttcaacactttcagtggtggtggcttctattctgtggggcctcaagtggctgctccaaagagcttcactgagattggagggatcaatggctatagagaaagttccattgctcaaagtgcggtcagtggtgatcatgatgcaagtggcaatagaatgatgccacccaacctacgttatagggttgaatggtagatgtgatatgcataccaacaagttcatgtcccttccccattatatattatatcatatcatatagtataatatatataaataatatttttattatgat

SEQ ID NO: 52392 - protein, 225 aa, Glycine max
  peptide (1)..(225): Ceres Seq. ID no. 14316119
  misc_feature (32)..(97): Pfam Name: Histone-like transcription factor (CBF/NF-Y) and Pfam Description: Histone-like transcription factor (CBF/NF-Y)
  misc_feature (15)..(133): Homolog of NCBI NO: 18404885 NR Description: CCAAT-binding transcription factor subunit
  misc_feature (14)..(128): Homolog of NCBI NO: 17979253 NR Description: At2g37060/T2N18.18 [Arabidopsis thaliana]
  misc_feature (14)..(133): Homolog of NCBI NO: 15231796 NR Description: transcription factor NF-Y, CCAAT-binding - like
  misc_feature (28)..(133): Homolog of NCBI NO: 30409461 NR Description: NF-YB [Oryza sativa (japonica cultivar-group)]
  misc_feature (14)..(133): Homolog of NCBI NO: 115840 NR Description: CCAAT-BINDING TRANSCRIPTION FACTOR SUBUNIT A (NF-Y PROTEIN CHAIN B) (NF-YB) (CAAT-BOX DNA BINDING PROTEIN
  misc_feature (14)..(133): Homolog of NCBI NO: 22380 NR Description: CAAT-box DNA binding protein subunit B (NF-YB)
  misc_feature (14)..(143): Homolog of NCBI NO: 15238156 NR Description: expressed protein [Arabidopsis thaliana]
  misc_feature (14)..(143): Homolog of NCBI NO: 2398529 NR Description: Transcription factor [Arabidopsis thaliana]
  misc_feature (18)..(130): Homolog of NCBI NO: 15233475 NR Description: CCAAT-binding transcription factor subunit
  misc_feature (10)..(137): Homolog of NCBI NO: 15225440 NR Description: CCAAT-box binding trancription factor -related
MTGKRNQITTSPVGSPTSGNISDSSSSKEQDRFLPIANVSRIMKRALPANAKISKEAKETVQECVSEFISFITGEASDKCQREKRKTINGDDLLWAMTTLGFENYVGPLKLYLNNYRETEGEKSSMAKQEEHSPTHQTNIDGVVVEINKLHHSVAATNKAADFNTFSGGGFYSVGPQVAAPKSFTEIGGINGYRESSIAQSAVSGDHDASGNRMMPPNLRYRVEW

SEQ ID NO: 52393 - protein, 183 aa, Glycine max
  peptide (1)..(183): Ceres Seq. ID no. 14316120
  misc_feature (1)..(55): Pfam Name: Histone-like transcription factor (CBF/NF-Y) and Pfam Description: Histone-like transcription factor (CBF/NF-Y)
  misc_feature (1)..(91): Homolog of NCBI NO: 18404885 NR Description: CCAAT-binding transcription factor subunit
  misc_feature (1)..(86): Homolog of NCBI NO: 17979253 NR Description: At2g37060/T2N18.18 [Arabidopsis thaliana]
  misc_feature (1)..(91): Homolog of NCBI NO: 15231796 NR Description: transcription factor NF-Y, CCAAT-binding - like
  misc_feature (1)..(91): Homolog of NCBI NO: 30409461 NR Description: NF-YB [Oryza sativa (japonica cultivar-group)]
  misc_feature (1)..(91): Homolog of NCBI NO: 115840 NR Description: CCAAT-BINDING TRANSCRIPTION FACTOR SUBUNIT A (NF-Y PROTEIN CHAIN B) (NF-YB) (CAAT-BOX DNA BINDING PROTEIN
  misc_feature (1)..(91): Homolog of NCBI NO: 22380 NR Description: CAAT-box DNA binding protein subunit B (NF-YB)
  misc_feature (1)..(101): Homolog of NCBI NO: 15238156 NR Description: expressed protein [Arabidopsis thaliana]
  misc_feature (1)..(101): Homolog of NCBI NO: 2398529 NR Description: Transcription factor [Arabidopsis thaliana]
  misc_feature (1)..(88): Homolog of NCBI NO: 15233475 NR Description: CCAAT-binding transcription factor subunit
  misc_feature (1)..(95): Homolog of NCBI NO: 15225440 NR Description: CCAAT-box binding trancription factor -related
MKRALPANAKISKEAKETVQECVSEFISFITGEASDKCQREKRKTINGDDLLWAMTTLGFENYVGPLKLYLNNYRETEGEKSSMAKQEEHSPTHQTNIDGVVVEINKLHHSVAATNKAADFNTFSGGGFYSVGPQVAAPKSFTEIGGINGYRESSIAQSAVSGDHDASGNRMMPPNLRYRVEW

SEQ ID NO: 52394 - protein, 129 aa, Glycine max
  peptide (1)..(129): Ceres Seq. ID no. 14316121
  misc_feature (1)..(37): Homolog of NCBI NO: 18404885 NR Description: CCAAT-binding transcription factor subunit
  misc_feature (1)..(32): Homolog of NCBI NO: 17979253 NR Description: At2g37060/T2N18.18 [Arabidopsis thaliana]
  misc_feature (1)..(37): Homolog of NCBI NO: 15231796 NR Description: transcription factor NF-Y, CCAAT-binding - like
  misc_feature (1)..(37): Homolog of NCBI NO: 30409461 NR Description: NF-YB [Oryza sativa (japonica cultivar-group)]
  misc_feature (1)..(37): Homolog of NCBI NO: 115840 NR Description: CCAAT-BINDING TRANSCRIPTION FACTOR SUBUNIT A (NF-Y PROTEIN CHAIN B) (NF-YB) (CAAT-BOX DNA BINDING PROTEIN
  misc_feature (1)..(37): Homolog of NCBI NO: 22380 NR Description: CAAT-box DNA binding protein subunit B (NF-YB)
  misc_feature (1)..(47): Homolog of NCBI NO: 15238156 NR Description: expressed protein [Arabidopsis thaliana]
  misc_feature (1)..(47): Homolog of NCBI NO: 2398529 NR Description: Transcription factor [Arabidopsis thaliana]
  misc_feature (1)..(34): Homolog of NCBI NO: 15233475 NR Description: CCAAT-binding transcription factor subunit
  misc_feature (1)..(41): Homolog of NCBI NO: 15225440 NR Description: CCAAT-box binding trancription factor -related
MTTLGFENYVGPLKLYLNNYRETEGEKSSMAKQEEHSPTHQTNIDGVVVEINKLHHSVAATNKAADFNTFSGGGFYSVGPQVAAPKSFTEIGGINGYRESSIAQSAVSGDHDASGNRMMPPNLRYRVEW

SEQ ID NO: 52395 - DNA, 1752 bp, Glycine max
  misc_feature (1)..(1752): Ceres Seq. ID no. 15178264
cttaaactcagactgtgagcgagactcggtagtaatagtatagtctacaaggtttcgtattctactacttgaaacctaactcttccttcttcttctacactactcctatggctcccgatgcttccgacgcacttgcagtaaggcagaaagttcaattatttctgaacgcggctcgtactggttcaattgatctcttaaagaaattggcgttgcagctggacgagggcaaggatttggcgaaatcggtggaagcaataaaggacgccaacaagagaggagcactgcattttgccgcgcgagaaggccaaacctctgtttgcgagtacctcttaaccgatttgaagctctctgtcgattctcaagatgatgatggcgagactgcactcattcatgctgctcgtcagggacataccgccaccgctaaatatctgattgaccacggtgctgatcctactgtggctagcaatttaggggccacggcattacaccattctgcggggataggagatgctgagctgctcaagtacttgctgtccaggggagttaatcctgatctagaaagtgatgcgggaacacctttggtttgggctgctggtcatgcccaaccagctgctgtcagtgtactgttggaacatggtgcaaatccgcatgccgaaactgatgatggtattaccccactcctttcagctgtggcagccggttctctagcatgcttagagctgttaattcaggcaggtgctaaatcaaatataagtgctggtggagcaactcctttgcacatcgcagctgataatggaagtcttgaactattaaattgtttattgaaagtgggagctgatcctgatgtctctgacgaggatggtgtcaagccaatacaagttgctgctgcaaggggctatccaaaagctgttgagatattgttcccattgacgtccaaagtagatactattcctacttggactgttgatgggatacttgagtatatgcaatctgaaactagaaagcaacaggatgaatcgataaatgcaaaagaaactaatcagcccaaggaagctgattttccggagcaaaatgtccctgaggtggcacctgaagccaaaaagagagcagcagaagcaaagtcaagaggggatggggcttttaaaaggaatgaccatcatatggctatagatttttatacccaagcaattgatctgaaccccattgatgctactttgctatccaatagaagtctctgttggattaagttgggccaagctgagcatgctttagctgatgcaaaggcctgtagagctttaagaccagattggccaaaagcttgttatagggaaggagcggctctgcgtttgttgcagaaatttgatgaagctgcaaatgctttttatgagggagtaacgcttgatcctgaaaataaggagcttgtaaatgcgttcagggaagctgtcgaggcggggaggaaattttatggaacggctgaaaataaatcatagtttagccttttgttaataccatgtttcagagagaagagatcaaaatattgcgggtggtgcagccttattcacttgatccttttttccccaatgtgtgtatgcgtgttttctttaactagttactgtcgtataggaagagtcagctagtaatctgtttcattaaattgttttagtaattataaaggttatgcttatttgacatgttccaaaattgttgcagaattagtacacattatgaaaatggcaatgcaggttcatgggc

SEQ ID NO: 52396 - protein, 460 aa, Glycine max
  peptide (1)..(460): Ceres Seq. ID no. 15178265
  misc_feature (369)..(401): Pfam Name: TPR Domain Pfam Description: TPR Domain
  misc_feature (87)..(458): Homolog of NCBI NO: 28201548 NR Description: putative ankyrin [Oryza sativa (japonica
  misc_feature (113)..(458): Homolog of NCBI NO: 34896840 NR Description: putative stress-inducible protein [Oryza sativa]
  misc_feature (301)..(438): Homolog of NCBI NO: 13435243 NR Description: putative gag-pol polyprotein [Oryza sativa]
  misc_feature (19)..(295): Homolog of NCBI NO: 13435243 NR Description: putative gag-pol polyprotein [Oryza sativa]
  misc_feature (331)..(448): Homolog of NCBI NO: 38637543 NR Description: ankyrin-like protein [Oryza sativa (japonica
  misc_feature (2)..(211): Homolog of NCBI NO: 38637543 NR Description: ankyrin-like protein [Oryza sativa (japonica
  misc_feature (39)..(451): Homolog of NCBI NO: 34896852 NR Description: putative ankyrin [Oryza sativa]
  misc_feature (1)..(460): Homolog of NCBI NO: 34329680 NR Description: unknown [Nicotiana benthamiana]
  misc_feature (1)..(460): Homolog of NCBI NO: 24745936 NR Description: ankyrin-like protein [Solanum tuberosum]
  misc_feature (1)..(460): Homolog of NCBI NO: 15229331 NR Description: ankyrin-related protein [Arabidopsis thaliana]
MAPDASDALAVRQKVQLFLNAARTGSIDLLKKLALQLDEGKDLAKSVEAIKDANKRGALHFAAREGQTSVCEYLLTDLKLSVDSQDDDGETALIHAARQGHTATAKYLIDHGADPTVASNLGATALHHSAGIGDAELLKYLLSRGVNPDLESDAGTPLVWAAGHAQPAAVSVLLEHGANPHAETDDGITPLLSAVAAGSLACLELLIQAGAKSNISAGGATPLHIAADNGSLELLNCLLKVGADPDVSDEDGVKPIQVAAARGYPKAVEILFPLTSKVDTIPTWTVDGILEYMQSETRKQQDESINAKETNQPKEADFPEQNVPEVAPEAKKRAAEAKSRGDGAFKRNDHHMAIDFYTQAIDLNPIDATLLSNRSLCWIKLGQAEHALADAKACRALRPDWPKACYREGAALRLLQKFDEAANAFYEGVTLDPENKELVNAFREAVEAGRKFYGTAENKS

SEQ ID NO: 52397 - DNA, 1402 bp, Glycine max
  misc_feature (1)..(1402): Ceres Seq. ID no. 14316144
attctgaattgtgattgctctcacttataaaaccctcttttctgcttcttcgtccattggcattggctttcaatggcgaagtgcatgaccagttcttcttcttcttcctatgcactgcttctctttttcttctgctttctccaactggaggctattttggaccctgctgatttcctcgctctgcaaaacattcgtaaagctctgcaagacatgcctgcttccgatttcttctcttcctgggatttcaccgcagacccatgcaacttcgccggcgtttactgcgactccgacaaggtcatcgcgctcaacctcggcgaccccagggctggctctcccggcctcaccggccgcctccacccctccgtcggcaagctctccgcgctcgccgagttcaccgtcgtccctggccgtatttacggtcccctccccgaaacactctccgatttgaagaacctcaggtttctcggcgtcaaccgcaacttcatctccggcgaaattccgaccaagctgggagaactccgcaacctccgaaccgtcgatctcagctacaaccagctcactggacgcattcctccaacggtaggaaccctaccggagctaacaaacctaatcctctgccacaaccgcctctccggttcggttccccggttcgagtcgcacacactaacccggctcgatctgaagcacaactctctctccggttcgctccctcccaactctctccctccctctctccagtacctctctctttcctggaaccagctcacgggcccaatggaccgcctcctagcccgcctcgaccaggtcaagtatttggacctaagcctaaacaagttcacgggcccaatcccgggccatatcttttcctttccgctgacaaatctgcagctagaaaggaaccagttctcgggcccggtccagcccgtggatcaggtttccatcccgaccgttgatctcagttacaaccggttgtatggtcagatatcaccgatgctggcgacagtgcagaatctttacctgaacaacaaccggttcacgggtcgggttccggctagcttcgtggagcggttgctggacgcgagcattcagatactttacttgcagcataactatctgacggggattgatataagcccaacggcggtgattccagaaagaagctcgctgtgtctgcagtataactgcatggtccctcccgtagagacgccctgccccttgagggctggcaaggagaaaaccaggcctactacgcagtgcaaccagctgaaggatttgaaggactgatcctgatcccgatcaaaatcatatatatacctttccttctctttcttgccctttttgattcattattatttaattttgtgataactatgggggaatgaataagatgatgattgtgaat

SEQ ID NO: 52398 - protein, 403 aa, Glycine max
  peptide (1)..(403): Ceres Seq. ID no. 14316145
  misc_feature (311)..(334): Pfam Name: Leucine Rich Repeat Pfam Description: Leucine Rich Repeat
  misc_feature (15)..(350): Homolog of NCBI NO: 15226087 NR Description: leucine rich repeat protein family [Arabidopsis
  misc_feature (23)..(370): Homolog of NCBI NO: 18390097 NR Description: putative receptor protein kinase [Sorghum bicolor]
  misc_feature (15)..(350): Homolog of NCBI NO: 21554189 NR Description: putative leucine-rich repeat disease resistance
  misc_feature (15)..(350): Homolog of NCBI NO: 15225286 NR Description: receptor-related protein kinase, ERECTA
  misc_feature (6)..(306): Homolog of NCBI NO: 15217600 NR Description: leucine rich repeat protein family [Arabidopsis
  misc_feature (3)..(395): Homolog of NCBI NO: 15231699 NR Description: leucine rich repeat protein family [Arabidopsis
  misc_feature (12)..(397): Homolog of NCBI NO: 15229088 NR Description: leucine rich repeat protein family [Arabidopsis
  misc_feature (16)..(397): Homolog of NCBI NO: 30678566 NR Description: leucine rich repeat protein family [Arabidopsis
  misc_feature (16)..(397): Homolog of NCBI NO: 25406734 NR Description: protein F21B7.6 [imported] - Arabidopsis thaliana
  misc_feature (13)..(397): Homolog of NCBI NO: 15236232 NR Description: leucine rich repeat protein family [Arabidopsis
MAKCMTSSSSSSYALLLFFFCFLQLEAILDPADFLALQNIRKALQDMPASDFFSSWDFTADPCNFAGVYCDSDKVIALNLGDPRAGSPGLTGRLHPSVGKLSALAEFTVVPGRIYGPLPETLSDLKNLRFLGVNRNFISGEIPTKLGELRNLRTVDLSYNQLTGRIPPTVGTLPELTNLILCHNRLSGSVPRFESHTLTRLDLKHNSLSGSLPPNSLPPSLQYLSLSWNQLTGPMDRLLARLDQVKYLDLSLNKFTGPIPGHIFSFPLTNLQLERNQFSGPVQPVDQVSIPTVDLSYNRLYGQISPMLATVQNLYLNNNRFTGRVPASFVERLLDASIQILYLQHNYLTGIDISPTAVIPERSSLCLQYNCMVPPVETPCPLRAGKEKTRPTTQCNQLKDLKD

SEQ ID NO: 52399 - protein, 399 aa, Glycine max
  peptide (1)..(399): Ceres Seq. ID no. 14316146
  misc_feature (307)..(330): Pfam Name: Leucine Rich Repeat Pfam Description: Leucine Rich Repeat
  misc_feature (11)..(346): Homolog of NCBI NO: 15226087 NR Description: leucine rich repeat protein family [Arabidopsis
  misc_feature (19)..(366): Homolog of NCBI NO: 18390097 NR Description: putative receptor protein kinase [Sorghum bicolor]
  misc_feature (11)..(346): Homolog of NCBI NO: 21554189 NR Description: putative leucine-rich repeat disease resistance
  misc_feature (11)..(346): Homolog of NCBI NO: 15225286 NR Description: receptor-related protein kinase, ERECTA
  misc_feature (2)..(302): Homolog of NCBI NO: 15217600 NR Description: leucine rich repeat protein family [Arabidopsis
  misc_feature (1)..(391): Homolog of NCBI NO: 15231699 NR Description: leucine rich repeat protein family [Arabidopsis
  misc_feature (8)..(393): Homolog of NCBI NO: 15229088 NR Description: leucine rich repeat protein family [Arabidopsis
  misc_feature (12)..(393): Homolog of NCBI NO: 30678566 NR Description: leucine rich repeat protein family [Arabidopsis
  misc_feature (12)..(393): Homolog of NCBI NO: 25406734 NR Description: protein F21B7.6 [imported] - Arabidopsis thaliana
  misc_feature (9)..(393): Homolog of NCBI NO: 15236232 NR Description: leucine rich repeat protein family [Arabidopsis
MTSSSSSSYALLLFFFCFLQLEAILDPADFLALQNIRKALQDMPASDFFSSWDFTADPCNFAGVYCDSDKVIALNLGDPRAGSPGLTGRLHPSVGKLSALAEFTVVPGRIYGPLPETLSDLKNLRFLGVNRNFISGEIPTKLGELRNLRTVDLSYNQLTGRIPPTVGTLPELTNLILCHNRLSGSVPRFESHTLTRLDLKHNSLSGSLPPNSLPPSLQYLSLSWNQLTGPMDRLLARLDQVKYLDLSLNKFTGPIPGHIFSFPLTNLQLERNQFSGPVQPVDQVSIPTVDLSYNRLYGQISPMLATVQNLYLNNNRFTGRVPASFVERLLDASIQILYLQHNYLTGIDISPTAVIPERSSLCLQYNCMVPPVETPCPLRAGKEKTRPTTQCNQLKDLKD

SEQ ID NO: 52400 - protein, 357 aa, Glycine max
  peptide (1)..(357): Ceres Seq. ID no. 14316147
  misc_feature (265)..(288): Pfam Name: Leucine Rich Repeat Pfam Description: Leucine Rich Repeat
  misc_feature (1)..(304): Homolog of NCBI NO: 15226087 NR Description: leucine rich repeat protein family [Arabidopsis
  misc_feature (1)..(324): Homolog of NCBI NO: 18390097 NR Description: putative receptor protein kinase [Sorghum bicolor]
  misc_feature (1)..(304): Homolog of NCBI NO: 21554189 NR Description: putative leucine-rich repeat disease resistance
  misc_feature (1)..(304): Homolog of NCBI NO: 15225286 NR Description: receptor-related protein kinase, ERECTA
  misc_feature (1)..(260): Homolog of NCBI NO: 15217600 NR Description: leucine rich repeat protein family [Arabidopsis
  misc_feature (1)..(349): Homolog of NCBI NO: 15231699 NR Description: leucine rich repeat protein family [Arabidopsis
  misc_feature (1)..(351): Homolog of NCBI NO: 15229088 NR Description: leucine rich repeat protein family [Arabidopsis
  misc_feature (1)..(351): Homolog of NCBI NO: 30678566 NR Description: leucine rich repeat protein family [Arabidopsis
  misc_feature (1)..(351): Homolog of NCBI NO: 25406734 NR Description: protein F21B7.6 [imported] - Arabidopsis thaliana
  misc_feature (1)..(351): Homolog of NCBI NO: 15236232 NR Description: leucine rich repeat protein family [Arabidopsis
MPASDFFSSWDFTADPCNFAGVYCDSDKVIALNLGDPRAGSPGLTGRLHPSVGKLSALAEFTVVPGRIYGPLPETLSDLKNLRFLGVNRNFISGEIPTKLGELRNLRTVDLSYNQLTGRIPPTVGTLPELTNLILCHNRLSGSVPRFESHTLTRLDLKHNSLSGSLPPNSLPPSLQYLSLSWNQLTGPMDRLLARLDQVKYLDLSLNKFTGPIPGHIFSFPLTNLQLERNQFSGPVQPVDQVSIPTVDLSYNRLYGQISPMLATVQNLYLNNNRFTGRVPASFVERLLDASIQILYLQHNYLTGIDISPTAVIPERSSLCLQYNCMVPPVETPCPLRAGKEKTRPTTQCNQLKDLKD

SEQ ID NO: 52401 - DNA, 1172 bp, Glycine max
  misc_feature (1)..(1172): Ceres Seq. ID no. 14314434
actaaataaatagttctgttttgtttctctctcaactctcacaacccatctttcatatccaaattccaatgcttcttcttccttcttatttcaatttcaatcactactattattactctttcacgcttttgcttctcgatttttaaaccctaaatctatctatctgtctaatagataagatagggcaaaaacaaaacaaaacaaaataaaaccctagccaaagaaagaccttgttgagcagcagcagcagagagagagaggcttatggaaggagtaccgcacccaatacccagaactgtcgaagaggttttcaccgattttaagggcagacgcgctggtttgattaaggccctcactactgacgttgaaaagttttaccagcagtgcgatcccgagaaggagaatttgtgtctatatgggtttccaaatgaaacatgggaagtgaatttgcctgttgaggaagtgcctcctgaacttcctgagccagcattaggtataaactttgccagggacggcatgcaagagaaggactggctatcactggttgcagttcacagtgactcatggctgcttgctgttgctttctattttggtgcccgctttggatttggtaagaatgaaaggaaaaggctttttcagatgataaatgatctgccaacaatcttcgaacttgtgacaggaagtgctaagcaatcaaaggatcaaccagctgctcacaacaatggtagcaaatgcaaatcaagtggaaagtcccatcagtctgagtctcaggccaaggggatgaagatgtctgcaccacccaaagaagaggatgagagtggagaagaagaagaagaagatgatgaacagggtgcaacatgtggtgcttgcggtgataattatggcactgatgaattctggatctgttgtgatatgtgtgaaagatggttccatggtaaatgtgttaaaattactcctgctaaggctgagcacatcaagcaatacaagtgccctagctgcagtaacaagagggttagagtttgaaagctctaaacctttggatcaatcaccaattaaacagacaagatttagaatgtttgataacatttttacaagtgaaaattgcttcctgttctagtgaatggttcactttaatgactatgcagatggaatttcaagttttgctactgttc

SEQ ID NO: 52402 - protein, 252 aa, Glycine max
  peptide (1)..(252): Ceres Seq. ID no. 14314435
  misc_feature (198)..(248): Pfam Name: PHD-finger Pfam Description: PHD-finger
  misc_feature (9)..(246): Homolog of NCBI NO: 14192880 NR Description: Putative nucleic acid binding protein [Oryza
  misc_feature (1)..(251): Homolog of NCBI NO: 30687843 NR Description: zinc finger protein - like [Arabidopsis thaliana]
  misc_feature (9)..(251): Homolog of NCBI NO: 15229157 NR Description: nucleic acid binding protein-related [Arabidopsis
  misc_feature (9)..(251): Homolog of NCBI NO: 15239624 NR Description: nucleic acid binding protein - like [Arabidopsis
  misc_feature (1)..(32): Homolog of NCBI NO: 25346630 NR Description: F14L17.29 protein - Arabidopsis thaliana
  misc_feature (34)..(249): Homolog of NCBI NO: 25346630 NR Description: F14L17.29 protein - Arabidopsis thaliana
  misc_feature (1)..(251): Homolog of NCBI NO: 21593407 NR Description: putative PHD-type zinc finger protein
  misc_feature (1)..(251): Homolog of NCBI NO: 15226967 NR Description: PHD-type zinc finger protein -related
  misc_feature (1)..(249): Homolog of NCBI NO: 15223786 NR Description: nucleic acid binding protein (alfin-1) -related
  misc_feature (1)..(252): Homolog of NCBI NO: 7488751 NR Description: probable zinc finger protein - alfalfa (fragment)
MEGVPHPIPRTVEEVFTDFKGRRAGLIKALTTDVEKFYQQCDPEKENLCLYGFPNETWEVNLPVEEVPPELPEPALGINFARDGMQEKDWLSLVAVHSDSWLLAVAFYFGARFGFGKNERKRLFQMINDLPTIFELVTGSAKQSKDQPAAHNNGSKCKSSGKSHQSESQAKGMKMSAPPKEEDESGEEEEEDDEQGATCGACGDNYGTDEFWICCDMCERWFHGKCVKITPAKAEHIKQYKCPSCSNKRVRV

SEQ ID NO: 52403 - protein, 168 aa, Glycine max
  peptide (1)..(168): Ceres Seq. ID no. 14314436
  misc_feature (114)..(164): Pfam Name: PHD-finger Pfam Description: PHD-finger
  misc_feature (1)..(162): Homolog of NCBI NO: 34394182 NR Description: putative nucleic acid binding protein
  misc_feature (1)..(162): Homolog of NCBI NO: 14192880 NR Description: Putative nucleic acid binding protein [Oryza
  misc_feature (1)..(167): Homolog of NCBI NO: 30687843 NR Description: zinc finger protein - like [Arabidopsis thaliana]
  misc_feature (1)..(167): Homolog of NCBI NO: 15229157 NR Description: nucleic acid binding protein-related [Arabidopsis
  misc_feature (1)..(167): Homolog of NCBI NO: 15239624 NR Description: nucleic acid binding protein - like [Arabidopsis
  misc_feature (1)..(165): Homolog of NCBI NO: 25346630 NR Description: F14L17.29 protein - Arabidopsis thaliana
  misc_feature (1)..(167): Homolog of NCBI NO: 21593407 NR Description: putative PHD-type zinc finger protein
  misc_feature (1)..(167): Homolog of NCBI NO: 15226967 NR Description: PHD-type zinc finger protein -related
  misc_feature (1)..(165): Homolog of NCBI NO: 15223786 NR Description: nucleic acid binding protein (alfin-1) -related
  misc_feature (1)..(168): Homolog of NCBI NO: 7488751 NR Description: probable zinc finger protein - alfalfa (fragment)
MQEKDWLSLVAVHSDSWLLAVAFYFGARFGFGKNERKRLFQMINDLPTIFELVTGSAKQSKDQPAAHNNGSKCKSSGKSHQSESQAKGMKMSAPPKEEDESGEEEEEDDEQGATCGACGDNYGTDEFWICCDMCERWFHGKCVKITPAKAEHIKQYKCPSCSNKRVRV

SEQ ID NO: 52404 - protein, 127 aa, Glycine max
  peptide (1)..(127): Ceres Seq. ID no. 14314437
  misc_feature (73)..(123): Pfam Name: PHD-finger Pfam Description: PHD-finger
  misc_feature (1)..(121): Homolog of NCBI NO: 34394182 NR Description: putative nucleic acid binding protein
  misc_feature (1)..(121): Homolog of NCBI NO: 14192880 NR Description: Putative nucleic acid binding protein [Oryza
  misc_feature (1)..(126): Homolog of NCBI NO: 30687843 NR Description: zinc finger protein - like [Arabidopsis thaliana]
  misc_feature (1)..(126): Homolog of NCBI NO: 15229157 NR Description: nucleic acid binding protein-related [Arabidopsis
  misc_feature (1)..(126): Homolog of NCBI NO: 15239624 NR Description: nucleic acid binding protein - like [Arabidopsis
  misc_feature (1)..(124): Homolog of NCBI NO: 25346630 NR Description: F14L17.29 protein - Arabidopsis thaliana
  misc_feature (1)..(126): Homolog of NCBI NO: 21593407 NR Description: putative PHD-type zinc finger protein
  misc_feature (1)..(126): Homolog of NCBI NO: 15226967 NR Description: PHD-type zinc finger protein -related
  misc_feature (1)..(124): Homolog of NCBI NO: 15223786 NR Description: nucleic acid binding protein (alfin-1) -related
  misc_feature (1)..(127): Homolog of NCBI NO: 7488751 NR Description: probable zinc finger protein - alfalfa (fragment)
MINDLPTIFELVTGSAKQSKDQPAAHNNGSKCKSSGKSHQSESQAKGMKMSAPPKEEDESGEEEEEDDEQGATCGACGDNYGTDEFWICCDMCERWFHGKCVKITPAKAEHIKQYKCPSCSNKRVRV

SEQ ID NO: 52405 - DNA, 1282 bp, Glycine max
  misc_feature (1)..(1282): Ceres Seq. ID no. 14314464
accacataaaactaaaagagcatctcctcttagctcttgcttccttctcgagcgtaaaccctagatcccatctccaaaatgttcagatccgtgctcgtccgttcctcttcatcggcgaagcaatcgcttctccaccgcagcttctcctcctccgtccccgagcgcaaagtcgccatcctcggggccgccggtggaatcgggcagcctctcgctctcctcatgaagctcaaccccctcgtctcaagcctctccctcttcgatatcgcaaacacccctggagtcgccgctgatgtcggtcacatcaacaccagatctgaggtggttggatacatgggagatgatgaattggcgaaagctcttgcaggagctgacctcgttatcatccctgctggtgtccccaggaagcctggcatgactcgtgatgatcttttcaacatcaacgctggtattgtcaagaacctttgctctgccatcgccaagtactgccctcatgcacttgttaacatgatcagcaacccagtgaactccactgttccaattgcagctgagatattcaagaaggctggtatgtacgatgagaagaagttgtttggtgtcaccactcttgacgttgttagggccaagactttctacgctggaaaggctaatgtccctgttgctgaagttaatgttccggtgattggtggtcatgctggggttacaattctcccactcttctctcaggccactcctcaggccaacttgtctaatgatgtactcaccgctctcaccaagcgtacccaagatggaggtaccgaagtcgtggaggctaaagcaggaaaaggttcagctacattgtcaatggcctatgctggagcactatttgctgatgcatgcttgaaaggactcaacggagttccagacgttgtggaatgttcatacgtgcagtccaccatcactgagcttcctttctttgcctcaaaggtgaggttggggaagaacggtgtggaggaggttcttgatttggggccactctcagactttgagaaacaagggttggaagcactgaagccagaactcaagtcttccatcgagaagggtgttaagtttgcaaaccaatgagttaaatcgatttgagtcgggttatttttccaattttccggttatattatcgcccttcattgggttgcatcaataaaattcatgtgttgaggctttttgggttctttcccaaagcacagagataaaaaaaactgtaacatgtaaggtttctttcttatataacaatgtttttttctgtcat

SEQ ID NO: 52406 - protein, 340 aa, Glycine max
  peptide (1)..(340): Ceres Seq. ID no. 14314465
  misc_feature (174)..(338): Pfam Name: lactate/malate dehydrogenase, alpha/beta Pfam Description: lactate/malate dehydrogenase, alpha/beta
  misc_feature (1)..(339): Homolog of NCBI NO: 126896 NR Description: Malate dehydrogenase, mitochondrial precursor
  misc_feature (1)..(340): Homolog of NCBI NO: 15232468 NR Description: malate dehydrogenase
  misc_feature (1)..(340): Homolog of NCBI NO: 2497857 NR Description: MALATE DEHYDROGENASE, MITOCHONDRIAL PRECURSOR
  misc_feature (1)..(340): Homolog of NCBI NO: 7769871 NR Description: F12M16.14 [Arabidopsis thaliana]
  misc_feature (1)..(340): Homolog of NCBI NO: 21592905 NR Description: mitochondrial NAD-dependent malate dehydrogenase
  misc_feature (1)..(340): Homolog of NCBI NO: 18404382 NR Description: malate dehydrogenase
MFRSVLVRSSSSAKQSLLHRSFSSSVPERKVAILGAAGGIGQPLALLMKLNPLVSSLSLFDIANTPGVAADVGHINTRSEVVGYMGDDELAKALAGADLVIIPAGVPRKPGMTRDDLFNINAGIVKNLCSAIAKYCPHALVNMISNPVNSTVPIAAEIFKKAGMYDEKKLFGVTTLDVVRAKTFYAGKANVPVAEVNVPVIGGHAGVTILPLFSQATPQANLSNDVLTALTKRTQDGGTEVVEAKAGKGSATLSMAYAGALFADACLKGLNGVPDVVECSYVQSTITELPFFASKVRLGKNGVEEVLDLGPLSDFEKQGLEALKPELKSSIEKGVKFANQ

SEQ ID NO: 52407 - protein, 293 aa, Glycine max
  peptide (1)..(293): Ceres Seq. ID no. 14314466
  misc_feature (127)..(291): Pfam Name: lactate/malate dehydrogenase, alpha/beta Pfam Description: lactate/malate dehydrogenase, alpha/beta
  misc_feature (1)..(292): Homolog of NCBI NO: 126896 NR Description: Malate dehydrogenase, mitochondrial precursor
  misc_feature (1)..(293): Homolog of NCBI NO: 15232468 NR Description: malate dehydrogenase
  misc_feature (1)..(293): Homolog of NCBI NO: 2497857 NR Description: MALATE DEHYDROGENASE, MITOCHONDRIAL PRECURSOR
  misc_feature (1)..(293): Homolog of NCBI NO: 7769871 NR Description: F12M16.14 [Arabidopsis thaliana]
  misc_feature (1)..(293): Homolog of NCBI NO: 21592905 NR Description: mitochondrial NAD-dependent malate dehydrogenase
  misc_feature (1)..(293): Homolog of NCBI NO: 18404382 NR Description: malate dehydrogenase
MKLNPLVSSLSLFDIANTPGVAADVGHINTRSEVVGYMGDDELAKALAGADLVIIPAGVPRKPGMTRDDLFNINAGIVKNLCSAIAKYCPHALVNMISNPVNSTVPIAAEIFKKAGMYDEKKLFGVTTLDVVRAKTFYAGKANVPVAEVNVPVIGGHAGVTILPLFSQATPQANLSNDVLTALTKRTQDGGTEVVEAKAGKGSATLSMAYAGALFADACLKGLNGVPDVVECSYVQSTITELPFFASKVRLGKNGVEEVLDLGPLSDFEKQGLEALKPELKSSIEKGVKFANQ

SEQ ID NO: 52408 - protein, 256 aa, Glycine max
  peptide (1)..(256): Ceres Seq. ID no. 14314467
  misc_feature (90)..(254): Pfam Name: lactate/malate dehydrogenase, alpha/beta Pfam Description: lactate/malate dehydrogenase, alpha/beta
  misc_feature (1)..(255): Homolog of NCBI NO: 126896 NR Description: Malate dehydrogenase, mitochondrial precursor
  misc_feature (1)..(256): Homolog of NCBI NO: 15232468 NR Description: malate dehydrogenase
  misc_feature (1)..(256): Homolog of NCBI NO: 2497857 NR Description: MALATE DEHYDROGENASE, MITOCHONDRIAL PRECURSOR
  misc_feature (1)..(256): Homolog of NCBI NO: 7769871 NR Description: F12M16.14 [Arabidopsis thaliana]
  misc_feature (1)..(256): Homolog of NCBI NO: 21592905 NR Description: mitochondrial NAD-dependent malate dehydrogenase
  misc_feature (1)..(256): Homolog of NCBI NO: 18404382 NR Description: malate dehydrogenase
MGDDELAKALAGADLVIIPAGVPRKPGMTRDDLFNINAGIVKNLCSAIAKYCPHALVNMISNPVNSTVPIAAEIFKKAGMYDEKKLFGVTTLDVVRAKTFYAGKANVPVAEVNVPVIGGHAGVTILPLFSQATPQANLSNDVLTALTKRTQDGGTEVVEAKAGKGSATLSMAYAGALFADACLKGLNGVPDVVECSYVQSTITELPFFASKVRLGKNGVEEVLDLGPLSDFEKQGLEALKPELKSSIEKGVKFANQ

SEQ ID NO: 52409 - DNA, 1525 bp, Glycine max
  misc_feature (1)..(1525): Ceres Seq. ID no. 14314449
attccaatccaccctcgccactccttcgatccgaatcatcttttccgcccacacacaagttgggtttttttgatataattgataatgggtgatagcagtgttccatctgggtctccaaatgcaaaatcagatcttgttgacagagacttggcggtttccaacaacgcgtcgtcgttggaaaccattgtgcaaagtttccaagattcaatgtctcttggtaagagacacaagttctgggaaactcagcctgtggggcaatacaaggatgttggggactcaagtttgcctgagggcccgattgagcccccgacacctttgtccgaggttaagcaggagccttacaaccttcccagtgcttatgagtggacaacatgtgacatggactctgaggaaatctgtgatgaggtttatgcccttctcaagaataactatgttgaggatgatgagaacatgttcaggttcaactattccaaggagtttctcagttgggcgttgcgtgttccgggctattaccagagttggcacattggcgtgagagccaagacgtcaaagaagttggttgctttcatcagtggcatccccgccaggatcagggttaatgaggaggttgtgaagatggccgagatcaatttcttgtgtgttcataagaagctcaggtcaaagagacttgcacctgttatgatcaaggaggtcaccaggagggttcatttggagaatatttggcaggcggcctatacggctggagttgttcttccaacgccaatcacgacttgtcaatattggcaccgatcgttgaatccgaagaagctaattgatgttgggttttcaaggcttggtgctaggatgacgatgagccgcactataaagctttacaaattgcctgattcaacggttactcctggattcaggaaaatggagcttcgggatgtccctgctgttactcggctgcttaggaactacttgagccagtttgttgttgcacctgattttgatgaaaatgatgttgaacattggcttcttcccaatgagaatgtggtggatagtttcttggttgagagtccagagaatcatgagatcacagacttctgcagcttctatactcttccttcttccatccttggaaatcaaaattactcaattttgaaagctgcttattcttattataatgtctccaccaaaactccgctgacccagttgatgaatgatgtgctgattgtagcaaagcaaaaggattttgatgttttcaatgccttggatgtaatgcacaatgagagtttcctcaaagaactcaagtttggaccaggagatggacagcttcactactacttgtacaattataggattcgtagtgccttgaaaccatctggacttggacttgtgctcttgtagtttgatactattcagttttggtttcactatgtaattggtaaaaccattcatttgttttgttttattagcttgttgtttcaacattatttcttgttcctttcaaatattggcaattaacatattaggttttcagggc

SEQ ID NO: 52410 - protein, 434 aa, Glycine max
  peptide (1)..(434): Ceres Seq. ID no. 14314450
  misc_feature (244)..(433): Pfam Name: Myristoyl-CoA:protein N-myristoyltransferase, Pfam Description: Myristoyl-CoA:protein N-myristoyltransferase,
  misc_feature (46)..(433): Homolog of NCBI NO: 6679084 NR Description: N-myristoyltransferase 2 [Mus musculus]
  misc_feature (47)..(433): Homolog of NCBI NO: 4758816 NR Description: glycylpeptide N-tetradecanoyltransferase 2 [Homo
  misc_feature (47)..(433): Homolog of NCBI NO: 30584349 NR Description: Homo sapiens N-myristoyltransferase 2 [synthetic
  misc_feature (47)..(433): Homolog of NCBI NO: 13623535 NR Description: N-myristoyltransferase 2 [Homo sapiens]
  misc_feature (46)..(433): Homolog of NCBI NO: 27735395 NR Description: Similar to N-myristoyltransferase 1 [Xenopus
  misc_feature (46)..(433): Homolog of NCBI NO: 13924516 NR Description: N-myristoyltransferase-like protein 2
  misc_feature (1)..(80): Homolog of NCBI NO: 8777442 NR Description: N-myristoyl transferase [Arabidopsis thaliana]
  misc_feature (144)..(434): Homolog of NCBI NO: 8777442 NR Description: N-myristoyl transferase [Arabidopsis thaliana]
  misc_feature (29)..(434): Homolog of NCBI NO: 34910442 NR Description: putative N-myristoyl transferase
  misc_feature (1)..(434): Homolog of NCBI NO: 18423927 NR Description: N-myristoyl transferase [Arabidopsis thaliana]
MGDSSVPSGSPNAKSDLVDRDLAVSNNASSLETIVQSFQDSMSLGKRHKFWETQPVGQYKDVGDSSLPEGPIEPPTPLSEVKQEPYNLPSAYEWTTCDMDSEEICDEVYALLKNNYVEDDENMFRFNYSKEFLSWALRVPGYYQSWHIGVRAKTSKKLVAFISGIPARIRVNEEVVKMAEINFLCVHKKLRSKRLAPVMIKEVTRRVHLENIWQAAYTAGVVLPTPITTCQYWHRSLNPKKLIDVGFSRLGARMTMSRTIKLYKLPDSTVTPGFRKMELRDVPAVTRLLRNYLSQFVVAPDFDENDVEHWLLPNENVVDSFLVESPENHEITDFCSFYTLPSSILGNQNYSILKAAYSYYNVSTKTPLTQLMNDVLIVAKQKDFDVFNALDVMHNESFLKELKFGPGDGQLHYYLYNYRIRSALKPSGLGLVLL

SEQ ID NO: 52411 - protein, 393 aa, Glycine max
  peptide (1)..(393): Ceres Seq. ID no. 14314451
  misc_feature (203)..(392): Pfam Name: Myristoyl-CoA:protein N-myristoyltransferase, Pfam Description: Myristoyl-CoA:protein N-myristoyltransferase,
  misc_feature (5)..(392): Homolog of NCBI NO: 6679084 NR Description: N-myristoyltransferase 2 [Mus musculus]
  misc_feature (6)..(392): Homolog of NCBI NO: 4758816 NR Description: glycylpeptide N-tetradecanoyltransferase 2 [Homo
  misc_feature (6)..(392): Homolog of NCBI NO: 30584349 NR Description: Homo sapiens N-myristoyltransferase 2 [synthetic
  misc_feature (6)..(392): Homolog of NCBI NO: 13623535 NR Description: N-myristoyltransferase 2 [Homo sapiens]
  misc_feature (5)..(392): Homolog of NCBI NO: 27735395 NR Description: Similar to N-myristoyltransferase 1 [Xenopus
  misc_feature (5)..(392): Homolog of NCBI NO: 13924516 NR Description: N-myristoyltransferase-like protein 2
  misc_feature (1)..(39): Homolog of NCBI NO: 8777442 NR Description: N-myristoyl transferase [Arabidopsis thaliana]
  misc_feature (103)..(393): Homolog of NCBI NO: 8777442 NR Description: N-myristoyl transferase [Arabidopsis thaliana]
  misc_feature (1)..(393): Homolog of NCBI NO: 34910442 NR Description: putative N-myristoyl transferase
  misc_feature (1)..(393): Homolog of NCBI NO: 18423927 NR Description: N-myristoyl transferase [Arabidopsis thaliana]
MSLGKRHKFWETQPVGQYKDVGDSSLPEGPIEPPTPLSEVKQEPYNLPSAYEWTTCDMDSEEICDEVYALLKNNYVEDDENMFRFNYSKEFLSWALRVPGYYQSWHIGVRAKTSKKLVAFISGIPARIRVNEEVVKMAEINFLCVHKKLRSKRLAPVMIKEVTRRVHLENIWQAAYTAGVVLPTPITTCQYWHRSLNPKKLIDVGFSRLGARMTMSRTIKLYKLPDSTVTPGFRKMELRDVPAVTRLLRNYLSQFVVAPDFDENDVEHWLLPNENVVDSFLVESPENHEITDFCSFYTLPSSILGNQNYSILKAAYSYYNVSTKTPLTQLMNDVLIVAKQKDFDVFNALDVMHNESFLKELKFGPGDGQLHYYLYNYRIRSALKPSGLGLVLL

SEQ ID NO: 52412 - protein, 336 aa, Glycine max
  peptide (1)..(336): Ceres Seq. ID no. 14314452
  misc_feature (146)..(335): Pfam Name: Myristoyl-CoA:protein N-myristoyltransferase, Pfam Description: Myristoyl-CoA:protein N-myristoyltransferase,
  misc_feature (1)..(335): Homolog of NCBI NO: 22902271 NR Description: Nmt2 protein [Mus musculus]
  misc_feature (1)..(335): Homolog of NCBI NO: 6679084 NR Description: N-myristoyltransferase 2 [Mus musculus]
  misc_feature (1)..(335): Homolog of NCBI NO: 4758816 NR Description: glycylpeptide N-tetradecanoyltransferase 2 [Homo
  misc_feature (1)..(335): Homolog of NCBI NO: 30584349 NR Description: Homo sapiens N-myristoyltransferase 2 [synthetic
  misc_feature (1)..(335): Homolog of NCBI NO: 13623535 NR Description: N-myristoyltransferase 2 [Homo sapiens]
  misc_feature (1)..(335): Homolog of NCBI NO: 27735395 NR Description: Similar to N-myristoyltransferase 1 [Xenopus
  misc_feature (1)..(335): Homolog of NCBI NO: 13924516 NR Description: N-myristoyltransferase-like protein 2
  misc_feature (46)..(336): Homolog of NCBI NO: 8777442 NR Description: N-myristoyl transferase [Arabidopsis thaliana]
  misc_feature (1)..(336): Homolog of NCBI NO: 34910442 NR Description: putative N-myristoyl transferase
  misc_feature (1)..(336): Homolog of NCBI NO: 18423927 NR Description: N-myristoyl transferase [Arabidopsis thaliana]
MDSEEICDEVYALLKNNYVEDDENMFRFNYSKEFLSWALRVPGYYQSWHIGVRAKTSKKLVAFISGIPARIRVNEEVVKMAEINFLCVHKKLRSKRLAPVMIKEVTRRVHLENIWQAAYTAGVVLPTPITTCQYWHRSLNPKKLIDVGFSRLGARMTMSRTIKLYKLPDSTVTPGFRKMELRDVPAVTRLLRNYLSQFVVAPDFDENDVEHWLLPNENVVDSFLVESPENHEITDFCSFYTLPSSILGNQNYSILKAAYSYYNVSTKTPLTQLMNDVLIVAKQKDFDVFNALDVMHNESFLKELKFGPGDGQLHYYLYNYRIRSALKPSGLGLVLL

SEQ ID NO: 52413 - DNA, 1503 bp, Glycine max
  misc_feature (1)..(1503): Ceres Seq. ID no. 14316158
aaacccaaacacaacaacacaaagaaaaaaagagcacaaacagaccaattccaacggttgaattttttggctgaagacaccccaccgacgttagtcaaataaaacatgtcttgctccgtcgcggtttccaattcgccggtgttctctccttcttcttccctcttctgctcgaagccctccatcatctcttcttcgccggaatccctctcgctctctctctcgcatctcaaaccttccaactcttctacgacgtcgtcttgttcttcaccctctgctgctgcttcttcatcttcttctccttcttctccgtttcggcttcgccttcccaagcctcccaccgtgttctctgcttcttcttctgcttcgtctacctctccgaacggcaccgttttgaagaggaagcgacccgctaggttggacatacccgtttcctctctcacctttgcggttccgcccacgccctccgcggcggcgcgtgacttggtcgaggctgaggaagatgggtttggggtgtactgcaagagaggcaggagggagtacatggaggatcgttacaccgctgggaataatcttcgcggagaacacaaactggctttttttggcatatttgatgggcacggtggtgcaaaagctgctgaatttgctgcaaataacttgcaaaagaatgtgttagatgaagttattgtgagagatgaagatgatgttgaggaggcagtgaagcgtgggtacctgaacaccgattcggatttcctaaaggaggatctccatggtggctcttgctgtgtgacagcattgattaggaatggtaacctcgttgtgtccaacgcgggtgattgccgtgctgtcattagcagagggggtgttgctgaggccctaacatctgatcacaggccttcaagggaagatgaaagggacagaattgagagcctgggtggctatgtcgatttatgccgcggtgtttggaggatccagggatctctggctgtgtcaaggggaattggagatagacacctgaaacaatgggtgacagcagaacctgagaccaaagttctccgaattgaacctgaacatgacttgttaattttagcttcagatggattatgggataaggttggtaatcaggaagcagtagatattgctcgttcttttctcgtaggcaacaacaaatcacaaccattgctgcaggcttgtaaaaagcttgtagatttgtctgtttcacgaggctctttggatgatacaagtgtcatgctaatcaaattggagcactatatttaaagttaccttagtacaactaaggtttcaagattattgcagttgagatcgcattgaggtcaagattgcgttgcagtttgtgatttttgaacaaccttggtggtgcctgatgatggatagagagtagctgattcttttctgtatatataaatctgactaccttattggaattttttgtacccgcgtaggggagggatattaacaataacatttagtaattatttttttcat

SEQ ID NO: 52414 - protein, 389 aa, Glycine max
  peptide (1)..(389): Ceres Seq. ID no. 14316159
  misc_feature (132)..(378): Pfam Name: Protein phosphatase 2C Pfam Description: Protein phosphatase 2C
  misc_feature (200)..(389): Homolog of NCBI NO: 28393269 NR Description: putative protein phosphatase 2C (PP2C)
  misc_feature (142)..(355): Homolog of NCBI NO: 23506609 NR Description: putative serine/threonine phosphatase [Leymus
  misc_feature (128)..(388): Homolog of NCBI NO: 6478146 NR Description: putative serine/threonine phosphatase type 2c
  misc_feature (54)..(389): Homolog of NCBI NO: 15225656 NR Description: protein phosphatase 2C (PP2C), putative
  misc_feature (276)..(387): Homolog of NCBI NO: 25352225 NR Description: hypothetical protein [imported] - Arabidopsis
  misc_feature (1)..(274): Homolog of NCBI NO: 25352225 NR Description: hypothetical protein [imported] - Arabidopsis
  misc_feature (1)..(388): Homolog of NCBI NO: 30013681 NR Description: Avr9/Cf-9 rapidly elicited protein 284 [Nicotiana
  misc_feature (1)..(387): Homolog of NCBI NO: 15222312 NR Description: protein phosphatase 2C (PP2C), putative
  misc_feature (1)..(389): Homolog of NCBI NO: 15227687 NR Description: protein phosphatase 2C (PP2C), putative
  misc_feature (1)..(389): Homolog of NCBI NO: 7488754 NR Description: protein phosphatase 2C - alfalfa
MSCSVAVSNSPVFSPSSSLFCSKPSIISSSPESLSLSLSHLKPSNSSTTSSCSSPSAAASSSSSPSSPFRLRLPKPPTVFSASSSASSTSPNGTVLKRKRPARLDIPVSSLTFAVPPTPSAAARDLVEAEEDGFGVYCKRGRREYMEDRYTAGNNLRGEHKLAFFGIFDGHGGAKAAEFAANNLQKNVLDEVIVRDEDDVEEAVKRGYLNTDSDFLKEDLHGGSCCVTALIRNGNLVVSNAGDCRAVISRGGVAEALTSDHRPSREDERDRIESLGGYVDLCRGVWRIQGSLAVSRGIGDRHLKQWVTAEPETKVLRIEPEHDLLILASDGLWDKVGNQEAVDIARSFLVGNNKSQPLLQACKKLVDLSVSRGSLDDTSVMLIKLEHYI

SEQ ID NO: 52415 - protein, 244 aa, Glycine max
  peptide (1)..(244): Ceres Seq. ID no. 14316160
  misc_feature (1)..(233): Pfam Name: Protein phosphatase 2C Pfam Description: Protein phosphatase 2C
  misc_feature (55)..(244): Homolog of NCBI NO: 28393269 NR Description: putative protein phosphatase 2C (PP2C)
  misc_feature (1)..(210): Homolog of NCBI NO: 23506609 NR Description: putative serine/threonine phosphatase [Leymus
  misc_feature (1)..(243): Homolog of NCBI NO: 6478146 NR Description: putative serine/threonine phosphatase type 2c
  misc_feature (1)..(244): Homolog of NCBI NO: 15225656 NR Description: protein phosphatase 2C (PP2C), putative
  misc_feature (131)..(242): Homolog of NCBI NO: 25352225 NR Description: hypothetical protein [imported] - Arabidopsis
  misc_feature (1)..(129): Homolog of NCBI NO: 25352225 NR Description: hypothetical protein [imported] - Arabidopsis
  misc_feature (1)..(243): Homolog of NCBI NO: 30013681 NR Description: Avr9/Cf-9 rapidly elicited protein 284 [Nicotiana
  misc_feature (1)..(242): Homolog of NCBI NO: 15222312 NR Description: protein phosphatase 2C (PP2C), putative
  misc_feature (1)..(244): Homolog of NCBI NO: 15227687 NR Description: protein phosphatase 2C (PP2C), putative
  misc_feature (1)..(244): Homolog of NCBI NO: 7488754 NR Description: protein phosphatase 2C - alfalfa
MEDRYTAGNNLRGEHKLAFFGIFDGHGGAKAAEFAANNLQKNVLDEVIVRDEDDVEEAVKRGYLNTDSDFLKEDLHGGSCCVTALIRNGNLVVSNAGDCRAVISRGGVAEALTSDHRPSREDERDRIESLGGYVDLCRGVWRIQGSLAVSRGIGDRHLKQWVTAEPETKVLRIEPEHDLLILASDGLWDKVGNQEAVDIARSFLVGNNKSQPLLQACKKLVDLSVSRGSLDDTSVMLIKLEHYI

SEQ ID NO: 52416 - DNA, 402 bp, Glycine max
  misc_feature (1)..(402): Ceres Seq. ID no. 14306345
aaaaagtgtatatagatatcgattgtagtgagctgtatcttccatctttcaatacattgaattaggtttataatttaaaaattttactcaaggaaaatgagtggctttagagcagcaggaatgaactacattcaagtgtccaacatttgtgctaagctgctaaggcgagctctaaagccaaatttgaagacagaggctctaaaacgagacgaatctgttgtgaggttcactccatggaaagatggaaaggcaatcactgaaaaataaagagattccggaaagattaagaggacgacataaggaaacccagcagcagttcaacataaagtcacctaaaaccatcttagattgaattgttaattatttaagctgtttttactcgctattaaagagtgttaattt

SEQ ID NO: 52417 - protein, 56 aa, Glycine max
  peptide (1)..(56): Ceres Seq. ID no. 14306346
  misc_feature (2)..(50): Pfam Name: Mitochondrial ATP synthase epsilon chain Pfam Description: Mitochondrial ATP synthase epsilon chain
  misc_feature (2)..(50): Pfam Name: Mitochondrial ATP synthase epsilon chain Pfam Description: Mitochondrial ATP synthase epsilon chain
  misc_feature (4)..(52): Homolog of NCBI NO: 21068676 NR Description: putative epsilon subunit of mitochondrial
  misc_feature (1)..(56): Homolog of NCBI NO: 24645608 NR Description: CG31477-PA [Drosophila melanogaster]
  misc_feature (1)..(51): Homolog of NCBI NO: 17864256 NR Description: stunted CG9032-PA [Drosophila melanogaster]
  misc_feature (1)..(56): Homolog of NCBI NO: 24642319 NR Description: stunted CG9032-PB [Drosophila melanogaster]
  misc_feature (1)..(56): Homolog of NCBI NO: 24645608 NR Description: CG31477-PA [Drosophila melanogaster]
  misc_feature (1)..(56): Homolog of NCBI NO: 24642319 NR Description: stunted CG9032-PB [Drosophila melanogaster]
  misc_feature (1)..(56): Homolog of NCBI NO: 31231703 NR Description: ENSANGP00000025012 [Anopheles gambiae]
  misc_feature (1)..(51): Homolog of NCBI NO: 31203819 NR Description: ENSANGP00000012584 [Anopheles gambiae]
  misc_feature (1)..(52): Homolog of NCBI NO: 31210015 NR Description: ENSANGP00000010662 [Anopheles gambiae]
  misc_feature (1)..(51): Homolog of NCBI NO: 17864256 NR Description: stunted CG9032-PA [Drosophila melanogaster]
  misc_feature (4)..(52): Homolog of NCBI NO: 21068676 NR Description: putative epsilon subunit of mitochondrial
  misc_feature (1)..(52): Homolog of NCBI NO: 31210015 NR Description: ENSANGP00000010662 [Anopheles gambiae]
  misc_feature (1)..(56): Homolog of NCBI NO: 31231703 NR Description: ENSANGP00000025012 [Anopheles gambiae]
  misc_feature (1)..(51): Homolog of NCBI NO: 31203819 NR Description: ENSANGP00000012584 [Anopheles gambiae]
MSGFRAAGMNYIQVSNICAKLLRRALKPNLKTEALKRDESVVRFTPWKDGKAITEK

SEQ ID NO: 52418 - protein, 48 aa, Glycine max
  peptide (1)..(48): Ceres Seq. ID no. 14306347
  misc_feature (1)..(42): Pfam Name: Mitochondrial ATP synthase epsilon chain Pfam Description: Mitochondrial ATP synthase epsilon chain
  misc_feature (1)..(42): Pfam Name: Mitochondrial ATP synthase epsilon chain Pfam Description: Mitochondrial ATP synthase epsilon chain
  misc_feature (1)..(44): Homolog of NCBI NO: 21068676 NR Description: putative epsilon subunit of mitochondrial
  misc_feature (1)..(48): Homolog of NCBI NO: 24645608 NR Description: CG31477-PA [Drosophila melanogaster]
  misc_feature (1)..(43): Homolog of NCBI NO: 17864256 NR Description: stunted CG9032-PA [Drosophila melanogaster]
  misc_feature (1)..(48): Homolog of NCBI NO: 24642319 NR Description: stunted CG9032-PB [Drosophila melanogaster]
  misc_feature (1)..(48): Homolog of NCBI NO: 24645608 NR Description: CG31477-PA [Drosophila melanogaster]
  misc_feature (1)..(48): Homolog of NCBI NO: 24642319 NR Description: stunted CG9032-PB [Drosophila melanogaster]
  misc_feature (1)..(48): Homolog of NCBI NO: 31231703 NR Description: ENSANGP00000025012 [Anopheles gambiae]
  misc_feature (1)..(43): Homolog of NCBI NO: 31203819 NR Description: ENSANGP00000012584 [Anopheles gambiae]
  misc_feature (1)..(44): Homolog of NCBI NO: 31210015 NR Description: ENSANGP00000010662 [Anopheles gambiae]
  misc_feature (1)..(43): Homolog of NCBI NO: 17864256 NR Description: stunted CG9032-PA [Drosophila melanogaster]
  misc_feature (1)..(44): Homolog of NCBI NO: 21068676 NR Description: putative epsilon subunit of mitochondrial
  misc_feature (1)..(44): Homolog of NCBI NO: 31210015 NR Description: ENSANGP00000010662 [Anopheles gambiae]
  misc_feature (1)..(48): Homolog of NCBI NO: 31231703 NR Description: ENSANGP00000025012 [Anopheles gambiae]
  misc_feature (1)..(43): Homolog of NCBI NO: 31203819 NR Description: ENSANGP00000012584 [Anopheles gambiae]
MNYIQVSNICAKLLRRALKPNLKTEALKRDESVVRFTPWKDGKAITEK

SEQ ID NO: 52419 - protein, 36 aa, Glycine max
  peptide (1)..(36): Ceres Seq. ID no. 14306348
MERQSLKNKEIPERLRGRHKETQQQFNIKSPKTILD

SEQ ID NO: 52420 - DNA, 1320 bp, Glycine max
  misc_feature (1)..(1320): Ceres Seq. ID no. 14314526
aacccacaccacgctgttgaattgcgcaaccctgcacctgcacccgtaccgcagtgacaacatcggcgtgcataaactctaaaccctactatgtccgaagacaagtacgacgtgctcctctattacaagtacgttgaaattcccaacctcaacgacctcctcaccttctaccactccaactgctcctccctcagcctcctcggtcgtgttcgcctttcttctcacgacgtcaatgtcaccgttggcggcaacttatcctctctcaagaatcacatcgaagccctcaaagcctacagaaccttgtttcaccacactgatttcaagctcgacacttgtcatcatccattaaacaacaaagtagcctaggaatgtggattcacttccctctctattcgaatcatcgacgaacttgttactctcagttcccatccactgttaaagtcaccggatatctcaaatgtcggaaagcatctctctgccctcgacttccattcttccctccacaataccaatgacaatggaagtaggagctgttgcagccatgagatatgtaaaggatggaattaaagttgccaggttagtgatgcaacatactaaacacactttgctggtaggagagaaagcatcagaatttgctatttcaatgcgtcttccaggtcccatgaacttgagttcaccagaatctatggagaagtgggccaaatggaaagatagtcgttgtcaaccaaatttcaagaaaaatgtatcacctgcaaatagttgtggtccttatcgtccaacaaattatctggggcatcctgatgaaacatgctccagtactgtttagatgctaactagtaattccaatttacttcttgttagtcttcatagccatgatactatatcaatggctgttattggtagagtaagatataacaaaaaattgatttgtattggaacctggttagtattgaaacctgattattctattcatcggtcgaaggctgcaaggaatagacaacaatgattttttatgcttgatcaatgattcattttggagcaagttatgacattgatcaatgattttttaactcttattttttatgcttgatctatcttcccgttatagattaatcagactaatctgaaatgaagttattgttgatcatgttaataattcaaatattttttgttttgggtattgggggagagattaaggaactggttaaggattattgtagcagaaaagttttcttattatagcatttcttgagggatttgttttgttaatctataagcagacatttcttgaggaatcaattttttttttctttttgagct

SEQ ID NO: 52421 - protein, 122 aa, Glycine max
  peptide (1)..(122): Ceres Seq. ID no. 14314527
  misc_feature (19)..(122): Pfam Name: Asparaginase Pfam Description: Asparaginase
  misc_feature (21)..(122): Homolog of NCBI NO: 7506249 NR Description: hypothetical protein R04B3.2 - Caenorhabditis
  misc_feature (21)..(122): Homolog of NCBI NO: 17569239 NR Description: glycosylasparaginase precursor (39.4 kD) (XD90)
  misc_feature (21)..(122): Homolog of NCBI NO: 20863490 NR Description: aspartylglucosaminidase [Mus musculus]
  misc_feature (21)..(122): Homolog of NCBI NO: 34878389 NR Description: similar to precursor (Glycosylasparaginase) (Aspartylglucosaminidase)
  misc_feature (20)..(107): Homolog of NCBI NO: 28573318 NR Description: CG1827-PA [Drosophila melanogaster]
  misc_feature (20)..(122): Homolog of NCBI NO: 6685237 NR Description: N(4)-(Beta-N-acetylglucosaminyl)-L-asparaginase (Aspartylglucosaminidase)
  misc_feature (20)..(122): Homolog of NCBI NO: 31239653 NR Description: ENSANGP00000016583 [Anopheles gambiae]
  misc_feature (20)..(107): Homolog of NCBI NO: 40882569 NR Description: AT24323p [Drosophila melanogaster]
  misc_feature (20)..(107): Homolog of NCBI NO: 24652135 NR Description: CG1827-PB [Drosophila melanogaster]
  misc_feature (19)..(122): Homolog of NCBI NO: 15240278 NR Description: glycosylasparaginase - like protein [Arabidopsis
MSESISLPSTSILPSTIPMTMEVGAVAAMRYVKDGIKVARLVMQHTKHTLLVGEKASEFAISMRLPGPMNLSSPESMEKWAKWKDSRCQPNFKKNVSPANSCGPYRPTNYLGHPDETCSSTV

SEQ ID NO: 52422 - protein, 104 aa, Glycine max
  peptide (1)..(104): Ceres Seq. ID no. 14314528
  misc_feature (1)..(104): Pfam Name: Asparaginase Pfam Description: Asparaginase
  misc_feature (3)..(104): Homolog of NCBI NO: 7506249 NR Description: hypothetical protein R04B3.2 - Caenorhabditis
  misc_feature (3)..(104): Homolog of NCBI NO: 17569239 NR Description: glycosylasparaginase precursor (39.4 kD) (XD90)
  misc_feature (3)..(104): Homolog of NCBI NO: 20863490 NR Description: aspartylglucosaminidase [Mus musculus]
  misc_feature (3)..(104): Homolog of NCBI NO: 34878389 NR Description: similar to precursor (Glycosylasparaginase) (Aspartylglucosaminidase)
  misc_feature (2)..(89): Homolog of NCBI NO: 28573318 NR Description: CG1827-PA [Drosophila melanogaster]
  misc_feature (2)..(104): Homolog of NCBI NO: 6685237 NR Description: N(4)-(Beta-N-acetylglucosaminyl)-L-asparaginase (Aspartylglucosaminidase)
  misc_feature (2)..(104): Homolog of NCBI NO: 31239653 NR Description: ENSANGP00000016583 [Anopheles gambiae]
  misc_feature (2)..(89): Homolog of NCBI NO: 40882569 NR Description: AT24323p [Drosophila melanogaster]
  misc_feature (2)..(89): Homolog of NCBI NO: 24652135 NR Description: CG1827-PB [Drosophila melanogaster]
  misc_feature (1)..(104): Homolog of NCBI NO: 15240278 NR Description: glycosylasparaginase - like protein [Arabidopsis
MTMEVGAVAAMRYVKDGIKVARLVMQHTKHTLLVGEKASEFAISMRLPGPMNLSSPESMEKWAKWKDSRCQPNFKKNVSPANSCGPYRPTNYLGHPDETCSSTV

SEQ ID NO: 52423 - protein, 102 aa, Glycine max
  peptide (1)..(102): Ceres Seq. ID no. 14314529
  misc_feature (1)..(102): Pfam Name: Asparaginase Pfam Description: Asparaginase
  misc_feature (1)..(102): Homolog of NCBI NO: 7506249 NR Description: hypothetical protein R04B3.2 - Caenorhabditis
  misc_feature (1)..(102): Homolog of NCBI NO: 17569239 NR Description: glycosylasparaginase precursor (39.4 kD) (XD90)
  misc_feature (1)..(102): Homolog of NCBI NO: 20863490 NR Description: aspartylglucosaminidase [Mus musculus]
  misc_feature (1)..(102): Homolog of NCBI NO: 34878389 NR Description: similar to precursor (Glycosylasparaginase) (Aspartylglucosaminidase)
  misc_feature (1)..(87): Homolog of NCBI NO: 28573318 NR Description: CG1827-PA [Drosophila melanogaster]
  misc_feature (1)..(102): Homolog of NCBI NO: 6685237 NR Description: N(4)-(Beta-N-acetylglucosaminyl)-L-asparaginase (Aspartylglucosaminidase)
  misc_feature (1)..(102): Homolog of NCBI NO: 31239653 NR Description: ENSANGP00000016583 [Anopheles gambiae]
  misc_feature (1)..(87): Homolog of NCBI NO: 40882569 NR Description: AT24323p [Drosophila melanogaster]
  misc_feature (1)..(87): Homolog of NCBI NO: 24652135 NR Description: CG1827-PB [Drosophila melanogaster]
  misc_feature (1)..(102): Homolog of NCBI NO: 15240278 NR Description: glycosylasparaginase - like protein [Arabidopsis
MEVGAVAAMRYVKDGIKVARLVMQHTKHTLLVGEKASEFAISMRLPGPMNLSSPESMEKWAKWKDSRCQPNFKKNVSPANSCGPYRPTNYLGHPDETCSSTV

SEQ ID NO: 52424 - DNA, 1257 bp, Glycine max
  misc_feature (1)..(1257): Ceres Seq. ID no. 14314511
cttctgcgtcgaccacctcgtcatttcttcctttccattttcatttctcggtgttgttgttcttcatccatggcttttcctcagcaccacttccaacagcactaccaaacccaacagcaacaacagccacaaaacaaatccttcagaaatctgcaaacaatcgatggtcagatgtcacagcaggtggcgttttacaaccctactgatttgcaagatcaatcccaacatccaccctacattcctccatttcatgttgttgggtttgctccgggtcctgttcctcctgctgatggcagtgatggtggagttgatttgcaattgcaatggaattatggtttggagccagagaggaagagactaaaagaacaggattttttggagaacaattctcagatatcttctgttgatttccttcaaccacgatcagtgtcgactgggttgggcttgtcactagacaatactcgcctgacatccactggagactcagctttgttgtcactcatcggtgatgacatcgagcgtgagttgcagcagcaggacgcagagatagatagatttctcaaagtgcagggtggacgtttgcggcaagcagtcttggagaaggttcaggcaacacagcttcagagtgtctcactaattgaagacaaaatccttcagaaactttgcgagaaagaagctatggtagaaagcatcaacaagaggaacattgaactcgaagatcaaatggagcagttgactgtggaagctggttcgtggcaacagcgagcaagatataatgaaaatatgattgctgctctcaagttcaaccttcagcaagcgtatgtccaaagcagagatagtaaagaaggatgtggtgacagtgaggtcgacgatacagcttcttgctgcaatggccgttccctcgattttcatctgctttcaagggagaacaccgacatgaaagagatgatgacatgcaaggcttgcagagtcaatgaagtgaccatggttttgttaccttgtaagcatctttgcctctgtaaagattgtgaaagtaagcttagtttctgtcctctatgtcaatcctccaaatttatcggcatggaggtctacatgtaactgcaaagtatacttctacttgtgaaatctctaatttcatgtttttattatgtgtcctttcatgtagcttgtgtctcaaggaccatgacaccttgtaactagtttttaagatgtatttgaccataatgaatttcacttgcttgagaacagtgaattttg

SEQ ID NO: 52425 - protein, 365 aa, Glycine max
  peptide (1)..(365): Ceres Seq. ID no. 14314512
  misc_feature (319)..(353): Pfam Name: Zinc finger, C3HC4 type (RING finger) Pfam Description: Zinc finger, C3HC4 type (RING finger)
  misc_feature (186)..(364): Homolog of NCBI NO: 6573749 NR Description: F20B24.9 [Arabidopsis thaliana]
  misc_feature (116)..(364): Homolog of NCBI NO: 21536706 NR Description: S-ribonuclease binding protein SBP1, putative
  misc_feature (116)..(364): Homolog of NCBI NO: 15220181 NR Description: conserved hypothetical protein [Arabidopsis
  misc_feature (128)..(364): Homolog of NCBI NO: 25404279 NR Description: hypothetical protein F8A5.13 [imported] -
  misc_feature (128)..(364): Homolog of NCBI NO: 15219772 NR Description: conserved hypothetical protein [Arabidopsis
  misc_feature (29)..(279): Homolog of NCBI NO: 29368618 NR Description: S-ribonuclease-binding protein SBP1-like protein
  misc_feature (26)..(365): Homolog of NCBI NO: 34902144 NR Description: unknown protein [Oryza sativa (japonica
  misc_feature (45)..(365): Homolog of NCBI NO: 15220096 NR Description: conserved hypothetical protein [Arabidopsis
  misc_feature (54)..(365): Homolog of NCBI NO: 6760451 NR Description: S-ribonuclease binding protein SBP1 [Petunia x
  misc_feature (25)..(365): Homolog of NCBI NO: 40807658 NR Description: S-RNase-binding protein [Solanum chacoense]
LLRRPPRHFFLSIFISRCCCSSSMAFPQHHFQQHYQTQQQQQPQNKSFRNLQTIDGQMSQQVAFYNPTDLQDQSQHPPYIPPFHVVGFAPGPVPPADGSDGGVDLQLQWNYGLEPERKRLKEQDFLENNSQISSVDFLQPRSVSTGLGLSLDNTRLTSTGDSALLSLIGDDIERELQQQDAEIDRFLKVQGGRLRQAVLEKVQATQLQSVSLIEDKILQKLCEKEAMVESINKRNIELEDQMEQLTVEAGSWQQRARYNENMIAALKFNLQQAYVQSRDSKEGCGDSEVDDTASCCNGRSLDFHLLSRENTDMKEMMTCKACRVNEVTMVLLPCKHLCLCKDCESKLSFCPLCQSSKFIGMEVYM

SEQ ID NO: 52426 - protein, 342 aa, Glycine max
  peptide (1)..(342): Ceres Seq. ID no. 14314513
  misc_feature (296)..(330): Pfam Name: Zinc finger, C3HC4 type (RING finger) Pfam Description: Zinc finger, C3HC4 type (RING finger)
  misc_feature (163)..(341): Homolog of NCBI NO: 6573749 NR Description: F20B24.9 [Arabidopsis thaliana]
  misc_feature (93)..(341): Homolog of NCBI NO: 21536706 NR Description: S-ribonuclease binding protein SBP1, putative
  misc_feature (93)..(341): Homolog of NCBI NO: 15220181 NR Description: conserved hypothetical protein [Arabidopsis
  misc_feature (105)..(341): Homolog of NCBI NO: 25404279 NR Description: hypothetical protein F8A5.13 [imported] -
  misc_feature (105)..(341): Homolog of NCBI NO: 15219772 NR Description: conserved hypothetical protein [Arabidopsis
  misc_feature (6)..(256): Homolog of NCBI NO: 29368618 NR Description: S-ribonuclease-binding protein SBP1-like protein
  misc_feature (3)..(342): Homolog of NCBI NO: 34902144 NR Description: unknown protein [Oryza sativa (japonica
  misc_feature (22)..(342): Homolog of NCBI NO: 15220096 NR Description: conserved hypothetical protein [Arabidopsis
  misc_feature (31)..(342): Homolog of NCBI NO: 6760451 NR Description: S-ribonuclease binding protein SBP1 [Petunia x
  misc_feature (2)..(342): Homolog of NCBI NO: 40807658 NR Description: S-RNase-binding protein [Solanum chacoense]
MAFPQHHFQQHYQTQQQQQPQNKSFRNLQTIDGQMSQQVAFYNPTDLQDQSQHPPYIPPFHVVGFAPGPVPPADGSDGGVDLQLQWNYGLEPERKRLKEQDFLENNSQISSVDFLQPRSVSTGLGLSLDNTRLTSTGDSALLSLIGDDIERELQQQDAEIDRFLKVQGGRLRQAVLEKVQATQLQSVSLIEDKILQKLCEKEAMVESINKRNIELEDQMEQLTVEAGSWQQRARYNENMIAALKFNLQQAYVQSRDSKEGCGDSEVDDTASCCNGRSLDFHLLSRENTDMKEMMTCKACRVNEVTMVLLPCKHLCLCKDCESKLSFCPLCQSSKFIGMEVYM

SEQ ID NO: 52427 - protein, 308 aa, Glycine max
  peptide (1)..(308): Ceres Seq. ID no. 14314514
  misc_feature (262)..(296): Pfam Name: Zinc finger, C3HC4 type (RING finger) Pfam Description: Zinc finger, C3HC4 type (RING finger)
  misc_feature (129)..(307): Homolog of NCBI NO: 6573749 NR Description: F20B24.9 [Arabidopsis thaliana]
  misc_feature (59)..(307): Homolog of NCBI NO: 21536706 NR Description: S-ribonuclease binding protein SBP1, putative
  misc_feature (59)..(307): Homolog of NCBI NO: 15220181 NR Description: conserved hypothetical protein [Arabidopsis
  misc_feature (71)..(307): Homolog of NCBI NO: 25404279 NR Description: hypothetical protein F8A5.13 [imported] -
  misc_feature (71)..(307): Homolog of NCBI NO: 15219772 NR Description: conserved hypothetical protein [Arabidopsis
  misc_feature (1)..(222): Homolog of NCBI NO: 29368618 NR Description: S-ribonuclease-binding protein SBP1-like protein
  misc_feature (1)..(308): Homolog of NCBI NO: 34902144 NR Description: unknown protein [Oryza sativa (japonica
  misc_feature (1)..(308): Homolog of NCBI NO: 15220096 NR Description: conserved hypothetical protein [Arabidopsis
  misc_feature (1)..(308): Homolog of NCBI NO: 6760451 NR Description: S-ribonuclease binding protein SBP1 [Petunia x
  misc_feature (1)..(308): Homolog of NCBI NO: 40807658 NR Description: S-RNase-binding protein [Solanum chacoense]
MSQQVAFYNPTDLQDQSQHPPYIPPFHVVGFAPGPVPPADGSDGGVDLQLQWNYGLEPERKRLKEQDFLENNSQISSVDFLQPRSVSTGLGLSLDNTRLTSTGDSALLSLIGDDIERELQQQDAEIDRFLKVQGGRLRQAVLEKVQATQLQSVSLIEDKILQKLCEKEAMVESINKRNIELEDQMEQLTVEAGSWQQRARYNENMIAALKFNLQQAYVQSRDSKEGCGDSEVDDTASCCNGRSLDFHLLSRENTDMKEMMTCKACRVNEVTMVLLPCKHLCLCKDCESKLSFCPLCQSSKFIGMEVYM

SEQ ID NO: 52428 - DNA, 1405 bp, Glycine max
  misc_feature (1)..(1405): Ceres Seq. ID no. 14314493
ctcttgatttctttcgtgacgcgtcatattggtttattgcaaggtcggtggcaacccaaccctacccttgtctcctttctcatatgctatatatcagcctcctccacctagcacttgctccaattcactaccaccaaacacaacacaacacagcataccgtgtttcattttctctcacacacaaacctccttcgttttcatttacttctcaggaggtataactactatttttcgctttttttttaaaaaaaaaattgattaaatcttttgccatgggaacccagattttgcgacctcaggactgcttggtagaacgaatcagggctcctccggctgacttttcccggcggaggagttccggtaattactgtaattattattactacaacaacaacaacaaccatgtcgccacttccaggtcgtgccggaagcctgttagccgacccgaccaaaggaaacgggctgctcccggttctgcccagccggtggtggcggaggccgcggcggcggtgttgaagagaccgagccgtgatgattcaagggtggccaggagccaaagtttggagatgactacgattctacgtaggggccagtcgcttgattcggctgtgaagagcgaggtgtacgccggatctgcgttcgcggtgtctccgtcgccggaagcgcttcctctgccgtctttttcgacgaagaagcaggactcagtggcggttgatgactccgccacgcgagatctgaggcgtctgctccgcctcgaatgaaaacgagccgggttgcagtcccgggtttctgggtcgggttggacccgacaaattatccatattcccctctctctctcaccttattattactatctagaatcttctctttctcttatcctctccgtaaccgttaccgttacgcccgtcccggtttgaagttctgacccgactgtgatttttttaaacggaagggtggatgatctgatctaaactagggggtgaaatgtttaaaggtttggagtagcgtatgggccgtgaggctatgattatgtatcatgtaacttgtaacatatttcttgggttgtttattaaaacattaaaataaaatttagggtttatatacttgtaacactaataccaatcagttcaaaggggtgggaagaaatgaggaagaagcataagaaggaggaaatgtaagttagttttgtaaaatccagcaagtgtttgaatttggtgtaggttgggctttcagctatgaacagtttgatgtgatcaagtatagttcgtgctgtgttgtgaaacacggtgatcaacaagtgaatggttctggttcgtgctctgttgtgaatttgccagcttctctttgtacgctattttttgtaaagtggagcaaattattaacttgaggagatttgatcagattt

SEQ ID NO: 52429 - protein, 162 aa, Glycine max
  peptide (1)..(162): Ceres Seq. ID no. 14314494
  misc_feature (66)..(162): Homolog of NCBI NO: 34914982 NR Description: OSJNBb0093M23.11 [Oryza sativa (japonica
  misc_feature (1)..(26): Homolog of NCBI NO: 15233093 NR Description: hypothetical protein [Arabidopsis thaliana]
  misc_feature (52)..(162): Homolog of NCBI NO: 15233093 NR Description: hypothetical protein [Arabidopsis thaliana]
MGTQILRPQDCLVERIRAPPADFSRRRSSGNYCNYYYYNNNNNHVATSRSCRKPVSRPDQRKRAAPGSAQPVVAEAAAAVLKRPSRDDSRVARSQSLEMTTILRRGQSLDSAVKSEVYAGSAFAVSPSPEALPLPSFSTKKQDSVAVDDSATRDLRRLLRLE

SEQ ID NO: 52430 - DNA, 918 bp, Glycine max
  misc_feature (1)..(918): Ceres Seq. ID no. 14305780
caaaattaattcaataggattacttttagaaaaacatctggaagtgggacagcttatacttgattaaattaagagctattagaaaatcattttgaatcaaaacaggagaaccactttcatcgaagctggtagctaagaagcatgcttgctattctgttagtgtttgaattatctgtttagatggatgagactatctatataatgcttaggaattctttttgtgtttgattcttatgcctttttctattatgtgtatgttttttctgaaattttaagcctcattataggtagggaccccaaagacacaccggcgatacctggctcgtgacgagggaacttatggtccgatgccgcgcagaatcccaaaagggttattgggaatgccattcaataccacaggcatagatggtctttactgtgttggtgatagctgcttccctggacaaggtgttattgctgtagctttctcaggagttatgtgtgctcatcgagtagctgcagatattgggctggagaagaagtcacctgtgttggattccatgctgcttcggttgcttggttggttaaggacaatggcatgagatatataggagcatttgttggatgcagtatcatcatcccttttgcataagaagctcaactttcattacagcattggttcactgcagatttcttccacaattttcaagagtcaccaaattgtcacagtatatagatgctgttagttgcaatttgatccatgcagtggcagagcttggaaaaaataattgaaggggccaaagtttgaagtgtataaatttaatgcaataattttgataatatcatgtcttataggtgttttctttccccttgctgaaggatatcatgtcttacaggtgatttaagtaattgatggtaatatttaaatattaaatattc

SEQ ID NO: 52431 - protein, 77 aa, Glycine max
  peptide (1)..(77): Ceres Seq. ID no. 14305781
  misc_feature (1)..(55): Homolog of NCBI NO: 33240035 NR Description: Phytoene dehydrogenase / carotenoid isomerase
  misc_feature (1)..(55): Homolog of NCBI NO: 33863322 NR Description: putative carotenoid isomerase
  misc_feature (1)..(55): Homolog of NCBI NO: 33865435 NR Description: Carotenoid isomerase [Synechococcus sp. WH 8102]
  misc_feature (1)..(55): Homolog of NCBI NO: 16331999 NR Description: unknown protein [Synechocystis sp. PCC 6803]
  misc_feature (1)..(58): Homolog of NCBI NO: 23043211 NR Description: hypothetical protein [Trichodesmium erythraeum
  misc_feature (1)..(54): Homolog of NCBI NO: 23126287 NR Description: hypothetical protein [Nostoc punctiforme]
  misc_feature (1)..(55): Homolog of NCBI NO: 17229556 NR Description: hypothetical protein [Nostoc sp. PCC 7120]
  misc_feature (1)..(77): Homolog of NCBI NO: 25314928 NR Description: hypothetical protein [imported] - Arabidopsis
  misc_feature (1)..(77): Homolog of NCBI NO: 15222207 NR Description: carotenoid isomerase, putative [Arabidopsis
  misc_feature (1)..(77): Homolog of NCBI NO: 19550437 NR Description: carotenoid isomerase [Lycopersicon esculentum]
MPRRIPKGLLGMPFNTTGIDGLYCVGDSCFPGQGVIAVAFSGVMCAHRVAADIGLEKKSPVLDSMLLRLLGWLRTMA

SEQ ID NO: 52432 - protein, 66 aa, Glycine max
  peptide (1)..(66): Ceres Seq. ID no. 14305782
  misc_feature (1)..(44): Homolog of NCBI NO: 33240035 NR Description: Phytoene dehydrogenase / carotenoid isomerase
  misc_feature (1)..(44): Homolog of NCBI NO: 33863322 NR Description: putative carotenoid isomerase
  misc_feature (1)..(44): Homolog of NCBI NO: 33865435 NR Description: Carotenoid isomerase [Synechococcus sp. WH 8102]
  misc_feature (1)..(44): Homolog of NCBI NO: 16331999 NR Description: unknown protein [Synechocystis sp. PCC 6803]
  misc_feature (1)..(47): Homolog of NCBI NO: 23043211 NR Description: hypothetical protein [Trichodesmium erythraeum
  misc_feature (1)..(43): Homolog of NCBI NO: 23126287 NR Description: hypothetical protein [Nostoc punctiforme]
  misc_feature (1)..(44): Homolog of NCBI NO: 17229556 NR Description: hypothetical protein [Nostoc sp. PCC 7120]
  misc_feature (1)..(66): Homolog of NCBI NO: 25314928 NR Description: hypothetical protein [imported] - Arabidopsis
  misc_feature (1)..(66): Homolog of NCBI NO: 15222207 NR Description: carotenoid isomerase, putative [Arabidopsis
  misc_feature (1)..(66): Homolog of NCBI NO: 19550437 NR Description: carotenoid isomerase [Lycopersicon esculentum]
MPFNTTGIDGLYCVGDSCFPGQGVIAVAFSGVMCAHRVAADIGLEKKSPVLDSMLLRLLGWLRTMA

SEQ ID NO: 52433 - protein, 55 aa, Glycine max
  peptide (1)..(55): Ceres Seq. ID no. 14305783
MQYHHPFCIRSSTFITALVHCRFLPQFSRVTKLSQYIDAVSCNLIHAVAELGKNN

SEQ ID NO: 52434 - DNA, 1336 bp, Glycine max
  misc_feature (1)..(1336): Ceres Seq. ID no. 14314534
actgaggtctagataataaaataaataaataagtaagccttattatttttttttttttgggttcaaaataaaagaaaaaaaaaacttatttatttggcgttcgaattggtttctcactcatcgacatttccgttttgcccccattggccaattcggccactcttctctgaaaaagcctccagcctccttcttcatccatcttccctctccaccaaaatcctccgcggttcgttccgttattcatcgaaccgttctctcaagtctcgtacttggcttagttcacaactcgaaacttcaccgaacgcattccattcaccaattcgtccaagtctcgtatcaatcagtcaatccgtctcgtggaggttggagagatcggaggggaaaggatccatggcgcatcgagtggaccacgagtatgactatctgttcaagatcgttttgatcggagactcaggtgtaggaaaatctaacatcctctccaggttcactcgaaacgagttctgtttagagtccaaatccactatcggagttgagttcgccaccagaactcttcaggtagagggaaagactgtgaaagcacagatctgggacacagcaggtcaagagcggtaccgtgccattaccagtgcttattacagaggagctgttggagctctactcgtatatgacataaccaagaggcaaacctttgacaatgtccaaaggtggttgcgtgaactgagggaccatgcagactctaatatagttatcatgatggctggaaataaatctgatttgagccatcttagagcggtttcagaggatgatggtcaagcattggcagagagggaaggtctctcgtttcttgagacatctgcactggaagcaaccaacattgagaaggcattccaaaccattttgacagagatttatcatattgttagcaaaaaggcacttgcggctcaggaagcagctgttggtaccacacttcctggtcaaggtaccaccatcaatgttggggatgcatctgggaatacaaagagaggctgctgctccacttaatgcgacatttgaggaaaaagcgatggtagcagatagccagatagtattttttttcccccaattctgttttgcccctttctcttttcatcttttttttcctcctttctttatatgggtgagagagacacatgtagagtacatttacttcattgagttgcaaaaacgaagtctgtgaaatttataaaacaatagtcttgctagttcctttgaatttatctcttccttgatgttatagtttcgcatgaattaatgtaatattggaacgaacagatattgatgatatattgtcgttgct

SEQ ID NO: 52435 - protein, 216 aa, Glycine max
  peptide (1)..(216): Ceres Seq. ID no. 14314535
  misc_feature (14)..(175): Pfam Name: Ras family Pfam Description: Ras family
  misc_feature (1)..(216): Homolog of NCBI NO: 34908298 NR Description: Ras-related GTP-binding protein
  misc_feature (1)..(56): Homolog of NCBI NO: 25294121 NR Description: protein F22G5.24 [imported] - Arabidopsis
  misc_feature (58)..(216): Homolog of NCBI NO: 25294121 NR Description: protein F22G5.24 [imported] - Arabidopsis
  misc_feature (1)..(216): Homolog of NCBI NO: 34897394 NR Description: Ras-related GTP-binding protein
  misc_feature (1)..(216): Homolog of NCBI NO: 15222396 NR Description: GTP-binding protein, putative [Arabidopsis
  misc_feature (1)..(216): Homolog of NCBI NO: 15237828 NR Description: GTP binding protein, putative [Arabidopsis
  misc_feature (1)..(216): Homolog of NCBI NO: 15232652 NR Description: GTP-binding protein, putative [Arabidopsis
  misc_feature (1)..(216): Homolog of NCBI NO: 3024506 NR Description: RAS-RELATED PROTEIN RAB11A
  misc_feature (1)..(216): Homolog of NCBI NO: 3024528 NR Description: Ras-related protein Rab2BV
  misc_feature (1)..(216): Homolog of NCBI NO: 3024501 NR Description: Ras-related protein Rab11C
MAHRVDHEYDYLFKIVLIGDSGVGKSNILSRFTRNEFCLESKSTIGVEFATRTLQVEGKTVKAQIWDTAGQERYRAITSAYYRGAVGALLVYDITKRQTFDNVQRWLRELRDHADSNIVIMMAGNKSDLSHLRAVSEDDGQALAEREGLSFLETSALEATNIEKAFQTILTEIYHIVSKKALAAQEAAVGTTLPGQGTTINVGDASGNTKRGCCST

SEQ ID NO: 52436 - DNA, 1973 bp, Glycine max
  misc_feature (1)..(1973): Ceres Seq. ID no. 14314536
actaaactttttacttttgtgccaaccacaccttaaaaaaccagaaaagctgaaacgtgtctgcttgaagctttttatgccacttgtcttctctcctttttccaaattccctttatgcttctttcctgctccaatgatcgcagcaagatttcgaccttcttttctgcaaaatactgtcagctcaaactctttgtgggttttcggctgaaccccttcatatatggccactgaagcacatcgttttcccaagattaataatgaccaaggctcttctagtatacctcataacccaattcaaaaggatgtagagtcatccgaaataactgaggaactccctagtagacatgcacatggtagaaggaaaaaccttatcttggagataccaacaagaacactagatgaaacaagagaggaatttttcagaacaaaccaacctccaactccatctcctagaagccaaatcaatgagttccaaggtcctttgtcaaccaaaaatattaaatttcacaagataagttcagatgttgaagaggcttccatcccagcacttgacggttcccccccggagccactgcaagagcctatgatttcaagaacattatcacctaatgagatgaaaatatcatccttacctgtcaccccaattgctcagtcaaatctggagtctggacatggagggaacattgcctatccagcaacacatgttaagaaaggactgcaactaccaatgcatcgttcccgttcagttcccgtgcttactgaagatgacagcacatatgtaggtgccatgtttcgtattgttcctaccacaccacggttgacaaagagcattgccacaacatctatgaaatctccgcctgacgataccgttgaaaatgaggatggggaagatattcctgaagaagaagccgtctgcagaatttgtttgattgaattgggagaaggttctgatacacttaaaatggagtgcagctgcaaaggtgaacttgcactggcacaccaagagtgtgcagttaaatggtttagcattaaaggcaacagaacatgtgatgtgtgcaagcaggaagttcagaaccttcctgtcactcttctacgagttttaaatggccaaacactttacttgacaaggagtagaagccaacaatacagggtttggcaaaatattcccattcttgtgattatcaacatgctggcatacttttgtttccttgagcagctacttgtttcaagtatgggatctggtgctgttgccatttctctccctttttcatgtatactaggtctacttgcaagcatgacatccacaataatggtgacgtgtgaacatgtttgggtttatgcaattgcccagtttgttatggtggttctcgctggacgtcttttctattcactgcttaataagcaagccgttctatctatcctacttgctacatttactgggtttggagctgtgatgtgtggagcttatattcttattgagtttttgaaatggagaagacgatggcttggttcccaagaggtggtactgcctcattaatcacattcatcagcgaccactcaccaagctttgactgattctcaacaccatggaaataatgtgagagacactgcagtgcatgtgagtgtgagttgacatagaatatacttttatattgatggtgtttaattggctgtatataaaagtataatgtatggactatactttaagcacattacacccttttttgtctccgtggtactcgcgagaatacacaagtatcgcattccttgtattgagaccgctgactcgaagccagttgtattgtaactgtgaggccatattataatattggacttgcaagaaacttctgagcaaatcctgtaggtgaaaagataaagaaaggttgtttttgtacaattataggggaacaaaaagggattctgtactgtaaagatggttgaagagatgaatacacatgtcttattttggttcc

SEQ ID NO: 52437 - protein, 438 aa, Glycine max
  peptide (1)..(438): Ceres Seq. ID no. 14314537
  misc_feature (232)..(279): Pfam Name: Zinc finger, C3HC4 type (RING finger) Pfam Description: Zinc finger, C3HC4 type (RING finger)
  misc_feature (11)..(427): Homolog of NCBI NO: 18397535 NR Description: zinc finger (C3HC4-type RING finger) protein
  misc_feature (248)..(426): Homolog of NCBI NO: 6682253 NR Description: unknown protein [Arabidopsis thaliana]
  misc_feature (9)..(356): Homolog of NCBI NO: 13605863 NR Description: AT5g60580/muf9_230 [Arabidopsis thaliana]
  misc_feature (133)..(425): Homolog of NCBI NO: 32489688 NR Description: OSJNBb0004G23.1 [Oryza sativa (japonica
  misc_feature (37)..(426): Homolog of NCBI NO: 18414148 NR Description: zinc finger (C3HC4-type RING finger) protein
  misc_feature (37)..(426): Homolog of NCBI NO: 11290062 NR Description: hypothetical protein F15A17.210 - Arabidopsis
  misc_feature (37)..(426): Homolog of NCBI NO: 9757769 NR Description: gene_id:MOK16.9~unknown protein [Arabidopsis
  misc_feature (76)..(426): Homolog of NCBI NO: 18398630 NR Description: zinc finger (C3HC4-type RING finger) protein
  misc_feature (9)..(438): Homolog of NCBI NO: 30697388 NR Description: zinc finger (C3HC4-type RING finger) protein
  misc_feature (9)..(438): Homolog of NCBI NO: 18424371 NR Description: zinc finger (C3HC4-type RING finger) protein
MATEAHRFPKINNDQGSSSIPHNPIQKDVESSEITEELPSRHAHGRRKNLILEIPTRTLDETREEFFRTNQPPTPSPRSQINEFQGPLSTKNIKFHKISSDVEEASIPALDGSPPEPLQEPMISRTLSPNEMKISSLPVTPIAQSNLESGHGGNIAYPATHVKKGLQLPMHRSRSVPVLTEDDSTYVGAMFRIVPTTPRLTKSIATTSMKSPPDDTVENEDGEDIPEEEAVCRICLIELGEGSDTLKMECSCKGELALAHQECAVKWFSIKGNRTCDVCKQEVQNLPVTLLRVLNGQTLYLTRSRSQQYRVWQNIPILVIINMLAYFCFLEQLLVSSMGSGAVAISLPFSCILGLLASMTSTIMVTCEHVWVYAIAQFVMVVLAGRLFYSLLNKQAVLSILLATFTGFGAVMCGAYILIEFLKWRRRWLGSQEVVLPH

SEQ ID NO: 52438 - protein, 317 aa, Glycine max
  peptide (1)..(317): Ceres Seq. ID no. 14314538
  misc_feature (111)..(158): Pfam Name: Zinc finger, C3HC4 type (RING finger) Pfam Description: Zinc finger, C3HC4 type (RING finger)
  misc_feature (1)..(306): Homolog of NCBI NO: 18397535 NR Description: zinc finger (C3HC4-type RING finger) protein
  misc_feature (127)..(305): Homolog of NCBI NO: 6682253 NR Description: unknown protein [Arabidopsis thaliana]
  misc_feature (1)..(235): Homolog of NCBI NO: 13605863 NR Description: AT5g60580/muf9_230 [Arabidopsis thaliana]
  misc_feature (12)..(304): Homolog of NCBI NO: 32489688 NR Description: OSJNBb0004G23.1 [Oryza sativa (japonica
  misc_feature (1)..(305): Homolog of NCBI NO: 18414148 NR Description: zinc finger (C3HC4-type RING finger) protein
  misc_feature (1)..(305): Homolog of NCBI NO: 11290062 NR Description: hypothetical protein F15A17.210 - Arabidopsis
  misc_feature (1)..(305): Homolog of NCBI NO: 9757769 NR Description: gene_id:MOK16.9~unknown protein [Arabidopsis
  misc_feature (1)..(305): Homolog of NCBI NO: 18398630 NR Description: zinc finger (C3HC4-type RING finger) protein
  misc_feature (1)..(317): Homolog of NCBI NO: 30697388 NR Description: zinc finger (C3HC4-type RING finger) protein
  misc_feature (1)..(317): Homolog of NCBI NO: 18424371 NR Description: zinc finger (C3HC4-type RING finger) protein
MISRTLSPNEMKISSLPVTPIAQSNLESGHGGNIAYPATHVKKGLQLPMHRSRSVPVLTEDDSTYVGAMFRIVPTTPRLTKSIATTSMKSPPDDTVENEDGEDIPEEEAVCRICLIELGEGSDTLKMECSCKGELALAHQECAVKWFSIKGNRTCDVCKQEVQNLPVTLLRVLNGQTLYLTRSRSQQYRVWQNIPILVIINMLAYFCFLEQLLVSSMGSGAVAISLPFSCILGLLASMTSTIMVTCEHVWVYAIAQFVMVVLAGRLFYSLLNKQAVLSILLATFTGFGAVMCGAYILIEFLKWRRRWLGSQEVVLPH

SEQ ID NO: 52439 - protein, 307 aa, Glycine max
  peptide (1)..(307): Ceres Seq. ID no. 14314539
  misc_feature (101)..(148): Pfam Name: Zinc finger, C3HC4 type (RING finger) Pfam Description: Zinc finger, C3HC4 type (RING finger)
  misc_feature (1)..(296): Homolog of NCBI NO: 18397535 NR Description: zinc finger (C3HC4-type RING finger) protein
  misc_feature (117)..(295): Homolog of NCBI NO: 6682253 NR Description: unknown protein [Arabidopsis thaliana]
  misc_feature (1)..(225): Homolog of NCBI NO: 13605863 NR Description: AT5g60580/muf9_230 [Arabidopsis thaliana]
  misc_feature (2)..(294): Homolog of NCBI NO: 32489688 NR Description: OSJNBb0004G23.1 [Oryza sativa (japonica
  misc_feature (1)..(295): Homolog of NCBI NO: 18414148 NR Description: zinc finger (C3HC4-type RING finger) protein
  misc_feature (1)..(295): Homolog of NCBI NO: 11290062 NR Description: hypothetical protein F15A17.210 - Arabidopsis
  misc_feature (1)..(295): Homolog of NCBI NO: 9757769 NR Description: gene_id:MOK16.9~unknown protein [Arabidopsis
  misc_feature (1)..(295): Homolog of NCBI NO: 18398630 NR Description: zinc finger (C3HC4-type RING finger) protein
  misc_feature (1)..(307): Homolog of NCBI NO: 30697388 NR Description: zinc finger (C3HC4-type RING finger) protein
  misc_feature (1)..(307): Homolog of NCBI NO: 18424371 NR Description: zinc finger (C3HC4-type RING finger) protein
MKISSLPVTPIAQSNLESGHGGNIAYPATHVKKGLQLPMHRSRSVPVLTEDDSTYVGAMFRIVPTTPRLTKSIATTSMKSPPDDTVENEDGEDIPEEEAVCRICLIELGEGSDTLKMECSCKGELALAHQECAVKWFSIKGNRTCDVCKQEVQNLPVTLLRVLNGQTLYLTRSRSQQYRVWQNIPILVIINMLAYFCFLEQLLVSSMGSGAVAISLPFSCILGLLASMTSTIMVTCEHVWVYAIAQFVMVVLAGRLFYSLLNKQAVLSILLATFTGFGAVMCGAYILIEFLKWRRRWLGSQEVVLPH

SEQ ID NO: 52440 - DNA, 1397 bp, Glycine max
  misc_feature (1)..(1397): Ceres Seq. ID no. 14314540
atgttttaaatttctggaattttcttttccttggtgaggcttggcagtgaaaatagattgggatgcttgaagcccctagggaaaagtaatatccttctctgcgataagaggaagcccaccacctcagaaaacagaaaacagagtgagtgagtgtgttgtgtaatatggataaaagctgtcatccctctagcaatactagtataagcacatcctctgctgccaaccccaacaacaatagcagggatcaatatcttcgccatctcaacaagctctctcaaaagatctccaaacccatcattaagaaacccgtctttgatcctcctcaggcccaagtcccaaacaatcaggtgcagcatcagccgccggtgtacaacatcaacaagaacgacttccgtgatgtggttcagaaactgacgggctcacctgcgcacgaccgcatctcaacgccgcctcccattcagccacccaagcccccgagctctcgccttcagaggattcgccctcctcccctgcctcaaattactaaccgcccacccccgctccttaaccccaccaccctcccccgccctcaacaactccctaacgccgttaccttcaacaacaacttctccgttttttcgagaccccccgcgccgttatctcctctgccgccgttccccaccgtccacgcccccgctgagtcacctatctccgcctacatgcgcgatctgcagaccctcgtcgatgcaaacgccaagcacttttcaggcttttctcccttgcctccaccgcctctggttcaacctcaacctcaacctcaacctcagcctcagcctcagcaagaacaacagccacagcagcagcagcaagggatggttccgtcgcaagcgccgtcgtcgtttcagatgccgtcttcgcctgtgccgtttgggtgtttgaattcgcagctggcgtcctaccctctgctgtcgccggggcttctgttttccccaacttctggtcagttagggtttccgcagcttccgctttcgcccactgtgccggtccctagccctcgctggaagggaatttgagaggggtgaggtgagtttggtcacagacatgtcaatttagctcagctttttttagggttttttaaattttgttgttgttgttgttgttgtgttacctgtacatggtgctggtgctagggggaattcaatttgcggtggttggactcgaagtggtccgctgctgcttagtttaattctgtaaatgggatatcaaagacatcaaaaagggtacaattttgcattggttcttgccatgctgtttggggatatgcaaaaacaaaattagatgttatacaattatagtgggattattatcatcattatcattatgctgttttcaatataatcaaaatctttattgtcttc

SEQ ID NO: 52441 - protein, 295 aa, Glycine max
  peptide (1)..(295): Ceres Seq. ID no. 14314541
  misc_feature (63)..(92): Pfam Name: VQ motif Pfam Description: VQ motif
  misc_feature (41)..(290): Homolog of NCBI NO: 15226640 NR Description: leucine-rich repeat extensin family [Arabidopsis
  misc_feature (103)..(290): Homolog of NCBI NO: 29789309 NR Description: protein tyrosine phosphatase TD14 [Rattus
  misc_feature (32)..(247): Homolog of NCBI NO: 12831207 NR Description: gamma-aminobutyric acid  A receptor, epsilon
  misc_feature (52)..(244): Homolog of NCBI NO: 14599404 NR Description: protease 1 [Pneumocystis carinii]
  misc_feature (89)..(293): Homolog of NCBI NO: 37537138 NR Description: putative hydroxyproline-rich glycoprotein
  misc_feature (16)..(217): Homolog of NCBI NO: 21554391 NR Description: unknown [Arabidopsis thaliana]
  misc_feature (16)..(217): Homolog of NCBI NO: 15237506 NR Description: proline-rich protein family [Arabidopsis
  misc_feature (33)..(292): Homolog of NCBI NO: 15226932 NR Description: proline-rich protein family [Arabidopsis
  misc_feature (1)..(294): Homolog of NCBI NO: 21593131 NR Description: unknown [Arabidopsis thaliana]
  misc_feature (1)..(294): Homolog of NCBI NO: 18411903 NR Description: proline-rich protein family [Arabidopsis
MDKSCHPSSNTSISTSSAANPNNNSRDQYLRHLNKLSQKISKPIIKKPVFDPPQAQVPNNQVQHQPPVYNINKNDFRDVVQKLTGSPAHDRISTPPPIQPPKPPSSRLQRIRPPPLPQITNRPPPLLNPTTLPRPQQLPNAVTFNNNFSVFSRPPAPLSPLPPFPTVHAPAESPISAYMRDLQTLVDANAKHFSGFSPLPPPPLVQPQPQPQPQPQPQQEQQPQQQQQGMVPSQAPSSFQMPSSPVPFGCLNSQLASYPLLSPGLLFSPTSGQLGFPQLPLSPTVPVPSPRWKGI

SEQ ID NO: 52442 - DNA, 1150 bp, Glycine max
  misc_feature (1)..(1150): Ceres Seq. ID no. 15179676
ctacttagagcagccaaaccttacgcattccatttctctctattcgctctctttcaatcacaacaacatggccgaacgtggaggcggagaccgtgccggtttcggtcgcggctttggcggtcgtggacgcggcggcgacaggggacgagggcggcgcagggcaggagggcgccgcgacgaggaggagaagtgggtcccagtgacgaagctggggcgcctggtgaaggaggggaaaattcggagcctggagcagatctacctacactcgctcccaatcaaggagcaccaaatcattgacaccctcgtggggcccaccctgaaggacgaggtgatgaagatcatgcccgtccagaagcagacccgcgccggtcagcgaacccgcttcaaggccttcgtggtggtcggcgacaacaacggccacgtcggtctcggagtgaagtgcagcaaggaagtcgccaccgccatacgcggcgccatcattctcgcaaagctctctgttattcctgtgaggagaggctattggggtaacaagatcggaaagccccacaccgttccctgcaaggttaccggaaagtgtggctccgtcaccgtccgcatggtccccgcccctcgtgggtccggaatcgtcgccgctagggtccccaagaaggtcttgcagttcgctggaatcgatgacgtcttcacttcctccaggggttccaccaaaaccctcggaaatttcgtcaaggctacttttgactgtttgctgaaaacctacggttttctaacacctgaattctggaaggagactcggttctccaaatcaccattccaagagtacactgatctattggcaaagccaacagggaaggcccttatcctcgaggaggaaagggtggaggcttgagttagcagaagcagcagcagttttgatgttatcggatgattgtgcctcgtcttaagcatgctaggacccagtaattatatgttttgctaccttttgttatttcattttctattgaaggacatattatatatctccatgctttttgttttttctcaaatttagttgaatggatattatttactgaactttcaaacaggggtttattaaatttttcatgctgtcccaactaaatcataattcaaagaaaagaaaatgtgtttctgc

SEQ ID NO: 52443 - protein, 294 aa, Glycine max
  peptide (1)..(294): Ceres Seq. ID no. 15179677
  misc_feature (188)..(261): Pfam Name: Ribosomal protein S5, C-terminal domain Pfam Description: Ribosomal protein S5, C-terminal domain
  misc_feature (23)..(294): Homolog of NCBI NO: 34393314 NR Description: putative 40S ribosomal protein S2
  misc_feature (23)..(278): Homolog of NCBI NO: 21553851 NR Description: 40S ribosomal protein S2 [Arabidopsis thaliana]
  misc_feature (24)..(294): Homolog of NCBI NO: 21539457 NR Description: ribosomal protein S2, putative [Arabidopsis
  misc_feature (23)..(278): Homolog of NCBI NO: 15227443 NR Description: 40S ribosomal protein S2 (RPS2C) [Arabidopsis
  misc_feature (23)..(294): Homolog of NCBI NO: 21618011 NR Description: ribosomal protein S2, putative [Arabidopsis
  misc_feature (24)..(294): Homolog of NCBI NO: 18406325 NR Description: 40S ribosomal protein, putative [Arabidopsis
  misc_feature (24)..(294): Homolog of NCBI NO: 25294520 NR Description: hypothetical protein RF12
  misc_feature (24)..(294): Homolog of NCBI NO: 15217951 NR Description: 40S ribosomal protein S2 (RPS2A) [Arabidopsis
  misc_feature (23)..(294): Homolog of NCBI NO: 30103021 NR Description: putative 40S ribosomal protein S2
  misc_feature (23)..(293): Homolog of NCBI NO: 15230312 NR Description: 40S ribosomal protein S2 (RPS2D) [Arabidopsis
YLEQPNLTHSISLYSLSFNHNNMAERGGGDRAGFGRGFGGRGRGGDRGRGRRRAGGRRDEEEKWVPVTKLGRLVKEGKIRSLEQIYLHSLPIKEHQIIDTLVGPTLKDEVMKIMPVQKQTRAGQRTRFKAFVVVGDNNGHVGLGVKCSKEVATAIRGAIILAKLSVIPVRRGYWGNKIGKPHTVPCKVTGKCGSVTVRMVPAPRGSGIVAARVPKKVLQFAGIDDVFTSSRGSTKTLGNFVKATFDCLLKTYGFLTPEFWKETRFSKSPFQEYTDLLAKPTGKALILEEERVEA

SEQ ID NO: 52444 - protein, 272 aa, Glycine max
  peptide (1)..(272): Ceres Seq. ID no. 15179678
  misc_feature (166)..(239): Pfam Name: Ribosomal protein S5, C-terminal domain Pfam Description: Ribosomal protein S5, C-terminal domain
  misc_feature (1)..(272): Homolog of NCBI NO: 34393314 NR Description: putative 40S ribosomal protein S2
  misc_feature (1)..(256): Homolog of NCBI NO: 21553851 NR Description: 40S ribosomal protein S2 [Arabidopsis thaliana]
  misc_feature (2)..(272): Homolog of NCBI NO: 21539457 NR Description: ribosomal protein S2, putative [Arabidopsis
  misc_feature (1)..(256): Homolog of NCBI NO: 15227443 NR Description: 40S ribosomal protein S2 (RPS2C) [Arabidopsis
  misc_feature (1)..(272): Homolog of NCBI NO: 21618011 NR Description: ribosomal protein S2, putative [Arabidopsis
  misc_feature (2)..(272): Homolog of NCBI NO: 18406325 NR Description: 40S ribosomal protein, putative [Arabidopsis
  misc_feature (2)..(272): Homolog of NCBI NO: 25294520 NR Description: hypothetical protein RF12
  misc_feature (2)..(272): Homolog of NCBI NO: 15217951 NR Description: 40S ribosomal protein S2 (RPS2A) [Arabidopsis
  misc_feature (1)..(272): Homolog of NCBI NO: 30103021 NR Description: putative 40S ribosomal protein S2
  misc_feature (1)..(271): Homolog of NCBI NO: 15230312 NR Description: 40S ribosomal protein S2 (RPS2D) [Arabidopsis
MAERGGGDRAGFGRGFGGRGRGGDRGRGRRRAGGRRDEEEKWVPVTKLGRLVKEGKIRSLEQIYLHSLPIKEHQIIDTLVGPTLKDEVMKIMPVQKQTRAGQRTRFKAFVVVGDNNGHVGLGVKCSKEVATAIRGAIILAKLSVIPVRRGYWGNKIGKPHTVPCKVTGKCGSVTVRMVPAPRGSGIVAARVPKKVLQFAGIDDVFTSSRGSTKTLGNFVKATFDCLLKTYGFLTPEFWKETRFSKSPFQEYTDLLAKPTGKALILEEERVEA

SEQ ID NO: 52445 - protein, 184 aa, Glycine max
  peptide (1)..(184): Ceres Seq. ID no. 15179679
  misc_feature (78)..(151): Pfam Name: Ribosomal protein S5, C-terminal domain Pfam Description: Ribosomal protein S5, C-terminal domain
  misc_feature (1)..(184): Homolog of NCBI NO: 34393314 NR Description: putative 40S ribosomal protein S2
  misc_feature (1)..(168): Homolog of NCBI NO: 21553851 NR Description: 40S ribosomal protein S2 [Arabidopsis thaliana]
  misc_feature (1)..(184): Homolog of NCBI NO: 21539457 NR Description: ribosomal protein S2, putative [Arabidopsis
  misc_feature (1)..(168): Homolog of NCBI NO: 15227443 NR Description: 40S ribosomal protein S2 (RPS2C) [Arabidopsis
  misc_feature (1)..(184): Homolog of NCBI NO: 21618011 NR Description: ribosomal protein S2, putative [Arabidopsis
  misc_feature (1)..(184): Homolog of NCBI NO: 25294520 NR Description: hypothetical protein RF12
  misc_feature (1)..(184): Homolog of NCBI NO: 18406325 NR Description: 40S ribosomal protein, putative [Arabidopsis
  misc_feature (1)..(184): Homolog of NCBI NO: 15217951 NR Description: 40S ribosomal protein S2 (RPS2A) [Arabidopsis
  misc_feature (1)..(184): Homolog of NCBI NO: 30103021 NR Description: putative 40S ribosomal protein S2
  misc_feature (1)..(183): Homolog of NCBI NO: 15230312 NR Description: 40S ribosomal protein S2 (RPS2D) [Arabidopsis
MKIMPVQKQTRAGQRTRFKAFVVVGDNNGHVGLGVKCSKEVATAIRGAIILAKLSVIPVRRGYWGNKIGKPHTVPCKVTGKCGSVTVRMVPAPRGSGIVAARVPKKVLQFAGIDDVFTSSRGSTKTLGNFVKATFDCLLKTYGFLTPEFWKETRFSKSPFQEYTDLLAKPTGKALILEEERVEA

SEQ ID NO: 52446 - DNA, 1336 bp, Glycine max
  misc_feature (1)..(1336): Ceres Seq. ID no. 14316064
attttcaatttcattcattcatcactctaaaaatttcgcttccaattattttctcccaccctcccaatttcccctccccctttttcgctgaacccgctccaattctcaaatctcaattcaaaagaatcaaaacccaaacttcaaattcgtttcccttacaacactttcccttctcagtcaattcctccttccaccactttccctcccttcttccttcctttcaatgttccaacctaacaaccccaaaatggattcctccaccacattcctcaacgaccttcctcccctcaagagactaagactcttgcaacaacaacagcaacaaaaagaagaacatcagtattatgactcttcttcacctttacccgctaaaaaacgcaaggagtctcgaaccctatctccaccctctcccaccaccaccaaaaccgtttataactattccctccccgccaagaaaagagtgtgggccctacaaccccagagcccaccctcaaatgacgtcgtccccgccttcgacctcaatgtggaatacacacccagccccaacaaccacggagacttcgaagaagaccactccgaggacgaggacggggttctatgctgtgtgtgccagagcacggacggcgaccctgcggatccaatagtcttctgcgacgggtgcgacctcatggtgcacgcctcctgctacggcactcccctgtccaagtccatcccggatggagactggttctgcgaacgctgctgtttccgtttcgagaagaatgatgttggcaacatcaattgcaatgcttgcgtgctgtgcccttccaccgagggggcgatgaagcggaccaccgtcgaggaggaaggtggcgcgacgtgggcacacgtggtgtgcgccctgttcgtgccggaagtgttctttcttgaccccgaagggagggaggggatcgacttctccaaggttccaaagaagaggtgggaggagaggtgctatctttgcggatcctgcgaagggtgtgctttggtgtgttctgagcccaagtgcgggttggggtttcatgtcacttgtgcgctgaaggaggaactttggattgagtacagggaagggaagaagggtggtaccatagttgccggcttctgcaaaaaccacacccaagtttgggaaaagcaatccgggaagtacaaaattgttgctgttgaagataaaaagtagcaaaagtcttggttttttttttttttgaaactgttagttaattaaccatcctagggaaattcaaagttagttacttttgaagatcatttgaatcagttgtaattttactcttcatagctgatagcttttatgctttgtttt

SEQ ID NO: 52447 - protein, 323 aa, Glycine max
  peptide (1)..(323): Ceres Seq. ID no. 14316065
  misc_feature (125)..(173): Pfam Name: PHD-finger Pfam Description: PHD-finger
  misc_feature (120)..(304): Homolog of NCBI NO: 20555413 NR Description: similar to Bromodomain and PHD finger-containing
  misc_feature (120)..(304): Homolog of NCBI NO: 12229723 NR Description: Bromodomain and PHD finger-containing protein 3
  misc_feature (120)..(304): Homolog of NCBI NO: 22760789 NR Description: unnamed protein product [Homo sapiens]
  misc_feature (120)..(313): Homolog of NCBI NO: 40389473 NR Description: TPA: Jade protein [Ciona intestinalis]
  misc_feature (120)..(304): Homolog of NCBI NO: 34191762 NR Description: Unknown (protein for IMAGE:4154313) [Homo sapiens]
  misc_feature (114)..(323): Homolog of NCBI NO: 32403036 NR Description: hypothetical protein [Neurospora crassa]
  misc_feature (119)..(312): Homolog of NCBI NO: 40738428 NR Description: hypothetical protein AN6675.2 [Aspergillus
  misc_feature (114)..(318): Homolog of NCBI NO: 34906262 NR Description: P0489A01.16 [Oryza sativa (japonica
  misc_feature (16)..(323): Homolog of NCBI NO: 9294395 NR Description: gene_id:MIE1.25~pir||JC2069~similar to
  misc_feature (16)..(323): Homolog of NCBI NO: 18400507 NR Description: zinc finger protein-related [Arabidopsis
MFQPNNPKMDSSTTFLNDLPPLKRLRLLQQQQQQKEEHQYYDSSSPLPAKKRKESRTLSPPSPTTTKTVYNYSLPAKKRVWALQPQSPPSNDVVPAFDLNVEYTPSPNNHGDFEEDHSEDEDGVLCCVCQSTDGDPADPIVFCDGCDLMVHASCYGTPLSKSIPDGDWFCERCCFRFEKNDVGNINCNACVLCPSTEGAMKRTTVEEEGGATWAHVVCALFVPEVFFLDPEGREGIDFSKVPKKRWEERCYLCGSCEGCALVCSEPKCGLGFHVTCALKEELWIEYREGKKGGTIVAGFCKNHTQVWEKQSGKYKIVAVEDKK

SEQ ID NO: 52448 - protein, 315 aa, Glycine max
  peptide (1)..(315): Ceres Seq. ID no. 14316066
  misc_feature (117)..(165): Pfam Name: PHD-finger Pfam Description: PHD-finger
  misc_feature (112)..(296): Homolog of NCBI NO: 20555413 NR Description: similar to Bromodomain and PHD finger-containing
  misc_feature (112)..(296): Homolog of NCBI NO: 12229723 NR Description: Bromodomain and PHD finger-containing protein 3
  misc_feature (112)..(296): Homolog of NCBI NO: 22760789 NR Description: unnamed protein product [Homo sapiens]
  misc_feature (112)..(305): Homolog of NCBI NO: 40389473 NR Description: TPA: Jade protein [Ciona intestinalis]
  misc_feature (112)..(296): Homolog of NCBI NO: 34191762 NR Description: Unknown (protein for IMAGE:4154313) [Homo sapiens]
  misc_feature (106)..(315): Homolog of NCBI NO: 32403036 NR Description: hypothetical protein [Neurospora crassa]
  misc_feature (111)..(304): Homolog of NCBI NO: 40738428 NR Description: hypothetical protein AN6675.2 [Aspergillus
  misc_feature (106)..(310): Homolog of NCBI NO: 34906262 NR Description: P0489A01.16 [Oryza sativa (japonica
  misc_feature (8)..(315): Homolog of NCBI NO: 9294395 NR Description: gene_id:MIE1.25~pir||JC2069~similar to
  misc_feature (8)..(315): Homolog of NCBI NO: 18400507 NR Description: zinc finger protein-related [Arabidopsis
MDSSTTFLNDLPPLKRLRLLQQQQQQKEEHQYYDSSSPLPAKKRKESRTLSPPSPTTTKTVYNYSLPAKKRVWALQPQSPPSNDVVPAFDLNVEYTPSPNNHGDFEEDHSEDEDGVLCCVCQSTDGDPADPIVFCDGCDLMVHASCYGTPLSKSIPDGDWFCERCCFRFEKNDVGNINCNACVLCPSTEGAMKRTTVEEEGGATWAHVVCALFVPEVFFLDPEGREGIDFSKVPKKRWEERCYLCGSCEGCALVCSEPKCGLGFHVTCALKEELWIEYREGKKGGTIVAGFCKNHTQVWEKQSGKYKIVAVEDKK

SEQ ID NO: 52449 - protein, 175 aa, Glycine max
  peptide (1)..(175): Ceres Seq. ID no. 14316067
  misc_feature (1)..(156): Homolog of NCBI NO: 20555413 NR Description: similar to Bromodomain and PHD finger-containing
  misc_feature (1)..(156): Homolog of NCBI NO: 12229723 NR Description: Bromodomain and PHD finger-containing protein 3
  misc_feature (1)..(156): Homolog of NCBI NO: 22760789 NR Description: unnamed protein product [Homo sapiens]
  misc_feature (1)..(165): Homolog of NCBI NO: 40389473 NR Description: TPA: Jade protein [Ciona intestinalis]
  misc_feature (1)..(156): Homolog of NCBI NO: 34191762 NR Description: Unknown (protein for IMAGE:4154313) [Homo sapiens]
  misc_feature (1)..(175): Homolog of NCBI NO: 32403036 NR Description: hypothetical protein [Neurospora crassa]
  misc_feature (1)..(164): Homolog of NCBI NO: 40738428 NR Description: hypothetical protein AN6675.2 [Aspergillus
  misc_feature (1)..(170): Homolog of NCBI NO: 34906262 NR Description: P0489A01.16 [Oryza sativa (japonica
  misc_feature (1)..(175): Homolog of NCBI NO: 9294395 NR Description: gene_id:MIE1.25~pir||JC2069~similar to
  misc_feature (1)..(175): Homolog of NCBI NO: 18400507 NR Description: zinc finger protein-related [Arabidopsis
MVHASCYGTPLSKSIPDGDWFCERCCFRFEKNDVGNINCNACVLCPSTEGAMKRTTVEEEGGATWAHVVCALFVPEVFFLDPEGREGIDFSKVPKKRWEERCYLCGSCEGCALVCSEPKCGLGFHVTCALKEELWIEYREGKKGGTIVAGFCKNHTQVWEKQSGKYKIVAVEDKK

SEQ ID NO: 52450 - DNA, 1419 bp, Glycine max
  misc_feature (1)..(1419): Ceres Seq. ID no. 14316056
atgaaaatgtctctagccgaatatctctcatatgtccctgatgatcttattgttgaaattctatcacggcttccagtgaaagatcttatgcgttttaggtgcgtttgcaaaacctggaaatccatcatctttgatccaagttttgtgaaaaaacatcttgaaagatcttcaaaaaaaatccatctcataataacccgagaagaagtcctctatgatggttttgactatgactatggtgatgcttatgccataccctactccataaatcaattattcgagaatccatcatcagatgttgatgaagatgactactatcaattaaatggttattggatcattggctcatgcaatggattggtttgtttgggtggttatcatggtgaagaagacacaatttacgaatattgggtccaattttggaacccagctacaaggatgaaatcaaggaaatctccgcgcttacatgtcaatccatgttgtcaaggattcgacccatcaaattctataggctttggatttctttatgatgatttgagtgccatttacaaggtggtgtcagtcctttcaaattgtagatccaagaaaacagaggtatgggtttacaacttaggtggcaattgttggacaaatatctttagttgcccaaatttccccattcttcgtcaaaatggaagacttgtgaatggaactattaattggctagctatcgacatgtcaagttctcattatgaagagcgaaatgatattatcgatccgttagtaattttttcagttgatttacaaaaggacacatataaatatttattgttgcctaaaggtcttgatcaaatcccagataatgatcaattgagaattgtggaattaagggatcgtttgtgcctttatcatgatcgcaatgcaacccattttgttgtttggcaaatgaaggagtttggagtagagaagtcttggactttgttgatgaaggtcacttataatcatctccagataccataccctccagatcgtccattacttccattctgtatatcagaaaatggtgaagtcttgatgttggtaaacaatgatgtgttgaatatgactttttataatcggagaaataaccgagtagaagttattccaattccaaacaacaatgcttggtggcaagctaccaattatattccaagcttggtttcgccttttcagaattaatctcctatgcaacaatttgcttgtttgaatatatctcaagtaatgacccaattgatcatccaacgactctaccaacccattgaagaagttaattgatattgatgttgttatgggtttatatttatgagacatagttagtatcagaaaaatattttatttattccaatatgttgattgactttgccttgctatattttatggacctcataataaaaagactttatt

SEQ ID NO: 52451 - protein, 397 aa, Glycine max
  peptide (1)..(397): Ceres Seq. ID no. 14316057
  misc_feature (12)..(54): Pfam Name: F-box domain Pfam Description: F-box domain
  misc_feature (15)..(274): Homolog of NCBI NO: 33354147 NR Description: S-locus F-Box protein 6 [Prunus avium]
  misc_feature (12)..(323): Homolog of NCBI NO: 15238138 NR Description: F-box protein family [Arabidopsis thaliana]
  misc_feature (15)..(288): Homolog of NCBI NO: 28866895 NR Description: S haplotype-specific F-box protein b [Prunus
  misc_feature (12)..(357): Homolog of NCBI NO: 38347475 NR Description: OSJNBa0084N21.13 [Oryza sativa (japonica
  misc_feature (14)..(274): Homolog of NCBI NO: 33354145 NR Description: S-locus F-Box protein 3 [Prunus avium]
  misc_feature (6)..(306): Homolog of NCBI NO: 37536946 NR Description: unknown protein [Oryza sativa (japonica
  misc_feature (15)..(274): Homolog of NCBI NO: 29420819 NR Description: F-box [Prunus mume]
  misc_feature (15)..(318): Homolog of NCBI NO: 13161528 NR Description: S locus F-box (SLF)-S2-like protein [Antirrhinum
  misc_feature (15)..(318): Homolog of NCBI NO: 13161526 NR Description: S locus F-box (SLF)-S2 protein [Antirrhinum
  misc_feature (12)..(241): Homolog of NCBI NO: 15229536 NR Description: F-box protein family [Arabidopsis thaliana]
MKMSLAEYLSYVPDDLIVEILSRLPVKDLMRFRCVCKTWKSIIFDPSFVKKHLERSSKKIHLIITREEVLYDGFDYDYGDAYAIPYSINQLFENPSSDVDEDDYYQLNGYWIIGSCNGLVCLGGYHGEEDTIYEYWVQFWNPATRMKSRKSPRLHVNPCCQGFDPSNSIGFGFLYDDLSAIYKVVSVLSNCRSKKTEVWVYNLGGNCWTNIFSCPNFPILRQNGRLVNGTINWLAIDMSSSHYEERNDIIDPLVIFSVDLQKDTYKYLLLPKGLDQIPDNDQLRIVELRDRLCLYHDRNATHFVVWQMKEFGVEKSWTLLMKVTYNHLQIPYPPDRPLLPFCISENGEVLMLVNNDVLNMTFYNRRNNRVEVIPIPNNNAWWQATNYIPSLVSPFQN

SEQ ID NO: 52452 - protein, 395 aa, Glycine max
  peptide (1)..(395): Ceres Seq. ID no. 14316058
  misc_feature (10)..(52): Pfam Name: F-box domain Pfam Description: F-box domain
  misc_feature (13)..(272): Homolog of NCBI NO: 33354147 NR Description: S-locus F-Box protein 6 [Prunus avium]
  misc_feature (10)..(321): Homolog of NCBI NO: 15238138 NR Description: F-box protein family [Arabidopsis thaliana]
  misc_feature (13)..(286): Homolog of NCBI NO: 28866895 NR Description: S haplotype-specific F-box protein b [Prunus
  misc_feature (10)..(355): Homolog of NCBI NO: 38347475 NR Description: OSJNBa0084N21.13 [Oryza sativa (japonica
  misc_feature (12)..(272): Homolog of NCBI NO: 33354145 NR Description: S-locus F-Box protein 3 [Prunus avium]
  misc_feature (4)..(304): Homolog of NCBI NO: 37536946 NR Description: unknown protein [Oryza sativa (japonica
  misc_feature (13)..(272): Homolog of NCBI NO: 29420819 NR Description: F-box [Prunus mume]
  misc_feature (13)..(316): Homolog of NCBI NO: 13161528 NR Description: S locus F-box (SLF)-S2-like protein [Antirrhinum
  misc_feature (13)..(316): Homolog of NCBI NO: 13161526 NR Description: S locus F-box (SLF)-S2 protein [Antirrhinum
  misc_feature (10)..(239): Homolog of NCBI NO: 15229536 NR Description: F-box protein family [Arabidopsis thaliana]
MSLAEYLSYVPDDLIVEILSRLPVKDLMRFRCVCKTWKSIIFDPSFVKKHLERSSKKIHLIITREEVLYDGFDYDYGDAYAIPYSINQLFENPSSDVDEDDYYQLNGYWIIGSCNGLVCLGGYHGEEDTIYEYWVQFWNPATRMKSRKSPRLHVNPCCQGFDPSNSIGFGFLYDDLSAIYKVVSVLSNCRSKKTEVWVYNLGGNCWTNIFSCPNFPILRQNGRLVNGTINWLAIDMSSSHYEERNDIIDPLVIFSVDLQKDTYKYLLLPKGLDQIPDNDQLRIVELRDRLCLYHDRNATHFVVWQMKEFGVEKSWTLLMKVTYNHLQIPYPPDRPLLPFCISENGEVLMLVNNDVLNMTFYNRRNNRVEVIPIPNNNAWWQATNYIPSLVSPFQN

SEQ ID NO: 52453 - protein, 368 aa, Glycine max
  peptide (1)..(368): Ceres Seq. ID no. 14316059
  misc_feature (1)..(245): Homolog of NCBI NO: 33354147 NR Description: S-locus F-Box protein 6 [Prunus avium]
  misc_feature (1)..(294): Homolog of NCBI NO: 15238138 NR Description: F-box protein family [Arabidopsis thaliana]
  misc_feature (1)..(259): Homolog of NCBI NO: 28866895 NR Description: S haplotype-specific F-box protein b [Prunus
  misc_feature (1)..(328): Homolog of NCBI NO: 38347475 NR Description: OSJNBa0084N21.13 [Oryza sativa (japonica
  misc_feature (1)..(245): Homolog of NCBI NO: 33354145 NR Description: S-locus F-Box protein 3 [Prunus avium]
  misc_feature (1)..(277): Homolog of NCBI NO: 37536946 NR Description: unknown protein [Oryza sativa (japonica
  misc_feature (1)..(245): Homolog of NCBI NO: 29420819 NR Description: F-box [Prunus mume]
  misc_feature (1)..(289): Homolog of NCBI NO: 13161528 NR Description: S locus F-box (SLF)-S2-like protein [Antirrhinum
  misc_feature (1)..(289): Homolog of NCBI NO: 13161526 NR Description: S locus F-box (SLF)-S2 protein [Antirrhinum
  misc_feature (1)..(212): Homolog of NCBI NO: 15229536 NR Description: F-box protein family [Arabidopsis thaliana]
MRFRCVCKTWKSIIFDPSFVKKHLERSSKKIHLIITREEVLYDGFDYDYGDAYAIPYSINQLFENPSSDVDEDDYYQLNGYWIIGSCNGLVCLGGYHGEEDTIYEYWVQFWNPATRMKSRKSPRLHVNPCCQGFDPSNSIGFGFLYDDLSAIYKVVSVLSNCRSKKTEVWVYNLGGNCWTNIFSCPNFPILRQNGRLVNGTINWLAIDMSSSHYEERNDIIDPLVIFSVDLQKDTYKYLLLPKGLDQIPDNDQLRIVELRDRLCLYHDRNATHFVVWQMKEFGVEKSWTLLMKVTYNHLQIPYPPDRPLLPFCISENGEVLMLVNNDVLNMTFYNRRNNRVEVIPIPNNNAWWQATNYIPSLVSPFQN

SEQ ID NO: 52454 - DNA, 1603 bp, Glycine max
  misc_feature (1)..(1603): Ceres Seq. ID no. 14316107
taaacattggcattgccatggaagccaagctctggaactggaaccctctccttcttcctcctcgtttttcttcactcaaacatgcttttccatcaacaactactcgcctcgtagctcacaattcagtctcagaaaccgttcccattcataaggaaaaggaacaaaccctaccttctgtcaaacctacttactcccccactcctcccaatcgaggccttcgaacccctcacagcgggtaccattttgatgggactactcgcaaattcttcgagggttggtacttcaaagtctccattcccgaacggaagcagagcttttgctttatgtataccgtcgagagtcccctgtttcgtaaaccattgacgcagctcgaactggcccaatacgggcccaggtttactggtgtcggggcccaaattctcggtgctgatgacaaatatgtttgccaacactctccccaatcacattttttctggggaagcaggcatgaactaatgttggggaacacgttcgagcccaaccaaaattctaaacctccaaacaaggaggttcctcctcaggaatttaatgatagggtgctggaaggttttcaagtcacccccctttggcatcaaggttttattcgcgatgatggaaggtcaaattatgtagagacggtaaagacagctcgttgggagtatagtacacgtcctgtatatggttggggtgatgttggttctacgcagaagtctactgctgggtggcttgcagcttttcctgtttttgaaccacattggcaaatatgcatggctggtggactgtcaacaggttggatagagtgggatggcgagaggattgagtttgataatgctccatcttattcagaaaagaactggggtggaggattcccaagaaaatggttttgggttcaatgtaatgtttttgaaggtgctagtggagaaattgctcttacagcagctggtggattgaggcaaattcctggaataaccgagacctttgaaaatgctgcattgattggaattcattatggtggaaatttttatgaatttgtgccatggaatggtgttgttaactgggaagttactacttggggttattggtttatgtcagcagacaatggcaaatatgtggttgaattagaagcaacaacagaggatccaggtacaacattgcgtgctccaacagcagaagctggctttgcccctgcatgtaaagatacatgctttggaaatctaaaattacaaatgtgggaacgaagatatgatggcagcaaggggaagatcatattggacgtttcaagtaacatggcagcactagaagttggaggaggtccatggtttaacacttggaagggcaagacatcaactccagcagcccttagccgtgtccttgaattacccatagacgtagagggcattttcaatcctgttcctctatttaaaccgcctggcctgtagtcatttggtttggtattatcttcctttttttttagtttttaatctaatcatgcggcataatgcatggtttaatgttataaactttgtcatagtgcatgaaaggattcagagtttcaccataaggatagaaagggattcttgattac

SEQ ID NO: 52455 - protein, 484 aa, Glycine max
  peptide (1)..(484): Ceres Seq. ID no. 14316108
  misc_feature (129)..(450): Homolog of NCBI NO: 37522658 NR Description: hypothetical protein glr3089 [Gloeobacter
  misc_feature (75)..(445): Homolog of NCBI NO: 16330367 NR Description: unknown protein [Synechocystis sp. PCC 6803]
  misc_feature (129)..(452): Homolog of NCBI NO: 23130125 NR Description: hypothetical protein [Nostoc punctiforme]
  misc_feature (129)..(450): Homolog of NCBI NO: 17227741 NR Description: hypothetical protein [Nostoc sp. PCC 7120]
  misc_feature (129)..(449): Homolog of NCBI NO: 23041856 NR Description: hypothetical protein [Trichodesmium erythraeum
  misc_feature (426)..(484): Homolog of NCBI NO: 7486416 NR Description: hypothetical protein F4D11.30 - Arabidopsis
  misc_feature (79)..(439): Homolog of NCBI NO: 7486416 NR Description: hypothetical protein F4D11.30 - Arabidopsis
  misc_feature (55)..(484): Homolog of NCBI NO: 24212570 NR Description: Probable tocopherol cyclase, chloroplast
  misc_feature (30)..(484): Homolog of NCBI NO: 18418083 NR Description: sucrose export defective 1 precursor (SXD1)
  misc_feature (57)..(484): Homolog of NCBI NO: 33188419 NR Description: tocopherol cyclase [Eucalyptus gunnii]
NIGIAMEAKLWNWNPLLLPPRFSSLKHAFPSTTTRLVAHNSVSETVPIHKEKEQTLPSVKPTYSPTPPNRGLRTPHSGYHFDGTTRKFFEGWYFKVSIPERKQSFCFMYTVESPLFRKPLTQLELAQYGPRFTGVGAQILGADDKYVCQHSPQSHFFWGSRHELMLGNTFEPNQNSKPPNKEVPPQEFNDRVLEGFQVTPLWHQGFIRDDGRSNYVETVKTARWEYSTRPVYGWGDVGSTQKSTAGWLAAFPVFEPHWQICMAGGLSTGWIEWDGERIEFDNAPSYSEKNWGGGFPRKWFWVQCNVFEGASGEIALTAAGGLRQIPGITETFENAALIGIHYGGNFYEFVPWNGVVNWEVTTWGYWFMSADNGKYVVELEATTEDPGTTLRAPTAEAGFAPACKDTCFGNLKLQMWERRYDGSKGKIILDVSSNMAALEVGGGPWFNTWKGKTSTPAALSRVLELPIDVEGIFNPVPLFKPPGL

SEQ ID NO: 52456 - protein, 479 aa, Glycine max
  peptide (1)..(479): Ceres Seq. ID no. 14316109
  misc_feature (124)..(445): Homolog of NCBI NO: 37522658 NR Description: hypothetical protein glr3089 [Gloeobacter
  misc_feature (70)..(440): Homolog of NCBI NO: 16330367 NR Description: unknown protein [Synechocystis sp. PCC 6803]
  misc_feature (124)..(447): Homolog of NCBI NO: 23130125 NR Description: hypothetical protein [Nostoc punctiforme]
  misc_feature (124)..(445): Homolog of NCBI NO: 17227741 NR Description: hypothetical protein [Nostoc sp. PCC 7120]
  misc_feature (124)..(444): Homolog of NCBI NO: 23041856 NR Description: hypothetical protein [Trichodesmium erythraeum
  misc_feature (421)..(479): Homolog of NCBI NO: 7486416 NR Description: hypothetical protein F4D11.30 - Arabidopsis
  misc_feature (74)..(434): Homolog of NCBI NO: 7486416 NR Description: hypothetical protein F4D11.30 - Arabidopsis
  misc_feature (50)..(479): Homolog of NCBI NO: 24212570 NR Description: Probable tocopherol cyclase, chloroplast
  misc_feature (25)..(479): Homolog of NCBI NO: 18418083 NR Description: sucrose export defective 1 precursor (SXD1)
  misc_feature (52)..(479): Homolog of NCBI NO: 33188419 NR Description: tocopherol cyclase [Eucalyptus gunnii]
MEAKLWNWNPLLLPPRFSSLKHAFPSTTTRLVAHNSVSETVPIHKEKEQTLPSVKPTYSPTPPNRGLRTPHSGYHFDGTTRKFFEGWYFKVSIPERKQSFCFMYTVESPLFRKPLTQLELAQYGPRFTGVGAQILGADDKYVCQHSPQSHFFWGSRHELMLGNTFEPNQNSKPPNKEVPPQEFNDRVLEGFQVTPLWHQGFIRDDGRSNYVETVKTARWEYSTRPVYGWGDVGSTQKSTAGWLAAFPVFEPHWQICMAGGLSTGWIEWDGERIEFDNAPSYSEKNWGGGFPRKWFWVQCNVFEGASGEIALTAAGGLRQIPGITETFENAALIGIHYGGNFYEFVPWNGVVNWEVTTWGYWFMSADNGKYVVELEATTEDPGTTLRAPTAEAGFAPACKDTCFGNLKLQMWERRYDGSKGKIILDVSSNMAALEVGGGPWFNTWKGKTSTPAALSRVLELPIDVEGIFNPVPLFKPPGL

SEQ ID NO: 52457 - protein, 377 aa, Glycine max
  peptide (1)..(377): Ceres Seq. ID no. 14316110
  misc_feature (22)..(343): Homolog of NCBI NO: 37522658 NR Description: hypothetical protein glr3089 [Gloeobacter
  misc_feature (1)..(338): Homolog of NCBI NO: 16330367 NR Description: unknown protein [Synechocystis sp. PCC 6803]
  misc_feature (22)..(345): Homolog of NCBI NO: 23130125 NR Description: hypothetical protein [Nostoc punctiforme]
  misc_feature (22)..(343): Homolog of NCBI NO: 17227741 NR Description: hypothetical protein [Nostoc sp. PCC 7120]
  misc_feature (22)..(342): Homolog of NCBI NO: 23041856 NR Description: hypothetical protein [Trichodesmium erythraeum
  misc_feature (319)..(377): Homolog of NCBI NO: 7486416 NR Description: hypothetical protein F4D11.30 - Arabidopsis
  misc_feature (1)..(332): Homolog of NCBI NO: 7486416 NR Description: hypothetical protein F4D11.30 - Arabidopsis
  misc_feature (1)..(377): Homolog of NCBI NO: 24212570 NR Description: Probable tocopherol cyclase, chloroplast
  misc_feature (1)..(377): Homolog of NCBI NO: 18418083 NR Description: sucrose export defective 1 precursor (SXD1)
  misc_feature (1)..(377): Homolog of NCBI NO: 33188419 NR Description: tocopherol cyclase [Eucalyptus gunnii]
MYTVESPLFRKPLTQLELAQYGPRFTGVGAQILGADDKYVCQHSPQSHFFWGSRHELMLGNTFEPNQNSKPPNKEVPPQEFNDRVLEGFQVTPLWHQGFIRDDGRSNYVETVKTARWEYSTRPVYGWGDVGSTQKSTAGWLAAFPVFEPHWQICMAGGLSTGWIEWDGERIEFDNAPSYSEKNWGGGFPRKWFWVQCNVFEGASGEIALTAAGGLRQIPGITETFENAALIGIHYGGNFYEFVPWNGVVNWEVTTWGYWFMSADNGKYVVELEATTEDPGTTLRAPTAEAGFAPACKDTCFGNLKLQMWERRYDGSKGKIILDVSSNMAALEVGGGPWFNTWKGKTSTPAALSRVLELPIDVEGIFNPVPLFKPPGL

SEQ ID NO: 52458 - DNA, 1160 bp, Glycine max
  misc_feature (1)..(1160): Ceres Seq. ID no. 14305750
atcaaagtctctcaatcttatcaaccagccaaccaaccaaccaaccaaccaacgatggattccgagatcgccttcgactactctccattgctcaaaatctacaagagtggccgcatcgagcgcctcatgggagaaacggccgtcccaccgtctttaaccccacaaaacggcgtcatttcaaaggacgtcgtttattcacccgacgacaacctctccgtccgcgtttacctcccagagaaagctgccgacaccgatgagaaactccctctcctcgtctacttccacggaggaggcttcatcatcgaaacagctttctcaccgacttaccacaatttcctcacggcggccgtctctgcgtccgactgcatagcggtgtcggtggattaccggcgtgcaccggagcatccgcttccgatctctttcgatgactcgtggacgtctctcaaatgggtattcacccatatcgccggatctggaccggagagctggttaaacaaacacgccgacttcagcaaagtgttcctcgccggagacagcgccggcgcgaacatcgctcatcacatggcgatgagagctgcgaaagagaagctcagtcccgagttaagcgactcaggaatcttcgggatcatcttggttcatccttacttctggtcgaaagcacctgtcgacgacaaggagacaacggatgctgcggtgcggtccaagatcgaagcgatatggatgatggctagtcctgacaacaaagacggagtggatgatccgtggctcaacgtggttcagtcagactcggtggatatctccgggttgggctgcgggaaggttttggtgttggtggctgagaaagatgcgcttgtgagacaaggttggggttacaaggcgaagcttgagaagaacggttggaaagggaaagtggagttggttgagagtgaaggtgaagatcatgtgtttcatttgacgagacctgattgtgagaatgctcttgaagccatgaagaagttcgcagggtttattaagggagagatgtaataggcgctctttcgtctggatgaaagattacgatatgtaatggaataattatctgtctatcagtctctgtaatgtttttaagtgatttatcatattagcacgaaaggcatcaataatattctatgggttcagtt

SEQ ID NO: 52459 - protein, 341 aa, Glycine max
  peptide (1)..(341): Ceres Seq. ID no. 14305751
  misc_feature (75)..(130): Pfam Name: Carboxylesterase Pfam Description: Carboxylesterase
  misc_feature (19)..(337): Homolog of NCBI NO: 15222791 NR Description: hypothetical protein [Arabidopsis thaliana]
  misc_feature (19)..(339): Homolog of NCBI NO: 15222795 NR Description: expressed protein [Arabidopsis thaliana]
  misc_feature (21)..(339): Homolog of NCBI NO: 21537287 NR Description: putative esterase [Arabidopsis thaliana]
  misc_feature (21)..(339): Homolog of NCBI NO: 18402731 NR Description: expressed protein [Arabidopsis thaliana]
  misc_feature (19)..(340): Homolog of NCBI NO: 15221975 NR Description: expressed protein [Arabidopsis thaliana]
  misc_feature (23)..(337): Homolog of NCBI NO: 28393060 NR Description: putative esterase [Arabidopsis thaliana]
  misc_feature (19)..(337): Homolog of NCBI NO: 15227669 NR Description: expressed protein [Arabidopsis thaliana]
  misc_feature (19)..(340): Homolog of NCBI NO: 15228426 NR Description: expressed protein [Arabidopsis thaliana]
  misc_feature (19)..(339): Homolog of NCBI NO: 18086341 NR Description: AT3g48690/T8P19_200 [Arabidopsis thaliana]
  misc_feature (19)..(339): Homolog of NCBI NO: 15228425 NR Description: expressed protein [Arabidopsis thaliana]
IKVSQSYQPANQPTNQPTMDSEIAFDYSPLLKIYKSGRIERLMGETAVPPSLTPQNGVISKDVVYSPDDNLSVRVYLPEKAADTDEKLPLLVYFHGGGFIIETAFSPTYHNFLTAAVSASDCIAVSVDYRRAPEHPLPISFDDSWTSLKWVFTHIAGSGPESWLNKHADFSKVFLAGDSAGANIAHHMAMRAAKEKLSPELSDSGIFGIILVHPYFWSKAPVDDKETTDAAVRSKIEAIWMMASPDNKDGVDDPWLNVVQSDSVDISGLGCGKVLVLVAEKDALVRQGWGYKAKLEKNGWKGKVELVESEGEDHVFHLTRPDCENALEAMKKFAGFIKGEM

SEQ ID NO: 52460 - protein, 323 aa, Glycine max
  peptide (1)..(323): Ceres Seq. ID no. 14305752
  misc_feature (57)..(112): Pfam Name: Carboxylesterase Pfam Description: Carboxylesterase
  misc_feature (1)..(319): Homolog of NCBI NO: 15222791 NR Description: hypothetical protein [Arabidopsis thaliana]
  misc_feature (1)..(321): Homolog of NCBI NO: 15222795 NR Description: expressed protein [Arabidopsis thaliana]
  misc_feature (3)..(321): Homolog of NCBI NO: 21537287 NR Description: putative esterase [Arabidopsis thaliana]
  misc_feature (3)..(321): Homolog of NCBI NO: 18402731 NR Description: expressed protein [Arabidopsis thaliana]
  misc_feature (1)..(322): Homolog of NCBI NO: 15221975 NR Description: expressed protein [Arabidopsis thaliana]
  misc_feature (5)..(319): Homolog of NCBI NO: 28393060 NR Description: putative esterase [Arabidopsis thaliana]
  misc_feature (1)..(319): Homolog of NCBI NO: 15227669 NR Description: expressed protein [Arabidopsis thaliana]
  misc_feature (1)..(322): Homolog of NCBI NO: 15228426 NR Description: expressed protein [Arabidopsis thaliana]
  misc_feature (1)..(321): Homolog of NCBI NO: 18086341 NR Description: AT3g48690/T8P19_200 [Arabidopsis thaliana]
  misc_feature (1)..(321): Homolog of NCBI NO: 15228425 NR Description: expressed protein [Arabidopsis thaliana]
MDSEIAFDYSPLLKIYKSGRIERLMGETAVPPSLTPQNGVISKDVVYSPDDNLSVRVYLPEKAADTDEKLPLLVYFHGGGFIIETAFSPTYHNFLTAAVSASDCIAVSVDYRRAPEHPLPISFDDSWTSLKWVFTHIAGSGPESWLNKHADFSKVFLAGDSAGANIAHHMAMRAAKEKLSPELSDSGIFGIILVHPYFWSKAPVDDKETTDAAVRSKIEAIWMMASPDNKDGVDDPWLNVVQSDSVDISGLGCGKVLVLVAEKDALVRQGWGYKAKLEKNGWKGKVELVESEGEDHVFHLTRPDCENALEAMKKFAGFIKGEM

SEQ ID NO: 52461 - protein, 299 aa, Glycine max
  peptide (1)..(299): Ceres Seq. ID no. 14305753
  misc_feature (33)..(88): Pfam Name: Carboxylesterase Pfam Description: Carboxylesterase
  misc_feature (1)..(295): Homolog of NCBI NO: 15222791 NR Description: hypothetical protein [Arabidopsis thaliana]
  misc_feature (1)..(297): Homolog of NCBI NO: 15222795 NR Description: expressed protein [Arabidopsis thaliana]
  misc_feature (1)..(297): Homolog of NCBI NO: 21537287 NR Description: putative esterase [Arabidopsis thaliana]
  misc_feature (1)..(297): Homolog of NCBI NO: 18402731 NR Description: expressed protein [Arabidopsis thaliana]
  misc_feature (1)..(298): Homolog of NCBI NO: 15221975 NR Description: expressed protein [Arabidopsis thaliana]
  misc_feature (1)..(295): Homolog of NCBI NO: 28393060 NR Description: putative esterase [Arabidopsis thaliana]
  misc_feature (1)..(295): Homolog of NCBI NO: 15227669 NR Description: expressed protein [Arabidopsis thaliana]
  misc_feature (1)..(298): Homolog of NCBI NO: 15228426 NR Description: expressed protein [Arabidopsis thaliana]
  misc_feature (1)..(297): Homolog of NCBI NO: 18086341 NR Description: AT3g48690/T8P19_200 [Arabidopsis thaliana]
  misc_feature (1)..(297): Homolog of NCBI NO: 15228425 NR Description: expressed protein [Arabidopsis thaliana]
MGETAVPPSLTPQNGVISKDVVYSPDDNLSVRVYLPEKAADTDEKLPLLVYFHGGGFIIETAFSPTYHNFLTAAVSASDCIAVSVDYRRAPEHPLPISFDDSWTSLKWVFTHIAGSGPESWLNKHADFSKVFLAGDSAGANIAHHMAMRAAKEKLSPELSDSGIFGIILVHPYFWSKAPVDDKETTDAAVRSKIEAIWMMASPDNKDGVDDPWLNVVQSDSVDISGLGCGKVLVLVAEKDALVRQGWGYKAKLEKNGWKGKVELVESEGEDHVFHLTRPDCENALEAMKKFAGFIKGEM

SEQ ID NO: 52462 - DNA, 949 bp, Glycine max
  misc_feature (1)..(949): Ceres Seq. ID no. 14305743
cttcaatttcccttccgatcatcccgaatcctcgagatttctttcgattgaactcatttctctcttcttcgccacgcactcttgtctctgtaagcggtgattttggttctggacaatgtctcgtgtttatgttgggaatttagaccctcgagtcagtgagagggacctcgaagatgaatttcgtatatatggtgttcttaggagtgtctgggttgctcgaagaccaccgggatatgcatttattgagtttgatgataggagggatgcacttgatgcaattcaggccttggatggaaaaaatggttggcgtgtagagctttctcataattccaagggtggtggccgaggagggcgtgggcgtggaggtgaagacacaaaatgctatgaatgtggtgaacctggacactttgctcgggagtgccgattgcgcattggatcacgtggccttggaagtggaaggaggcgaagtccaagtccttatcggcgtcgtagaagtccgagttatggttatgatcgcagtagttatagccctcgtgggagaagatctccaagacgacgtagcatttcacctccctggggtcgcaactacagcaggtcccctccatatcgtcctcgccgtgattcaccttatgccaatgcagattaaaatcagaatgtgaacggagcaagtgctgaatagttgttaggatgttctctctgctatagtgtagttcctctaggattggttgagcataccacagacatgttagttatgttaatgtcatgacaatgggtattgttaagaacttggcttttgatggaactacatagggttgtagctggcaaaagggtgcgttggacactgttttgcattggctgtctctcttcagcttactgaaacctgaaggttgcttcagtcttccctactttatatagcatgttatgttaattgtttgtttttagtcttact

SEQ ID NO: 52463 - protein, 176 aa, Glycine max
  peptide (1)..(176): Ceres Seq. ID no. 14305744
  misc_feature (4)..(61): Pfam Name: RNA recognition motif. (a.k.a. RRM, RBD, or RNP domain) Pfam Description: RNA recognition motif. (a.k.a. RRM, RBD, or RNP
  misc_feature (2)..(159): Homolog of NCBI NO: 22122585 NR Description: splicing factor, arginine/serine-rich 7
  misc_feature (2)..(159): Homolog of NCBI NO: 15928796 NR Description: 9430065L19Rik protein [Mus musculus]
  misc_feature (1)..(159): Homolog of NCBI NO: 26337671 NR Description: unnamed protein product [Mus musculus]
  misc_feature (2)..(169): Homolog of NCBI NO: 31222328 NR Description: ENSANGP00000018287 [Anopheles gambiae]
  misc_feature (1)..(176): Homolog of NCBI NO: 25294318 NR Description: splicing factor RSZp22 [validated] - Arabidopsis
  misc_feature (1)..(176): Homolog of NCBI NO: 15236000 NR Description: splicing factor SRZ_22 [Arabidopsis thaliana]
  misc_feature (1)..(176): Homolog of NCBI NO: 15224171 NR Description: RSZp22 splicing factor -related [Arabidopsis
  misc_feature (1)..(171): Homolog of NCBI NO: 25294317 NR Description: protein T23E23.2 [imported] - Arabidopsis
  misc_feature (1)..(171): Homolog of NCBI NO: 25294319 NR Description: splicing factor RSZp21 [imported] - Arabidopsis
  misc_feature (1)..(171): Homolog of NCBI NO: 18395314 NR Description: splicing factor SRZ_21 [Arabidopsis thaliana]
MSRVYVGNLDPRVSERDLEDEFRIYGVLRSVWVARRPPGYAFIEFDDRRDALDAIQALDGKNGWRVELSHNSKGGGRGGRGRGGEDTKCYECGEPGHFARECRLRIGSRGLGSGRRRSPSPYRRRRSPSYGYDRSSYSPRGRRSPRRRSISPPWGRNYSRSPPYRPRRDSPYANAD

SEQ ID NO: 52464 - protein, 91 aa, Glycine max
  peptide (1)..(91): Ceres Seq. ID no. 14305745
MNVVNLDTLLGSADCALDHVALEVEGGEVQVLIGVVEVRVMVMIAVVIALVGEDLQDDVAFHLPGVATTAGPLHIVLAVIHLMPMQIKIRM

SEQ ID NO: 52465 - DNA, 895 bp, Glycine max
  misc_feature (1)..(895): Ceres Seq. ID no. 14316060
aacccaccacatagccgattcactactcgcacggcacatgcaccctcctctatctctctctgcagcataagcacagcatcatagaccctttctcaaaaaatagggttcctccgttagggttagaggtcacaccatcttacactatactaacccctagccagccagcgagtttgagtgcttgggggtgcaatggcgggagtgagggaacaggaccagtacatgccgatagcgaacgtgataaggatcatgcgtcggattctgccagcgcacgcgaagatctcagacgacgcgaaggagacgatccaggagtgcgtgtctgagtacatcagtttcatcacggcggaggcgaacgagcggtgccagcgggagcagcggaagacggtgaccgcagaggatgtgttgtgggcgatggagaagcttggctttgacaactacgctcaccctctctctctttaccttcaccgctaccgcgagagtgaaggagaacctgcttctgtcagacgcgcttcttctgcaatggggatcaataataatatggtgcacccaccttatattaattctcatggctttggaatgtttgattttgacccatcatcgcaagggttttacagggacgatcataacgctgcttctggatctggtggttttgttgcgccttttgatccttatgctaacatcaaacgtgatgccctgtgatcatgtaagaacaacaactagtgcatgctgctttttcacttggttagttatattcaagcacaagcacatgcaggtgcagctgcaactatttagcttcatctacaaatcttttttcctctcttcttctcatgctttaattatttagagacaatacttgttattcattgttatgctcaattgctagcttctattcatcgcc

SEQ ID NO: 52466 - protein, 168 aa, Glycine max
  peptide (1)..(168): Ceres Seq. ID no. 14316061
  misc_feature (9)..(74): Pfam Name: Histone-like transcription factor (CBF/NF-Y) and Pfam Description: Histone-like transcription factor (CBF/NF-Y)
MAGVREQDQYMPIANVIRIMRRILPAHAKISDDAKETIQECVSEYISFITAEANERCQREQRKTVTAEDVLWAMEKLGFDNYAHPLSLYLHRYRESEGEPASVRRASSAMGINNNMVHPPYINSHGFGMFDFDPSSQGFYRDDHNAASGSGGFVAPFDPYANIKRDAL

SEQ ID NO: 52467 - protein, 158 aa, Glycine max
  peptide (1)..(158): Ceres Seq. ID no. 14316062
  misc_feature (1)..(64): Pfam Name: Histone-like transcription factor (CBF/NF-Y) and Pfam Description: Histone-like transcription factor (CBF/NF-Y)
MPIANVIRIMRRILPAHAKISDDAKETIQECVSEYISFITAEANERCQREQRKTVTAEDVLWAMEKLGFDNYAHPLSLYLHRYRESEGEPASVRRASSAMGINNNMVHPPYINSHGFGMFDFDPSSQGFYRDDHNAASGSGGFVAPFDPYANIKRDAL

SEQ ID NO: 52468 - protein, 149 aa, Glycine max
  peptide (1)..(149): Ceres Seq. ID no. 14316063
  misc_feature (1)..(55): Pfam Name: Histone-like transcription factor (CBF/NF-Y) and Pfam Description: Histone-like transcription factor (CBF/NF-Y)
MRRILPAHAKISDDAKETIQECVSEYISFITAEANERCQREQRKTVTAEDVLWAMEKLGFDNYAHPLSLYLHRYRESEGEPASVRRASSAMGINNNMVHPPYINSHGFGMFDFDPSSQGFYRDDHNAASGSGGFVAPFDPYANIKRDAL

SEQ ID NO: 52469 - DNA, 894 bp, Glycine max
  misc_feature (1)..(894): Ceres Seq. ID no. 15171235
taaaaaattgttcgtaggcaacttcaacctcaccaaaggaactaagaatttcattgaggctagagaaagtggtgatcaatatgtcaaagaatccaaaagttttctttgatattctaattggaaagatgaaagctggacgagtagtgatggagttgtttgccgatgcaaccccaaaaacagctgaaaacttcagggctctctgcactggggaaaaggggattggacgatctgggaaacctttacactacaaaggttctgtatttcatcgtattattccagaatttatgtgtcagggaggagatttcacaagagggaatgggaccgggggtgagtcaatctacggttccaaatttgaagatgagaatttcaatttgaggcataccggtcctggtattctctccatggcaaatgctggagctcatactaatggttctcagttcttcatatgtactacaaagacaccatggcttgatgggaaacatgttgtgtttggaaaagttgttgatggatacagcgttgtgcaggagatggagaaagtgggttcaggaagtggcaggacatctgaaccggtagtaatagaagattgtggccagattgtagagaagtgagtcttgatacaacgatgtttcgagacatgtttgttgctattcaatgcaaatcactagtattataataagtgatttgtgtaactaggagtcaattgtccagtattaatgtaactctcaaatttgtactcctaaatctgcttttacatttgttccaactaaaaatgcgtagctgtctgtagttggtcagagattacgttgatagaattgtggaagcaataggctcgaatatctgtagttgattggtaaattagaatgaataaggatgaagcactacatatttgcaatt

SEQ ID NO: 52470 - protein, 175 aa, Glycine max
  peptide (1)..(175): Ceres Seq. ID no. 15171236
  misc_feature (4)..(172): Homolog of NCBI NO: 11270320 NR Description: peptidylprolyl isomerase (EC 5.2.1.8) vcCyP
  misc_feature (4)..(172): Homolog of NCBI NO: 18146786 NR Description: CYP1 [Vigna radiata]
  misc_feature (1)..(172): Homolog of NCBI NO: 15227259 NR Description: cytosolic cyclophilin (ROC3) [Arabidopsis
  misc_feature (4)..(172): Homolog of NCBI NO: 11270314 NR Description: peptidylprolyl isomerase (EC 5.2.1.8) ATCYP4
  misc_feature (4)..(172): Homolog of NCBI NO: 15228814 NR Description: peptidylprolyl isomerase [Arabidopsis thaliana]
  misc_feature (4)..(172): Homolog of NCBI NO: 1305457 NR Description: cytosolic cyclophilin [Arabidopsis thaliana]
  misc_feature (2)..(174): Homolog of NCBI NO: 1084454 NR Description: peptidylprolyl isomerase (EC 5.2.1.8) Cyp1 - rice
MSKNPKVFFDILIGKMKAGRVVMELFADATPKTAENFRALCTGEKGIGRSGKPLHYKGSVFHRIIPEFMCQGGDFTRGNGTGGESIYGSKFEDENFNLRHTGPGILSMANAGAHTNGSQFFICTTKTPWLDGKHVVFGKVVDGYSVVQEMEKVGSGSGRTSEPVVIEDCGQIVEK

SEQ ID NO: 52471 - protein, 160 aa, Glycine max
  peptide (1)..(160): Ceres Seq. ID no. 15171237
  misc_feature (1)..(157): Homolog of NCBI NO: 11270320 NR Description: peptidylprolyl isomerase (EC 5.2.1.8) vcCyP
  misc_feature (1)..(157): Homolog of NCBI NO: 18146786 NR Description: CYP1 [Vigna radiata]
  misc_feature (1)..(157): Homolog of NCBI NO: 15227259 NR Description: cytosolic cyclophilin (ROC3) [Arabidopsis
  misc_feature (1)..(157): Homolog of NCBI NO: 11270314 NR Description: peptidylprolyl isomerase (EC 5.2.1.8) ATCYP4
  misc_feature (1)..(157): Homolog of NCBI NO: 15228814 NR Description: peptidylprolyl isomerase [Arabidopsis thaliana]
  misc_feature (1)..(157): Homolog of NCBI NO: 1305457 NR Description: cytosolic cyclophilin [Arabidopsis thaliana]
  misc_feature (1)..(159): Homolog of NCBI NO: 1084454 NR Description: peptidylprolyl isomerase (EC 5.2.1.8) Cyp1 - rice
MKAGRVVMELFADATPKTAENFRALCTGEKGIGRSGKPLHYKGSVFHRIIPEFMCQGGDFTRGNGTGGESIYGSKFEDENFNLRHTGPGILSMANAGAHTNGSQFFICTTKTPWLDGKHVVFGKVVDGYSVVQEMEKVGSGSGRTSEPVVIEDCGQIVEK

SEQ ID NO: 52472 - protein, 153 aa, Glycine max
  peptide (1)..(153): Ceres Seq. ID no. 15171238
  misc_feature (1)..(150): Homolog of NCBI NO: 11270320 NR Description: peptidylprolyl isomerase (EC 5.2.1.8) vcCyP
  misc_feature (1)..(150): Homolog of NCBI NO: 18146786 NR Description: CYP1 [Vigna radiata]
  misc_feature (1)..(150): Homolog of NCBI NO: 15227259 NR Description: cytosolic cyclophilin (ROC3) [Arabidopsis
  misc_feature (1)..(150): Homolog of NCBI NO: 11270314 NR Description: peptidylprolyl isomerase (EC 5.2.1.8) ATCYP4
  misc_feature (1)..(150): Homolog of NCBI NO: 15228814 NR Description: peptidylprolyl isomerase [Arabidopsis thaliana]
  misc_feature (1)..(150): Homolog of NCBI NO: 1305457 NR Description: cytosolic cyclophilin [Arabidopsis thaliana]
  misc_feature (1)..(152): Homolog of NCBI NO: 1084454 NR Description: peptidylprolyl isomerase (EC 5.2.1.8) Cyp1 - rice
MELFADATPKTAENFRALCTGEKGIGRSGKPLHYKGSVFHRIIPEFMCQGGDFTRGNGTGGESIYGSKFEDENFNLRHTGPGILSMANAGAHTNGSQFFICTTKTPWLDGKHVVFGKVVDGYSVVQEMEKVGSGSGRTSEPVVIEDCGQIVEK

SEQ ID NO: 52473 - DNA, 1145 bp, Glycine max
  misc_feature (1)..(1145): Ceres Seq. ID no. 14316099
acaaggatggggcagatgtcaaagagctcaaagaacagatagcctgcctcaaggcagcattggcaagaaaggaaggtgaatcagaacattctttatcaggcagctctgaaaaatataggacaatggctagtgagctatcaccttatcatgcaaaccaacagggtgctgatattgtgagcccagggtgccggcaaccaatgcttgatgtaggcaatatagagcttcacagtagtaccacattgagacaaaaaactcagagctatgattttgatgagatgtcaacgaattcaccgccctggcccccggtgaataatcctagacaactctatggggatgatgacagagaaactggctcaggagagtgggtagataaagtcatggtaaacaagcaagatgctaataaaactgagaacatcttagggtgttgggaagcagacagtgggaacttatccgatgtcttttatcaaaaatatctccaaggttcttccaaaatgttctcagaacgatcctacaacatgttcatgggaggcaacaaccagtttaacgttgctggttcagatgacatggatgatcttgatgatacaaccactgattcctcggaacctgacttgctttggcaatttaatcattccaaacttaccagcatagccaatggcaacggatcaaaggctaggagacctgtctcaaagcccacaaatagcccagtattgagcaagaataatgttcattcttctcttggtccttcaccttcaaggaaacaatcaaacagtgtctcacatcgaacagcaagacatccagctccagttgacatgaaacgtaaaactgggagtagaaagtaaacttgttttgaaacgttaaaagggtgatttctatttttattttttatttctttccccctttttctttttttcaattttttagatggagggcttttgcaataatatttctttttattttttattttttattttttgggtttatgcttgtaagttttgtaacttgtatttacgcagataatggagcaataatgcccgttgcttgtaccatgggtccatgacattcttttcattttacactgtagcttttaggtgatgtaaaaatttcaaaaccactgaaacgatcaaaattgcaacaatggtttgatt

SEQ ID NO: 52474 - protein, 278 aa, Glycine max
  peptide (1)..(278): Ceres Seq. ID no. 14316100
  misc_feature (1)..(136): Homolog of NCBI NO: 18421069 NR Description: kinesin-related protein [Arabidopsis thaliana]
  misc_feature (1)..(136): Homolog of NCBI NO: 11358474 NR Description: kinesin-like heavy chain [validated] -
  misc_feature (1)..(273): Homolog of NCBI NO: 7485241 NR Description: hypothetical protein A_IG002P16.12 - Arabidopsis
  misc_feature (3)..(234): Homolog of NCBI NO: 7487566 NR Description: probable kinesin heavy chain [imported] -
  misc_feature (3)..(277): Homolog of NCBI NO: 28393382 NR Description: putative kinesin [Arabidopsis thaliana]
  misc_feature (3)..(277): Homolog of NCBI NO: 30690701 NR Description: kinesin-related protein [Arabidopsis thaliana]
KDGADVKELKEQIACLKAALARKEGESEHSLSGSSEKYRTMASELSPYHANQQGADIVSPGCRQPMLDVGNIELHSSTTLRQKTQSYDFDEMSTNSPPWPPVNNPRQLYGDDDRETGSGEWVDKVMVNKQDANKTENILGCWEADSGNLSDVFYQKYLQGSSKMFSERSYNMFMGGNNQFNVAGSDDMDDLDDTTTDSSEPDLLWQFNHSKLTSIANGNGSKARRPVSKPTNSPVLSKNNVHSSLGPSPSRKQSNSVSHRTARHPAPVDMKRKTGSRK

SEQ ID NO: 52475 - protein, 238 aa, Glycine max
  peptide (1)..(238): Ceres Seq. ID no. 14316101
  misc_feature (1)..(96): Homolog of NCBI NO: 18421069 NR Description: kinesin-related protein [Arabidopsis thaliana]
  misc_feature (1)..(96): Homolog of NCBI NO: 11358474 NR Description: kinesin-like heavy chain [validated] -
  misc_feature (1)..(233): Homolog of NCBI NO: 7485241 NR Description: hypothetical protein A_IG002P16.12 - Arabidopsis
  misc_feature (1)..(194): Homolog of NCBI NO: 7487566 NR Description: probable kinesin heavy chain [imported] -
  misc_feature (1)..(237): Homolog of NCBI NO: 28393382 NR Description: putative kinesin [Arabidopsis thaliana]
  misc_feature (1)..(237): Homolog of NCBI NO: 30690701 NR Description: kinesin-related protein [Arabidopsis thaliana]
MASELSPYHANQQGADIVSPGCRQPMLDVGNIELHSSTTLRQKTQSYDFDEMSTNSPPWPPVNNPRQLYGDDDRETGSGEWVDKVMVNKQDANKTENILGCWEADSGNLSDVFYQKYLQGSSKMFSERSYNMFMGGNNQFNVAGSDDMDDLDDTTTDSSEPDLLWQFNHSKLTSIANGNGSKARRPVSKPTNSPVLSKNNVHSSLGPSPSRKQSNSVSHRTARHPAPVDMKRKTGSRK

SEQ ID NO: 52476 - protein, 213 aa, Glycine max
  peptide (1)..(213): Ceres Seq. ID no. 14316102
  misc_feature (1)..(71): Homolog of NCBI NO: 18421069 NR Description: kinesin-related protein [Arabidopsis thaliana]
  misc_feature (1)..(71): Homolog of NCBI NO: 11358474 NR Description: kinesin-like heavy chain [validated] -
  misc_feature (1)..(208): Homolog of NCBI NO: 7485241 NR Description: hypothetical protein A_IG002P16.12 - Arabidopsis
  misc_feature (1)..(169): Homolog of NCBI NO: 7487566 NR Description: probable kinesin heavy chain [imported] -
  misc_feature (1)..(212): Homolog of NCBI NO: 28393382 NR Description: putative kinesin [Arabidopsis thaliana]
  misc_feature (1)..(212): Homolog of NCBI NO: 30690701 NR Description: kinesin-related protein [Arabidopsis thaliana]
MLDVGNIELHSSTTLRQKTQSYDFDEMSTNSPPWPPVNNPRQLYGDDDRETGSGEWVDKVMVNKQDANKTENILGCWEADSGNLSDVFYQKYLQGSSKMFSERSYNMFMGGNNQFNVAGSDDMDDLDDTTTDSSEPDLLWQFNHSKLTSIANGNGSKARRPVSKPTNSPVLSKNNVHSSLGPSPSRKQSNSVSHRTARHPAPVDMKRKTGSRK

SEQ ID NO: 52477 - DNA, 1218 bp, Glycine max
  misc_feature (1)..(1218): Ceres Seq. ID no. 14316095
aagaagtggcaaccaaaatctgccacttcaaggcttcaagctaagcacactatggcttgcatcgataacacggccaccacctctactgacgaagcaggcggagccaccaccatcaccgccgtgcatcccgacataattcaaacccacatcctcacgtgcctggacggcccgtcgctcgcctccgtcgccagcacgtgctcccaactccacgctctctcagcgcgcgagcctctctgggagaacatttgccactccacgtggccctccacgagctcgccacgcgtccgccacgtcatgtccacgttcccacgcgcgtctctgtcctttttctccgactcgttcccttcgttcgccgcggcgcgcgaaggttcttcttcgcgcgcaccggagctgatttccgctgtggacatcttccaccggcggcgggcggtgctgtcgagagtggtggagacggagacggagtccgactggttccggtgctcgccgtttcgaatcgatgttcttgatcagaaggaggcagtggcgacggcgatggagtatccacggagcgaggaagcgtgtgagattctgggcgaggatttgaggttgagttggatagtggtggatccgaatggaaagcgtgcggtgaatgtgtcgagtgggagagtggtgtcggtggagcggcactggctgagcggggaggtgaaggcgcggttcgcgacggtggtgggcggaggggagagggggacggcggtggaggtggcgctgtgcagcgtgactgtgactttcgggggtgagatgcaggtgagggaagcgtgtctgcagatggaggacatggatggaatgttcctgaatggtagggacagtttggggattttgcagcgggcattggagggtataaggggaacattactgaaggacggaaaggaggaagaagggaggaatagatacttggaattcataaagagaaagatggagagaaaagataaaaaagaaagagatgagaggaggttggatatgctctgcgtgcctctcgcgcttttgtcctttgcggctttttctacactctttctcttctgaatcaatatacactatcacttcaaattcaataaacacaacacggaaaaattgtacaaaattaatttaacaaactaagtgtcagtcgatgctgtaatgtcgcatactagtttatttatttaaaacagtaatgaatagtgaatgggttcttctagcagctgc

SEQ ID NO: 52478 - protein, 352 aa, Glycine max
  peptide (1)..(352): Ceres Seq. ID no. 14316096
  misc_feature (38)..(83): Pfam Name: F-box domain Pfam Description: F-box domain
  misc_feature (36)..(345): Homolog of NCBI NO: 32479726 NR Description: OJ991214_12.2 [Oryza sativa (japonica
  misc_feature (37)..(352): Homolog of NCBI NO: 15225867 NR Description: F-box protein family [Arabidopsis thaliana]
  misc_feature (38)..(343): Homolog of NCBI NO: 15227574 NR Description: F-box protein family [Arabidopsis thaliana]
KKWQPKSATSRLQAKHTMACIDNTATTSTDEAGGATTITAVHPDIIQTHILTCLDGPSLASVASTCSQLHALSAREPLWENICHSTWPSTSSPRVRHVMSTFPRASLSFFSDSFPSFAAAREGSSSRAPELISAVDIFHRRRAVLSRVVETETESDWFRCSPFRIDVLDQKEAVATAMEYPRSEEACEILGEDLRLSWIVVDPNGKRAVNVSSGRVVSVERHWLSGEVKARFATVVGGGERGTAVEVALCSVTVTFGGEMQVREACLQMEDMDGMFLNGRDSLGILQRALEGIRGTLLKDGKEEEGRNRYLEFIKRKMERKDKKERDERRLDMLCVPLALLSFAAFSTLFLF

SEQ ID NO: 52479 - protein, 335 aa, Glycine max
  peptide (1)..(335): Ceres Seq. ID no. 14316097
  misc_feature (21)..(66): Pfam Name: F-box domain Pfam Description: F-box domain
  misc_feature (19)..(328): Homolog of NCBI NO: 32479726 NR Description: OJ991214_12.2 [Oryza sativa (japonica
  misc_feature (20)..(335): Homolog of NCBI NO: 15225867 NR Description: F-box protein family [Arabidopsis thaliana]
  misc_feature (21)..(326): Homolog of NCBI NO: 15227574 NR Description: F-box protein family [Arabidopsis thaliana]
MACIDNTATTSTDEAGGATTITAVHPDIIQTHILTCLDGPSLASVASTCSQLHALSAREPLWENICHSTWPSTSSPRVRHVMSTFPRASLSFFSDSFPSFAAAREGSSSRAPELISAVDIFHRRRAVLSRVVETETESDWFRCSPFRIDVLDQKEAVATAMEYPRSEEACEILGEDLRLSWIVVDPNGKRAVNVSSGRVVSVERHWLSGEVKARFATVVGGGERGTAVEVALCSVTVTFGGEMQVREACLQMEDMDGMFLNGRDSLGILQRALEGIRGTLLKDGKEEEGRNRYLEFIKRKMERKDKKERDERRLDMLCVPLALLSFAAFSTLFLF

SEQ ID NO: 52480 - protein, 254 aa, Glycine max
  peptide (1)..(254): Ceres Seq. ID no. 14316098
  misc_feature (1)..(247): Homolog of NCBI NO: 32479726 NR Description: OJ991214_12.2 [Oryza sativa (japonica
  misc_feature (1)..(254): Homolog of NCBI NO: 15225867 NR Description: F-box protein family [Arabidopsis thaliana]
  misc_feature (1)..(245): Homolog of NCBI NO: 15227574 NR Description: F-box protein family [Arabidopsis thaliana]
MSTFPRASLSFFSDSFPSFAAAREGSSSRAPELISAVDIFHRRRAVLSRVVETETESDWFRCSPFRIDVLDQKEAVATAMEYPRSEEACEILGEDLRLSWIVVDPNGKRAVNVSSGRVVSVERHWLSGEVKARFATVVGGGERGTAVEVALCSVTVTFGGEMQVREACLQMEDMDGMFLNGRDSLGILQRALEGIRGTLLKDGKEEEGRNRYLEFIKRKMERKDKKERDERRLDMLCVPLALLSFAAFSTLFLF

SEQ ID NO: 52481 - DNA, 1552 bp, Glycine max
  misc_feature (1)..(1552): Ceres Seq. ID no. 15177285
aacataagaaaattattggtctctgttctctacctcaccccccaccgcactcgtcttgtctcaaacaaatgcaacaaccacttattcttatagttactatggactaggaacaagatttgattctcattctgatatcagattcagatttttttaaaagagactcacgctggcggtgaagaacgtttctgcggcggcggcggaggaggaggaacaggttaacatgactctgatttccaattccgacgtcgaaagccacgccgacgtccaaatccccgacaccgcgcatcaaattagcaccgattcatggtttcaagtggggttcgtgctgacgacgggcatcaacagcgcctatgtgcttggatattcagggaccatcatggttcccctgggttgggcagggggtgtggttggtttgattctcgccaccgcaatatcactctacgcgaatgctcttattgctaggctccatgaatatggaggaacaaggcatattcgatatagagatcttgctggatttatttatggtagaaaggcttattccctcacatgggctctacagtatgtcaaccttttcatgataaatgccggctacatcattttggctggttcggctttaaaggccacctatgttctattcagggaagacgatgggatgaagcttccgtattttataggcattgctggatttgtgtgtgcaatgtttgccatttgcattccccatctttcagctctcggaatttggctgggattttcgacagtcttcagcctagtatacattgttatagcatttgtactgtcaattaaagatggtataaaatcaccacctcgtgattatagcattccggggacatcaaccagtaaaatatccacaacaattggggcgtctgctaatcttgtgttcgcatataatacaggaatgcttcctgagatacaggcgacaatcaggcagccagtagtcaagaacatgatgaaagccctgtattttcagtttactgttggagttctgccattatatctggtaacctttgcaggatactgggcttatggatcttcaacagctacctatttgatgagtgatgtcaatggtccagtttgggctaaggctatggccaatattgcagcctttcttcaatcagtcattgcattgcatatatttgcaagtccaatgtatgagtatttggataccaaatatgggatcaaagggagtgccctggcttttaagaacttgtcatttcgagtcttggtaagaggtggctacctgactttgaacacatttgtatcagctctattgccctttcttggagatttcatgagcctcactggagctatcagcacatttccccttacctttattcttgcaaaccatatgtaccttgtggcaaatgcgaacaaactaacatccatccaaaagctctggcattggatcaatatttgtttctttgccttcatgtctgttgcggcaactattgcagccctgcggcttattgatttagactccaaaacgtaccatgtttttgcggatatatgattaaatgcattatattctatcagc

SEQ ID NO: 52482 - protein, 435 aa, Glycine max
  peptide (1)..(435): Ceres Seq. ID no. 15177286
  misc_feature (3)..(435): Homolog of NCBI NO: 11358950 NR Description: proline transport protein 3 [imported] - tomato
  misc_feature (6)..(435): Homolog of NCBI NO: 34394157 NR Description: putative proline transport protein
  misc_feature (5)..(435): Homolog of NCBI NO: 8571474 NR Description: proline/glycine betaine transporter [Atriplex
  misc_feature (10)..(435): Homolog of NCBI NO: 21069018 NR Description: betaine/proline transporter [Avicennia marina]
  misc_feature (10)..(435): Homolog of NCBI NO: 21069020 NR Description: betaine/proline transporter [Avicennia marina]
  misc_feature (7)..(435): Homolog of NCBI NO: 15228000 NR Description: proline transporter, putative [Arabidopsis
  misc_feature (7)..(435): Homolog of NCBI NO: 21554196 NR Description: putative proline transporter [Arabidopsis
  misc_feature (14)..(435): Homolog of NCBI NO: 15228183 NR Description: proline transporter 2 (ProT2) [Arabidopsis
  misc_feature (4)..(435): Homolog of NCBI NO: 21593453 NR Description: proline transporter 1 [Arabidopsis thaliana]
  misc_feature (4)..(435): Homolog of NCBI NO: 15225591 NR Description: proline transporter 1 (ProT1) [Arabidopsis
MTLISNSDVESHADVQIPDTAHQISTDSWFQVGFVLTTGINSAYVLGYSGTIMVPLGWAGGVVGLILATAISLYANALIARLHEYGGTRHIRYRDLAGFIYGRKAYSLTWALQYVNLFMINAGYIILAGSALKATYVLFREDDGMKLPYFIGIAGFVCAMFAICIPHLSALGIWLGFSTVFSLVYIVIAFVLSIKDGIKSPPRDYSIPGTSTSKISTTIGASANLVFAYNTGMLPEIQATIRQPVVKNMMKALYFQFTVGVLPLYLVTFAGYWAYGSSTATYLMSDVNGPVWAKAMANIAAFLQSVIALHIFASPMYEYLDTKYGIKGSALAFKNLSFRVLVRGGYLTLNTFVSALLPFLGDFMSLTGAISTFPLTFILANHMYLVANANKLTSIQKLWHWINICFFAFMSVAATIAALRLIDLDSKTYHVFADI

SEQ ID NO: 52483 - protein, 383 aa, Glycine max
  peptide (1)..(383): Ceres Seq. ID no. 15177287
  misc_feature (1)..(383): Homolog of NCBI NO: 11358950 NR Description: proline transport protein 3 [imported] - tomato
  misc_feature (1)..(383): Homolog of NCBI NO: 34394157 NR Description: putative proline transport protein
  misc_feature (1)..(383): Homolog of NCBI NO: 8571474 NR Description: proline/glycine betaine transporter [Atriplex
  misc_feature (1)..(383): Homolog of NCBI NO: 21069018 NR Description: betaine/proline transporter [Avicennia marina]
  misc_feature (1)..(383): Homolog of NCBI NO: 21069020 NR Description: betaine/proline transporter [Avicennia marina]
  misc_feature (1)..(383): Homolog of NCBI NO: 15228000 NR Description: proline transporter, putative [Arabidopsis
  misc_feature (1)..(383): Homolog of NCBI NO: 21554196 NR Description: putative proline transporter [Arabidopsis
  misc_feature (1)..(383): Homolog of NCBI NO: 15228183 NR Description: proline transporter 2 (ProT2) [Arabidopsis
  misc_feature (1)..(383): Homolog of NCBI NO: 21593453 NR Description: proline transporter 1 [Arabidopsis thaliana]
  misc_feature (1)..(383): Homolog of NCBI NO: 15225591 NR Description: proline transporter 1 (ProT1) [Arabidopsis
MVPLGWAGGVVGLILATAISLYANALIARLHEYGGTRHIRYRDLAGFIYGRKAYSLTWALQYVNLFMINAGYIILAGSALKATYVLFREDDGMKLPYFIGIAGFVCAMFAICIPHLSALGIWLGFSTVFSLVYIVIAFVLSIKDGIKSPPRDYSIPGTSTSKISTTIGASANLVFAYNTGMLPEIQATIRQPVVKNMMKALYFQFTVGVLPLYLVTFAGYWAYGSSTATYLMSDVNGPVWAKAMANIAAFLQSVIALHIFASPMYEYLDTKYGIKGSALAFKNLSFRVLVRGGYLTLNTFVSALLPFLGDFMSLTGAISTFPLTFILANHMYLVANANKLTSIQKLWHWINICFFAFMSVAATIAALRLIDLDSKTYHVFADI

SEQ ID NO: 52484 - protein, 317 aa, Glycine max
  peptide (1)..(317): Ceres Seq. ID no. 15177288
  misc_feature (1)..(317): Homolog of NCBI NO: 11358950 NR Description: proline transport protein 3 [imported] - tomato
  misc_feature (1)..(317): Homolog of NCBI NO: 34394157 NR Description: putative proline transport protein
  misc_feature (1)..(317): Homolog of NCBI NO: 8571474 NR Description: proline/glycine betaine transporter [Atriplex
  misc_feature (1)..(317): Homolog of NCBI NO: 21069018 NR Description: betaine/proline transporter [Avicennia marina]
  misc_feature (1)..(317): Homolog of NCBI NO: 21069020 NR Description: betaine/proline transporter [Avicennia marina]
  misc_feature (1)..(317): Homolog of NCBI NO: 15228000 NR Description: proline transporter, putative [Arabidopsis
  misc_feature (1)..(317): Homolog of NCBI NO: 21554196 NR Description: putative proline transporter [Arabidopsis
  misc_feature (1)..(317): Homolog of NCBI NO: 15228183 NR Description: proline transporter 2 (ProT2) [Arabidopsis
  misc_feature (1)..(317): Homolog of NCBI NO: 21593453 NR Description: proline transporter 1 [Arabidopsis thaliana]
  misc_feature (1)..(317): Homolog of NCBI NO: 15225591 NR Description: proline transporter 1 (ProT1) [Arabidopsis
MINAGYIILAGSALKATYVLFREDDGMKLPYFIGIAGFVCAMFAICIPHLSALGIWLGFSTVFSLVYIVIAFVLSIKDGIKSPPRDYSIPGTSTSKISTTIGASANLVFAYNTGMLPEIQATIRQPVVKNMMKALYFQFTVGVLPLYLVTFAGYWAYGSSTATYLMSDVNGPVWAKAMANIAAFLQSVIALHIFASPMYEYLDTKYGIKGSALAFKNLSFRVLVRGGYLTLNTFVSALLPFLGDFMSLTGAISTFPLTFILANHMYLVANANKLTSIQKLWHWINICFFAFMSVAATIAALRLIDLDSKTYHVFADI

SEQ ID NO: 52485 - DNA, 740 bp, Glycine max
  misc_feature (1)..(740): Ceres Seq. ID no. 14305727
cttcacatcacaacttgctaaagttaatttcttcagaggccactggcattcggatctcagttaacttacattaaattttggccacctagttttctcttttagatgggcagtgacttcaaggggtggtgacttgatcacatgcatttatggcttcacttaattcatatcattactacacaaacacctccttgctcatcatacttcttctccataatttgttctctctatctctagcttctgcctccaatcaccctcagcctgcaatttctacaagggaactgttatttgaggagaaaaacaggctaggttcaattcctcctagctgtcataacaagtgcaatgattgccatccatgcatggcagttcaagtgccaactttgccaagccatgactctaaccctccagatcttaccaaaactgcagccatggcaacttttcttaacccttcttctccgcaaggcaacaggtactccaattacaagccattgggatggaaatgccattgtggtgaccacttcttcaacccgtaattataaatttgtaaaatggccctcttattttttttgttggttaaattttaatatttgtggcttagggatcagctagggtaacagatttgcgtcagcatggatcctatacattggagcttgatacacttgtacatagtttgttagacctcatgatttccaactttattatattgttacatctaaattttgagaaagttattacctttttcc

SEQ ID NO: 52486 - protein, 127 aa, Glycine max
  peptide (1)..(127): Ceres Seq. ID no. 14305728
  misc_feature (19)..(127): Homolog of NCBI NO: 29788841 NR Description: hypothetical protein [Oryza sativa (japonica
  misc_feature (27)..(127): Homolog of NCBI NO: 34899556 NR Description: OJ1606_D04.4 [Oryza sativa (japonica
  misc_feature (27)..(127): Homolog of NCBI NO: 34393745 NR Description: unknown protein [Oryza sativa (japonica
  misc_feature (13)..(127): Homolog of NCBI NO: 22329225 NR Description: expressed protein [Arabidopsis thaliana]
  misc_feature (10)..(127): Homolog of NCBI NO: 15238119 NR Description: expressed protein [Arabidopsis thaliana]
MASLNSYHYYTNTSLLIILLLHNLFSLSLASASNHPQPAISTRELLFEEKNRLGSIPPSCHNKCNDCHPCMAVQVPTLPSHDSNPPDLTKTAAMATFLNPSSPQGNRYSNYKPLGWKCHCGDHFFNP

SEQ ID NO: 52487 - protein, 88 aa, Glycine max
  peptide (1)..(88): Ceres Seq. ID no. 14305729
MIAIHAWQFKCQLCQAMTLTLQILPKLQPWQLFLTLLLRKATGTPITSHWDGNAIVVTTSSTRNYKFVKWPSYFFCWLNFNICGLGIS

SEQ ID NO: 52488 - protein, 72 aa, Glycine max
  peptide (1)..(72): Ceres Seq. ID no. 14305730
MTLTLQILPKLQPWQLFLTLLLRKATGTPITSHWDGNAIVVTTSSTRNYKFVKWPSYFFCWLNFNICGLGIS

SEQ ID NO: 52489 - DNA, 1900 bp, Glycine max
  misc_feature (1)..(1900): Ceres Seq. ID no. 15178317
acacatctcaatcacatttcaaggttcaaaattaattctccaaaactctaaactgaacaggcacgttgtaggcaattggcagtgatttaggacgaaaatgatttatataaatatggcgcatcttctgagtttggatttgcagaatcacaattatatatttaatatgttttataaatattttatatgtatctatatatacagttcatggctttgtatcttgtatattctaggaataaccatattgctgtatcagatacatattgaatccaatatgcgtattgtatctgtgcattatagttgttaatgcttatagaaactgtatgaagtgcatgcacaagatttacatgagtgcacatgtttatgatcttaagtatgtgtatatcattttattttaagaaattatttcatttctgttaatacaacatttctagtattgtgaatgtgctacagggtgtgttctgacacttgtttcgatttaggtttaaacttgttacacctctgtcacgattgatgtggtccagacttgatgctttgatcccatcattaatgaccacagtgaagttcaaatgatgcttgtttcctggccatttctatagttttgtgacgtgattgagaatgtggaactttgcatctagtttaattgctggaagtgtgggtctgaaaaatgattctccaaaaccaactcactctgcttcagaattttctgatgacgagacttccatggttagcagagaggaaaggctagaatgcccaatatgctgggaatcctttaacattgttgaaaatgtgccttatgtcttatggtgtggtcacaccctttgtaaaaattgcatccttggattacaatgggctgtggtgaatttcccaacactgccaattcggcttccactttttatctcctgcccgtggtgcaaccttttgtctctccgtttagtttaccagggaaatctgaaattccctcacaagaactactttcttctatggatggttgagagcatgaacggtgatagagtgaagtcacattctactgtttgcggggatcatcaaccagtgtggccaattatagacagtttaaccaacggaagccaagtaagccatgacagccttcaaggagggcaagtttgccatccagagtcttcaagttccaatcattatcatggtgataccagtaattacctaagtatagaaacactgcatacatctctgcggaagtcattggttttatttgttcacttgacagcaaagttcccattgatcattatatttcttttgattgtcttatatgccataccagtcattgcagccattttggctctgtatatacttgttaccattctgtttgctctcccatcatttctcatcttgtactttgcatatcctagtttggattggcttgtcagggaaattatcacttgagatcaaagctgtatttcttctgctttgcaagcattatgaatgtaactttgcctcaccttgtggccccttcatccagtgtcttctacttcgtaattggtcaacatctccatttgcagctgtatcttttatcttatcatatatagccccagtcaatctcagtacacttcttgaatcttgagctctggttgagcttggctgggtgggaggagggatatcagtttttggcataatctattttgaagaccatcaaggccgtggagtgaacaaggtaatgaataatgattttgccctttcctggtggcaaatggttgttttatcaatatatgaacttcagaagaacaccctgatgtagttatcaagtgggtcaatatcagaaaagcttttttttttcatgggcacatttggatgctcctgttaatactgcctacagtatttttgctaattgtaatttgtaattataattagtagagctattttcctggcc

SEQ ID NO: 52490 - protein, 266 aa, Glycine max
  peptide (1)..(266): Ceres Seq. ID no. 15178318
  misc_feature (45)..(99): Pfam Name: Zinc finger, C3HC4 type (RING finger) Pfam Description: Zinc finger, C3HC4 type (RING finger)
  misc_feature (1)..(266): Homolog of NCBI NO: 21592563 NR Description: putative RING zinc finger protein [Arabidopsis
  misc_feature (1)..(266): Homolog of NCBI NO: 15221223 NR Description: zinc finger (C3HC4-type RING finger) protein
  misc_feature (1)..(264): Homolog of NCBI NO: 18409246 NR Description: zinc finger (C3HC4-type RING finger) protein
  misc_feature (1)..(264): Homolog of NCBI NO: 21594048 NR Description: unknown [Arabidopsis thaliana]
  misc_feature (1)..(266): Homolog of NCBI NO: 11994767 NR Description: RING zinc finger protein-like [Arabidopsis
  misc_feature (1)..(266): Homolog of NCBI NO: 15228658 NR Description: expressed protein [Arabidopsis thaliana]
MWNFASSLIAGSVGLKNDSPKPTHSASEFSDDETSMVSREERLECPICWESFNIVENVPYVLWCGHTLCKNCILGLQWAVVNFPTLPIRLPLFISCPWCNLLSLRLVYQGNLKFPHKNYFLLWMVESMNGDRVKSHSTVCGDHQPVWPIIDSLTNGSQVSHDSLQGGQVCHPESSSSNHYHGDTSNYLSIETLHTSLRKSLVLFVHLTAKFPLIIIFLLIVLYAIPVIAAILALYILVTILFALPSFLILYFAYPSLDWLVREIIT

SEQ ID NO: 52491 - protein, 231 aa, Glycine max
  peptide (1)..(231): Ceres Seq. ID no. 15178319
  misc_feature (10)..(64): Pfam Name: Zinc finger, C3HC4 type (RING finger) Pfam Description: Zinc finger, C3HC4 type (RING finger)
  misc_feature (1)..(231): Homolog of NCBI NO: 21592563 NR Description: putative RING zinc finger protein [Arabidopsis
  misc_feature (1)..(231): Homolog of NCBI NO: 15221223 NR Description: zinc finger (C3HC4-type RING finger) protein
  misc_feature (1)..(229): Homolog of NCBI NO: 18409246 NR Description: zinc finger (C3HC4-type RING finger) protein
  misc_feature (1)..(229): Homolog of NCBI NO: 21594048 NR Description: unknown [Arabidopsis thaliana]
  misc_feature (1)..(231): Homolog of NCBI NO: 11994767 NR Description: RING zinc finger protein-like [Arabidopsis
  misc_feature (1)..(231): Homolog of NCBI NO: 15228658 NR Description: expressed protein [Arabidopsis thaliana]
MVSREERLECPICWESFNIVENVPYVLWCGHTLCKNCILGLQWAVVNFPTLPIRLPLFISCPWCNLLSLRLVYQGNLKFPHKNYFLLWMVESMNGDRVKSHSTVCGDHQPVWPIIDSLTNGSQVSHDSLQGGQVCHPESSSSNHYHGDTSNYLSIETLHTSLRKSLVLFVHLTAKFPLIIIFLLIVLYAIPVIAAILALYILVTILFALPSFLILYFAYPSLDWLVREIIT

SEQ ID NO: 52492 - protein, 143 aa, Glycine max
  peptide (1)..(143): Ceres Seq. ID no. 15178320
  misc_feature (1)..(143): Homolog of NCBI NO: 21592563 NR Description: putative RING zinc finger protein [Arabidopsis
  misc_feature (1)..(143): Homolog of NCBI NO: 15221223 NR Description: zinc finger (C3HC4-type RING finger) protein
  misc_feature (1)..(141): Homolog of NCBI NO: 18409246 NR Description: zinc finger (C3HC4-type RING finger) protein
  misc_feature (1)..(141): Homolog of NCBI NO: 21594048 NR Description: unknown [Arabidopsis thaliana]
  misc_feature (1)..(143): Homolog of NCBI NO: 11994767 NR Description: RING zinc finger protein-like [Arabidopsis
  misc_feature (1)..(143): Homolog of NCBI NO: 15228658 NR Description: expressed protein [Arabidopsis thaliana]
MVESMNGDRVKSHSTVCGDHQPVWPIIDSLTNGSQVSHDSLQGGQVCHPESSSSNHYHGDTSNYLSIETLHTSLRKSLVLFVHLTAKFPLIIIFLLIVLYAIPVIAAILALYILVTILFALPSFLILYFAYPSLDWLVREIIT

SEQ ID NO: 52493 - DNA, 1237 bp, Glycine max
  misc_feature (1)..(1237): Ceres Seq. ID no. 14315219
ctcttagtatttattctcttttatttgtttcttcacagcccctcaatgaagaacaagaagggtgaagctctgagtgagacttctctcccaccttcaaccatgtcttcttcctcctcttctcttgtcaccactcttgttgataataataaccctactcaaccttctcagttaagagcggcacgccgtcgtttcacctctgatcatcaccttcctgagataagcctcaaaacccctatggttaggccttatgttcgatcaaaaatgcctaggcttcgttggacaccagatctccatcgttgcttcgtgcatgcagttcaaagacttggaggagaagacagggccacaccaaagttggttttacagctcatgaatgtaaaggggcttactatatctcacgtcaaaagccaccttcagatgtacaggagcatgagacacgagcagatgagtcaaggtgcaaagaagaataatatggctccggatttcccagcttccacactcgcaactcttggcccaaggcaacagaaacctcacaaaagaagctgcacggaagagcttgttcccacccaagctcaatggaatcatgatgagcaagagtgttacaatggaaaccaagggggtgaatcgattataatttgtaacggcaatgaacagaaggtgcactcctacatcatcttcgagggtcttctgagaggccaatctgtccaagagaataaaactactactactgaaaaggtgtcactaggtgatgccggttacgaaagcgaccatcaaagattccaagacacaactctgtccctttcaatgagctcaaggccttcttcacattcgttcttgaatcggagccacagtactggtccagatgcgaatgatgtctctcttgagctcacgctctcttagaatcatgcacataataataacagcaagccttttctttgtcatcatttatgcatgtttcttccatcctacaactacactacaaactaatggtgcatgacctttcaagaaagaacaatccatactatcaagtgtttttccgacatcgattaagaaattaaaatttttaaaaaattattaaatttttgtcgatgcatttttatttattaatttcttaataaatgtctctaaaagcacttgttagcaggagaccgaggaaattgtaataccaacgctactttagttcgcatcatttagtgcccatgatcagaagtactagaaatcaagtgaactaattaagaac

SEQ ID NO: 52494 - protein, 298 aa, Glycine max
  peptide (1)..(298): Ceres Seq. ID no. 14315220
  misc_feature (90)..(141): Pfam Name: Myb-like DNA-binding domain Pfam Description: Myb-like DNA-binding domain
  misc_feature (80)..(144): Homolog of NCBI NO: 7527727 NR Description: T5E21.10 [Arabidopsis thaliana]
  misc_feature (66)..(156): Homolog of NCBI NO: 15224481 NR Description: hypothetical protein [Arabidopsis thaliana]
  misc_feature (80)..(209): Homolog of NCBI NO: 21741799 NR Description: OSJNBa0005N02.4 [Oryza sativa (japonica
  misc_feature (80)..(275): Homolog of NCBI NO: 22329556 NR Description: myb family transcription factor [Arabidopsis
  misc_feature (77)..(150): Homolog of NCBI NO: 15227975 NR Description: myb family transcription factor [Arabidopsis
  misc_feature (80)..(141): Homolog of NCBI NO: 30793861 NR Description: unknown protein [Arabidopsis thaliana]
  misc_feature (80)..(151): Homolog of NCBI NO: 23306130 NR Description: Unknown protein [Oryza sativa (japonica
  misc_feature (65)..(151): Homolog of NCBI NO: 15225671 NR Description: myb family transcription factor [Arabidopsis
  misc_feature (66)..(237): Homolog of NCBI NO: 26450454 NR Description: unknown protein [Arabidopsis thaliana]
  misc_feature (65)..(151): Homolog of NCBI NO: 4588000 NR Description: hypothetical cytoskeletal protein [Arabidopsis
LLVFILFYLFLHSPSMKNKKGEALSETSLPPSTMSSSSSSLVTTLVDNNNPTQPSQLRAARRRFTSDHHLPEISLKTPMVRPYVRSKMPRLRWTPDLHRCFVHAVQRLGGEDRATPKLVLQLMNVKGLTISHVKSHLQMYRSMRHEQMSQGAKKNNMAPDFPASTLATLGPRQQKPHKRSCTEELVPTQAQWNHDEQECYNGNQGGESIIICNGNEQKVHSYIIFEGLLRGQSVQENKTTTTEKVSLGDAGYESDHQRFQDTTLSLSMSSRPSSHSFLNRSHSTGPDANDVSLELTLS

SEQ ID NO: 52495 - protein, 283 aa, Glycine max
  peptide (1)..(283): Ceres Seq. ID no. 14315221
  misc_feature (75)..(126): Pfam Name: Myb-like DNA-binding domain Pfam Description: Myb-like DNA-binding domain
  misc_feature (65)..(129): Homolog of NCBI NO: 7527727 NR Description: T5E21.10 [Arabidopsis thaliana]
  misc_feature (51)..(141): Homolog of NCBI NO: 15224481 NR Description: hypothetical protein [Arabidopsis thaliana]
  misc_feature (65)..(194): Homolog of NCBI NO: 21741799 NR Description: OSJNBa0005N02.4 [Oryza sativa (japonica
  misc_feature (65)..(260): Homolog of NCBI NO: 22329556 NR Description: myb family transcription factor [Arabidopsis
  misc_feature (62)..(135): Homolog of NCBI NO: 15227975 NR Description: myb family transcription factor [Arabidopsis
  misc_feature (65)..(126): Homolog of NCBI NO: 30793861 NR Description: unknown protein [Arabidopsis thaliana]
  misc_feature (65)..(136): Homolog of NCBI NO: 23306130 NR Description: Unknown protein [Oryza sativa (japonica
  misc_feature (50)..(136): Homolog of NCBI NO: 15225671 NR Description: myb family transcription factor [Arabidopsis
  misc_feature (51)..(222): Homolog of NCBI NO: 26450454 NR Description: unknown protein [Arabidopsis thaliana]
  misc_feature (50)..(136): Homolog of NCBI NO: 4588000 NR Description: hypothetical cytoskeletal protein [Arabidopsis
MKNKKGEALSETSLPPSTMSSSSSSLVTTLVDNNNPTQPSQLRAARRRFTSDHHLPEISLKTPMVRPYVRSKMPRLRWTPDLHRCFVHAVQRLGGEDRATPKLVLQLMNVKGLTISHVKSHLQMYRSMRHEQMSQGAKKNNMAPDFPASTLATLGPRQQKPHKRSCTEELVPTQAQWNHDEQECYNGNQGGESIIICNGNEQKVHSYIIFEGLLRGQSVQENKTTTTEKVSLGDAGYESDHQRFQDTTLSLSMSSRPSSHSFLNRSHSTGPDANDVSLELTLS

SEQ ID NO: 52496 - protein, 265 aa, Glycine max
  peptide (1)..(265): Ceres Seq. ID no. 14315222
  misc_feature (57)..(108): Pfam Name: Myb-like DNA-binding domain Pfam Description: Myb-like DNA-binding domain
  misc_feature (47)..(111): Homolog of NCBI NO: 7527727 NR Description: T5E21.10 [Arabidopsis thaliana]
  misc_feature (33)..(123): Homolog of NCBI NO: 15224481 NR Description: hypothetical protein [Arabidopsis thaliana]
  misc_feature (47)..(176): Homolog of NCBI NO: 21741799 NR Description: OSJNBa0005N02.4 [Oryza sativa (japonica
  misc_feature (47)..(242): Homolog of NCBI NO: 22329556 NR Description: myb family transcription factor [Arabidopsis
  misc_feature (44)..(117): Homolog of NCBI NO: 15227975 NR Description: myb family transcription factor [Arabidopsis
  misc_feature (47)..(108): Homolog of NCBI NO: 30793861 NR Description: unknown protein [Arabidopsis thaliana]
  misc_feature (47)..(118): Homolog of NCBI NO: 23306130 NR Description: Unknown protein [Oryza sativa (japonica
  misc_feature (32)..(118): Homolog of NCBI NO: 15225671 NR Description: myb family transcription factor [Arabidopsis
  misc_feature (33)..(204): Homolog of NCBI NO: 26450454 NR Description: unknown protein [Arabidopsis thaliana]
  misc_feature (32)..(118): Homolog of NCBI NO: 4588000 NR Description: hypothetical cytoskeletal protein [Arabidopsis
MSSSSSSLVTTLVDNNNPTQPSQLRAARRRFTSDHHLPEISLKTPMVRPYVRSKMPRLRWTPDLHRCFVHAVQRLGGEDRATPKLVLQLMNVKGLTISHVKSHLQMYRSMRHEQMSQGAKKNNMAPDFPASTLATLGPRQQKPHKRSCTEELVPTQAQWNHDEQECYNGNQGGESIIICNGNEQKVHSYIIFEGLLRGQSVQENKTTTTEKVSLGDAGYESDHQRFQDTTLSLSMSSRPSSHSFLNRSHSTGPDANDVSLELTLS

SEQ ID NO: 52497 - DNA, 1274 bp, Glycine max
  misc_feature (1)..(1274): Ceres Seq. ID no. 15178096
atttctttttctggccatcatcgtatcttttccaaaacaccaaaaatgcctgcgacaacagagaacaacaaccaaggctcattcctgggtcgaataagcatccgcagaaaccaagtgatgtccatggacggaagccacgaccaagagatggaagacctggagcttttccagaagcacatcggagaccgcttctcggagctcttatcctccacctccgaagactcctcctcctcctcctcctcctcctccggcgacgcgcttctctccattgcgtggctccgcaggctcctcgacgagttcctctgctgcgaggccgagttcaaagccgtcgtcttaatgggccgcgacccttcccagatcacgaagccaccgctcgacaagctcctcccggatctcctcgaccgcggcgtcaagtccctcgacgtctgcaatgccgtcaccctcggcctcgacgccgtcaagaacctccagcgcctcgccgagatcgccgtcgcggccctcgaacaaacccccctcggtgacggccaggtccgccgcgccaagaaggcgctctccgccctcgtagccgccatgctgaacgacgacagcaacgccgccgccaagggaaccgaacgcacccgctccttcgggcgccgcgccggaaacaccaacgccactaaatacaagtcgctgtcgtggagcatggccaagaactggtccgcggcgaagcaaatccacgcgatgatgtcgaatctgacggcgccacgtggcgcggagtcctcgggattggcgcaacccatgtacatgatgagcaccgtgttggtgttcgtgatgtggactctggttgcggcggttccttgccaggaaaggaatgggctagggacccattttcctctgccgaggcaattgggctgggcccagcccatgatcggcctgcaggagaagattgcggaggagtggaagaagaaagagaagaaagggaacgttgggttgttagaggagatgcagaggatggacaagctgggtcagtccctgattgaattcgcagactcgtttcagttcccaaccgaaacggagcgtatggatgaggtgaagaagcacgtcgaggaattgggggacatttgtaaaaaaatggaggaaggcttggaacctttacagcagcagattagagaggtctttcacagggtcgtaaggagcaggactgagtttctccttgccttggaccaagctgccaagtccactacacccgctctgtaaataaccacaatctacatcatcatccttttaggtttcac

SEQ ID NO: 52498 - protein, 411 aa, Glycine max
  peptide (1)..(411): Ceres Seq. ID no. 15178097
  misc_feature (23)..(236): Pfam Name: Protein of unknown function (DUF793) Pfam Description: Protein of unknown function (DUF793)
  misc_feature (16)..(405): Homolog of NCBI NO: 15218428 NR Description: hypothetical protein [Arabidopsis thaliana]
  misc_feature (16)..(397): Homolog of NCBI NO: 21536674 NR Description: unknown [Arabidopsis thaliana]
  misc_feature (16)..(397): Homolog of NCBI NO: 18410617 NR Description: expressed protein [Arabidopsis thaliana]
  misc_feature (16)..(400): Homolog of NCBI NO: 21593634 NR Description: unknown [Arabidopsis thaliana]
  misc_feature (16)..(400): Homolog of NCBI NO: 18394649 NR Description: expressed protein [Arabidopsis thaliana]
  misc_feature (17)..(401): Homolog of NCBI NO: 21553882 NR Description: unknown [Arabidopsis thaliana]
  misc_feature (17)..(401): Homolog of NCBI NO: 15237130 NR Description: expressed protein [Arabidopsis thaliana]
  misc_feature (25)..(403): Homolog of NCBI NO: 15236522 NR Description: expressed protein [Arabidopsis thaliana]
  misc_feature (201)..(411): Homolog of NCBI NO: 15222577 NR Description: hypothetical protein [Arabidopsis thaliana]
  misc_feature (23)..(236): Homolog of NCBI NO: 15222577 NR Description: hypothetical protein [Arabidopsis thaliana]
ISFSGHHRIFSKTPKMPATTENNNQGSFLGRISIRRNQVMSMDGSHDQEMEDLELFQKHIGDRFSELLSSTSEDSSSSSSSSSGDALLSIAWLRRLLDEFLCCEAEFKAVVLMGRDPSQITKPPLDKLLPDLLDRGVKSLDVCNAVTLGLDAVKNLQRLAEIAVAALEQTPLGDGQVRRAKKALSALVAAMLNDDSNAAAKGTERTRSFGRRAGNTNATKYKSLSWSMAKNWSAAKQIHAMMSNLTAPRGAESSGLAQPMYMMSTVLVFVMWTLVAAVPCQERNGLGTHFPLPRQLGWAQPMIGLQEKIAEEWKKKEKKGNVGLLEEMQRMDKLGQSLIEFADSFQFPTETERMDEVKKHVEELGDICKKMEEGLEPLQQQIREVFHRVVRSRTEFLLALDQAAKSTTPAL

SEQ ID NO: 52499 - protein, 396 aa, Glycine max
  peptide (1)..(396): Ceres Seq. ID no. 15178098
  misc_feature (8)..(221): Pfam Name: Protein of unknown function (DUF793) Pfam Description: Protein of unknown function (DUF793)
  misc_feature (1)..(390): Homolog of NCBI NO: 15218428 NR Description: hypothetical protein [Arabidopsis thaliana]
  misc_feature (1)..(382): Homolog of NCBI NO: 21536674 NR Description: unknown [Arabidopsis thaliana]
  misc_feature (1)..(382): Homolog of NCBI NO: 18410617 NR Description: expressed protein [Arabidopsis thaliana]
  misc_feature (1)..(385): Homolog of NCBI NO: 21593634 NR Description: unknown [Arabidopsis thaliana]
  misc_feature (1)..(385): Homolog of NCBI NO: 18394649 NR Description: expressed protein [Arabidopsis thaliana]
  misc_feature (2)..(386): Homolog of NCBI NO: 21553882 NR Description: unknown [Arabidopsis thaliana]
  misc_feature (2)..(386): Homolog of NCBI NO: 15237130 NR Description: expressed protein [Arabidopsis thaliana]
  misc_feature (10)..(388): Homolog of NCBI NO: 15236522 NR Description: expressed protein [Arabidopsis thaliana]
  misc_feature (186)..(396): Homolog of NCBI NO: 15222577 NR Description: hypothetical protein [Arabidopsis thaliana]
  misc_feature (8)..(221): Homolog of NCBI NO: 15222577 NR Description: hypothetical protein [Arabidopsis thaliana]
MPATTENNNQGSFLGRISIRRNQVMSMDGSHDQEMEDLELFQKHIGDRFSELLSSTSEDSSSSSSSSSGDALLSIAWLRRLLDEFLCCEAEFKAVVLMGRDPSQITKPPLDKLLPDLLDRGVKSLDVCNAVTLGLDAVKNLQRLAEIAVAALEQTPLGDGQVRRAKKALSALVAAMLNDDSNAAAKGTERTRSFGRRAGNTNATKYKSLSWSMAKNWSAAKQIHAMMSNLTAPRGAESSGLAQPMYMMSTVLVFVMWTLVAAVPCQERNGLGTHFPLPRQLGWAQPMIGLQEKIAEEWKKKEKKGNVGLLEEMQRMDKLGQSLIEFADSFQFPTETERMDEVKKHVEELGDICKKMEEGLEPLQQQIREVFHRVVRSRTEFLLALDQAAKSTTPAL

SEQ ID NO: 52500 - protein, 372 aa, Glycine max
  peptide (1)..(372): Ceres Seq. ID no. 15178099
  misc_feature (1)..(197): Pfam Name: Protein of unknown function (DUF793) Pfam Description: Protein of unknown function (DUF793)
  misc_feature (1)..(366): Homolog of NCBI NO: 15218428 NR Description: hypothetical protein [Arabidopsis thaliana]
  misc_feature (1)..(358): Homolog of NCBI NO: 21536674 NR Description: unknown [Arabidopsis thaliana]
  misc_feature (1)..(358): Homolog of NCBI NO: 18410617 NR Description: expressed protein [Arabidopsis thaliana]
  misc_feature (1)..(361): Homolog of NCBI NO: 21593634 NR Description: unknown [Arabidopsis thaliana]
  misc_feature (1)..(361): Homolog of NCBI NO: 18394649 NR Description: expressed protein [Arabidopsis thaliana]
  misc_feature (1)..(362): Homolog of NCBI NO: 21553882 NR Description: unknown [Arabidopsis thaliana]
  misc_feature (1)..(362): Homolog of NCBI NO: 15237130 NR Description: expressed protein [Arabidopsis thaliana]
  misc_feature (1)..(364): Homolog of NCBI NO: 15236522 NR Description: expressed protein [Arabidopsis thaliana]
  misc_feature (162)..(372): Homolog of NCBI NO: 15222577 NR Description: hypothetical protein [Arabidopsis thaliana]
  misc_feature (1)..(197): Homolog of NCBI NO: 15222577 NR Description: hypothetical protein [Arabidopsis thaliana]
MSMDGSHDQEMEDLELFQKHIGDRFSELLSSTSEDSSSSSSSSSGDALLSIAWLRRLLDEFLCCEAEFKAVVLMGRDPSQITKPPLDKLLPDLLDRGVKSLDVCNAVTLGLDAVKNLQRLAEIAVAALEQTPLGDGQVRRAKKALSALVAAMLNDDSNAAAKGTERTRSFGRRAGNTNATKYKSLSWSMAKNWSAAKQIHAMMSNLTAPRGAESSGLAQPMYMMSTVLVFVMWTLVAAVPCQERNGLGTHFPLPRQLGWAQPMIGLQEKIAEEWKKKEKKGNVGLLEEMQRMDKLGQSLIEFADSFQFPTETERMDEVKKHVEELGDICKKMEEGLEPLQQQIREVFHRVVRSRTEFLLALDQAAKSTTPAL

SEQ ID NO: 52501 - DNA, 1425 bp, Glycine max
  misc_feature (1)..(1425): Ceres Seq. ID no. 14315234
ctcccactgcagtgtgtgtctctcttgacacatttcgttagccgctgttggcaaaaaccctctccctttggctccttccactctcactctgttttcatcgtcttcaaccaccgccatgtgctcttagacctcccaggttcttcgtggacaacccagaagaacaatttgttctgttgttttagctcttgaaatgaaaccacaaaccagtgggatgtctagagctcataaggcaaataatactcaaattgaagggcctaactggcttatttttgctgctggtgctttgttgagtactctatccattcgccttggttacaagttgaagcaggcacttgactcgaagccgaagcaaaatgcaactactggtcagaaaggaaatggaaaatccaccaacacaaaaaactccgcagactgctttatgcagtctaatggatattccctagcgcaagataatcatggatgcttcggttgcatttcaggaactgggggtaccatggagctaaagtgcccaccaaatggtcagatgcagatgcataatgagtttgatggggctctccctttggtgacagttcctgctgctgctgaatttagcaaggaaaatggtgtctgggcatgctctcctgatcgtcttgaactgccttcaaagccattccaccattcaaactgctcagattcaccatgtgtatcagaatctggttctgatatttttagtaagcgggaagtcatacagaaactgcggcaacagttgaagagaagagatgatatgatactagaaatgcaagatcaaatggctgaattgcaaaattccctcaatgctcagatgggactttcttctcatttgcaattgcagcttgatgctacaaaccgggacttatttgagtccaagagagagatccaacggctacgaaaagcaattgcagatcactgtgttggatttgttccccatgacaaatcttccaaggtgacagttttgcctactgagattagaaatggcctttcaaatgggcatcttgatggggagaataattgtgagtcctctgaaaaactaagggatgaggaggagagaattgaattgctgaaaaggcaagtaggagagttgaaagaggtaatagaaggaaaagaatacttgctcctgagctacaaggagcaaaaggcagaactgtctctgaagatcagggaattgcagcagagattggattctcagctgcctaatattttgtagaagctattaagtttgtgaatactttggttctttacatttgacaaatcttcactgtcttcctcattctttatttcctctgtaattagctcaatatatttcgagtttgtgcaatgtatgctactaaggaatgaaagagggctgggtatttgaaatgagatgaatgcatatggtcttagaaatagaaaatttatatttgtcactgt

SEQ ID NO: 52502 - protein, 343 aa, Glycine max
  peptide (1)..(343): Ceres Seq. ID no. 14315235
  misc_feature (1)..(71): Homolog of NCBI NO: 7487506 NR Description: hypothetical protein T29A15.110 - Arabidopsis
  misc_feature (81)..(343): Homolog of NCBI NO: 7487506 NR Description: hypothetical protein T29A15.110 - Arabidopsis
  misc_feature (1)..(61): Homolog of NCBI NO: 7487505 NR Description: hypothetical protein T29A15.100 - Arabidopsis
  misc_feature (113)..(343): Homolog of NCBI NO: 7487505 NR Description: hypothetical protein T29A15.100 - Arabidopsis
  misc_feature (1)..(343): Homolog of NCBI NO: 30687652 NR Description: expressed protein [Arabidopsis thaliana]
  misc_feature (1)..(343): Homolog of NCBI NO: 21536672 NR Description: unknown [Arabidopsis thaliana]
  misc_feature (1)..(343): Homolog of NCBI NO: 18417030 NR Description: expressed protein [Arabidopsis thaliana]
MKPQTSGMSRAHKANNTQIEGPNWLIFAAGALLSTLSIRLGYKLKQALDSKPKQNATTGQKGNGKSTNTKNSADCFMQSNGYSLAQDNHGCFGCISGTGGTMELKCPPNGQMQMHNEFDGALPLVTVPAAAEFSKENGVWACSPDRLELPSKPFHHSNCSDSPCVSESGSDIFSKREVIQKLRQQLKRRDDMILEMQDQMAELQNSLNAQMGLSSHLQLQLDATNRDLFESKREIQRLRKAIADHCVGFVPHDKSSKVTVLPTEIRNGLSNGHLDGENNCESSEKLRDEEERIELLKRQVGELKEVIEGKEYLLLSYKEQKAELSLKIRELQQRLDSQLPNIL

SEQ ID NO: 52503 - protein, 336 aa, Glycine max
  peptide (1)..(336): Ceres Seq. ID no. 14315236
  misc_feature (1)..(64): Homolog of NCBI NO: 7487506 NR Description: hypothetical protein T29A15.110 - Arabidopsis
  misc_feature (74)..(336): Homolog of NCBI NO: 7487506 NR Description: hypothetical protein T29A15.110 - Arabidopsis
  misc_feature (1)..(54): Homolog of NCBI NO: 7487505 NR Description: hypothetical protein T29A15.100 - Arabidopsis
  misc_feature (106)..(336): Homolog of NCBI NO: 7487505 NR Description: hypothetical protein T29A15.100 - Arabidopsis
  misc_feature (1)..(336): Homolog of NCBI NO: 30687652 NR Description: expressed protein [Arabidopsis thaliana]
  misc_feature (1)..(336): Homolog of NCBI NO: 21536672 NR Description: unknown [Arabidopsis thaliana]
  misc_feature (1)..(336): Homolog of NCBI NO: 18417030 NR Description: expressed protein [Arabidopsis thaliana]
MSRAHKANNTQIEGPNWLIFAAGALLSTLSIRLGYKLKQALDSKPKQNATTGQKGNGKSTNTKNSADCFMQSNGYSLAQDNHGCFGCISGTGGTMELKCPPNGQMQMHNEFDGALPLVTVPAAAEFSKENGVWACSPDRLELPSKPFHHSNCSDSPCVSESGSDIFSKREVIQKLRQQLKRRDDMILEMQDQMAELQNSLNAQMGLSSHLQLQLDATNRDLFESKREIQRLRKAIADHCVGFVPHDKSSKVTVLPTEIRNGLSNGHLDGENNCESSEKLRDEEERIELLKRQVGELKEVIEGKEYLLLSYKEQKAELSLKIRELQQRLDSQLPNIL

SEQ ID NO: 52504 - protein, 267 aa, Glycine max
  peptide (1)..(267): Ceres Seq. ID no. 14315237
  misc_feature (5)..(267): Homolog of NCBI NO: 7487506 NR Description: hypothetical protein T29A15.110 - Arabidopsis
  misc_feature (37)..(267): Homolog of NCBI NO: 7487505 NR Description: hypothetical protein T29A15.100 - Arabidopsis
  misc_feature (1)..(267): Homolog of NCBI NO: 30687652 NR Description: expressed protein [Arabidopsis thaliana]
  misc_feature (1)..(267): Homolog of NCBI NO: 21536672 NR Description: unknown [Arabidopsis thaliana]
  misc_feature (1)..(267): Homolog of NCBI NO: 18417030 NR Description: expressed protein [Arabidopsis thaliana]
MQSNGYSLAQDNHGCFGCISGTGGTMELKCPPNGQMQMHNEFDGALPLVTVPAAAEFSKENGVWACSPDRLELPSKPFHHSNCSDSPCVSESGSDIFSKREVIQKLRQQLKRRDDMILEMQDQMAELQNSLNAQMGLSSHLQLQLDATNRDLFESKREIQRLRKAIADHCVGFVPHDKSSKVTVLPTEIRNGLSNGHLDGENNCESSEKLRDEEERIELLKRQVGELKEVIEGKEYLLLSYKEQKAELSLKIRELQQRLDSQLPNIL

SEQ ID NO: 52505 - DNA, 947 bp, Glycine max
  misc_feature (1)..(947): Ceres Seq. ID no. 14305697
ttacctaatccagttccagttgttaagccaattccaaagccaacaccaatggtgaaaaagcctctacctattcccgtaacaaagcctataccaaaaccaattcccattgttaagcccattcctattccagtgttcaagcccatccccaaaccaattccaatagtgaaaaagcctctacctattccagtaactaagcctatacccaagccagtcccaattattaagccaattcccattccagtattcaagcctgtcccaattattaagccaattcccattccagtattcaagcctatcccaaagccatttccaatagtgaaaaagcctctacctattccagcaattaagcctataccaaagccaattccttcactaaaaaaacctctacctactccaacaattaagcctgtacccgagccagttccaaccgttaaaccaattccgatcccaacattcaagccttttccaaagccatttccatttgtgaaaaggcctttacctattcctccaatgatgaaacctataccaaagccatttacatctgttaaaaagcctccacctattccaatttccaaacctattccatagccattttccatttttatgatcaggcctataccaaaacaaatttcatttgttaaagcctatataagcctttcttcaaaaacttattgttccctgaataccacttctttattgcatatattttcttatgcttatgaagttatccactccaatttgaaaggagatatccagtacaatatttacagggcgacgcctgtgtctcgagatcaatgctgtacgggtttgcatgtatcctattgtatttatcttggaagttgaattggaatgtaaaagtttttttgcctctatgaaactgccaaatgttgccgctattgtaactcgattgatgatctactaatcaaggaatgatgtgntagtatctg

SEQ ID NO: 52506 - protein, 195 aa, Glycine max
  peptide (1)..(195): Ceres Seq. ID no. 14305698
  misc_feature (2)..(195): Pfam Name: Extensin-like region Pfam Description: Extensin-like region
  misc_feature (2)..(195): Homolog of NCBI NO: 9631973 NR Description: Pro-, Lys-rich, PAPK (30x)
  misc_feature (6)..(195): Homolog of NCBI NO: 7489265 NR Description: proline-rich protein GPP1 - potato
  misc_feature (2)..(195): Homolog of NCBI NO: 7489265 NR Description: proline-rich protein GPP1 - potato
  misc_feature (2)..(195): Homolog of NCBI NO: 17570087 NR Description: predicted CDS, putative nuclear protein (XC449)
  misc_feature (2)..(195): Homolog of NCBI NO: 17570087 NR Description: predicted CDS, putative nuclear protein (XC449)
  misc_feature (2)..(195): Homolog of NCBI NO: 100798 NR Description: proline-rich protein - wheat
  misc_feature (2)..(195): Homolog of NCBI NO: 100798 NR Description: proline-rich protein - wheat
  misc_feature (2)..(195): Homolog of NCBI NO: 7489265 NR Description: proline-rich protein GPP1 - potato
  misc_feature (2)..(195): Homolog of NCBI NO: 100798 NR Description: proline-rich protein - wheat
  misc_feature (4)..(195): Homolog of NCBI NO: 7489265 NR Description: proline-rich protein GPP1 - potato
LPNPVPVVKPIPKPTPMVKKPLPIPVTKPIPKPIPIVKPIPIPVFKPIPKPIPIVKKPLPIPVTKPIPKPVPIIKPIPIPVFKPVPIIKPIPIPVFKPIPKPFPIVKKPLPIPAIKPIPKPIPSLKKPLPTPTIKPVPEPVPTVKPIPIPTFKPFPKPFPFVKRPLPIPPMMKPIPKPFTSVKKPPPIPISKPIP

SEQ ID NO: 52507 - protein, 179 aa, Glycine max
  peptide (1)..(179): Ceres Seq. ID no. 14305699
  misc_feature (1)..(179): Pfam Name: Extensin-like region Pfam Description: Extensin-like region
  misc_feature (1)..(179): Homolog of NCBI NO: 9631973 NR Description: Pro-, Lys-rich, PAPK (30x)
  misc_feature (1)..(179): Homolog of NCBI NO: 7489265 NR Description: proline-rich protein GPP1 - potato
  misc_feature (1)..(179): Homolog of NCBI NO: 7489265 NR Description: proline-rich protein GPP1 - potato
  misc_feature (1)..(179): Homolog of NCBI NO: 17570087 NR Description: predicted CDS, putative nuclear protein (XC449)
  misc_feature (1)..(179): Homolog of NCBI NO: 17570087 NR Description: predicted CDS, putative nuclear protein (XC449)
  misc_feature (1)..(179): Homolog of NCBI NO: 100798 NR Description: proline-rich protein - wheat
  misc_feature (1)..(179): Homolog of NCBI NO: 100798 NR Description: proline-rich protein - wheat
  misc_feature (1)..(179): Homolog of NCBI NO: 7489265 NR Description: proline-rich protein GPP1 - potato
  misc_feature (1)..(179): Homolog of NCBI NO: 100798 NR Description: proline-rich protein - wheat
  misc_feature (1)..(179): Homolog of NCBI NO: 7489265 NR Description: proline-rich protein GPP1 - potato
MVKKPLPIPVTKPIPKPIPIVKPIPIPVFKPIPKPIPIVKKPLPIPVTKPIPKPVPIIKPIPIPVFKPVPIIKPIPIPVFKPIPKPFPIVKKPLPIPAIKPIPKPIPSLKKPLPTPTIKPVPEPVPTVKPIPIPTFKPFPKPFPFVKRPLPIPPMMKPIPKPFTSVKKPPPIPISKPIP

SEQ ID NO: 52508 - DNA, 1504 bp, Glycine max
  misc_feature (1)..(1504): Ceres Seq. ID no. 14315253
cctgaagtgaaaaaatagttgaaataaaattcgcttactgagttggttactactattgttcttaaacattgattagatacagtaatttcaaaattagattttgtgatattatgagttgtgagactatgctaacttacattgatttaaactttcccaaacactgttgcttgcggattagaatcataatcatatatcacacaaaacctgatgaactgcttagtttgctgcaaggcattcctgtataaactagttacggttatgaactttaggcagcatcatgctaatgaaatatatgaaaccaagatattctaagcaaagactagtttcaattgagcatgaatggagaagctgtgtcatgcaattgtgacacatgaaacataattttggtggcaacatagtggtgagacaggtatagatgggaaaacaccagttggaatcattttagtgagtgaagatgaaacaagtttttgggacttgaaagataataagctgctttggagttgcacctttttttcaaaatgtcatttatttggctgcagagtagttccagtattttagccaaaatcttcctttctgcttgggtgggcatgtaccctttgacatgctatgatgttttttctttttcctttcttgtagtatcgcttgtagcaccaagaggatttctggtcctcctgttttgtatttcaacattgcaagatgattttgttgctcaaacatatgtagcactggccaaatgttatgcttgctataatccttttgttcaacaactgtgtttagagctaagctgaatatattaagctcaatattgttctcatgtttctgataccccctcctatctttttcttttacaattgaacaatgaagtgaatattttttatgttgataaaatgatattatcacctctaacttattacttcttttggtttcttgtgttgaaaaaccaaaatagtgggccgttctctgttcggtggattaagcaacagttcccctggtttatttaccacattacatgagatgacatgcaaaaatatgttttctcagcaacaacgtaccttcatacagatgaggactgttctcaaggttgtggataactcgggggctaaaaaggtgatgtgcatacaggcattgaaagggaagaaaggggcaagattaggtgacacaataatagcatctgtgaaggaagcacatcctaatggaaaagtgaagaaaggaaaggttgtatatggggtagtggtgcgtgcggcaatgcaaaaggggcgttgtgatggcagtgaagtcaagtttgatgataatgctgtggtgcttgttgacaagcaaggccaacctattggaaccagagtttttggaccagtgcctcatgagctaaggcaaaagaagcatgtcaagattcttaccttggcagggcacattgcataaatgagaaaaagggctgtccttgagttttgttatgaattcaaatgtcacatctaccatttttatatttggatattttgatgtgatgtgc

SEQ ID NO: 52509 - protein, 133 aa, Glycine max
  peptide (1)..(133): Ceres Seq. ID no. 14315254
  misc_feature (15)..(133): Pfam Name: Ribosomal protein L14p/L23e Pfam Description: Ribosomal protein L14p/L23e
  misc_feature (15)..(132): Homolog of NCBI NO: 15892919 NR Description: 50S ribosomal protein L14 [Rickettsia conorii]
  misc_feature (15)..(132): Homolog of NCBI NO: 15604495 NR Description: 50S RIBOSOMAL PROTEIN L14 (rplN) [Rickettsia
  misc_feature (1)..(103): Homolog of NCBI NO: 15220161 NR Description: ribosomal protein L14p family [Arabidopsis
  misc_feature (1)..(103): Homolog of NCBI NO: 18140858 NR Description: HUELLENLOS [Arabidopsis thaliana]
  misc_feature (1)..(103): Homolog of NCBI NO: 8778471 NR Description: F1L3.27 [Arabidopsis thaliana]
  misc_feature (17)..(133): Homolog of NCBI NO: 9757736 NR Description: 50S ribosomal protein L14 [Arabidopsis thaliana]
  misc_feature (1)..(132): Homolog of NCBI NO: 18140856 NR Description: HUELLENLOS-like protein [Oryza sativa]
  misc_feature (1)..(133): Homolog of NCBI NO: 20260394 NR Description: unknown protein [Arabidopsis thaliana]
  misc_feature (1)..(133): Homolog of NCBI NO: 30694896 NR Description: ribosomal protein L14p family [Arabidopsis
  misc_feature (1)..(133): Homolog of NCBI NO: 30694900 NR Description: ribosomal protein L14p family [Arabidopsis
MTCKNMFSQQQRTFIQMRTVLKVVDNSGAKKVMCIQALKGKKGARLGDTIIASVKEAHPNGKVKKGKVVYGVVVRAAMQKGRCDGSEVKFDDNAVVLVDKQGQPIGTRVFGPVPHELRQKKHVKILTLAGHIA

SEQ ID NO: 52510 - protein, 128 aa, Glycine max
  peptide (1)..(128): Ceres Seq. ID no. 14315255
  misc_feature (10)..(128): Pfam Name: Ribosomal protein L14p/L23e Pfam Description: Ribosomal protein L14p/L23e
  misc_feature (10)..(127): Homolog of NCBI NO: 15892919 NR Description: 50S ribosomal protein L14 [Rickettsia conorii]
  misc_feature (10)..(127): Homolog of NCBI NO: 15604495 NR Description: 50S RIBOSOMAL PROTEIN L14 (rplN) [Rickettsia
  misc_feature (1)..(98): Homolog of NCBI NO: 15220161 NR Description: ribosomal protein L14p family [Arabidopsis
  misc_feature (1)..(98): Homolog of NCBI NO: 18140858 NR Description: HUELLENLOS [Arabidopsis thaliana]
  misc_feature (1)..(98): Homolog of NCBI NO: 8778471 NR Description: F1L3.27 [Arabidopsis thaliana]
  misc_feature (12)..(128): Homolog of NCBI NO: 9757736 NR Description: 50S ribosomal protein L14 [Arabidopsis thaliana]
  misc_feature (1)..(127): Homolog of NCBI NO: 18140856 NR Description: HUELLENLOS-like protein [Oryza sativa]
  misc_feature (1)..(128): Homolog of NCBI NO: 20260394 NR Description: unknown protein [Arabidopsis thaliana]
  misc_feature (1)..(128): Homolog of NCBI NO: 30694896 NR Description: ribosomal protein L14p family [Arabidopsis
  misc_feature (1)..(128): Homolog of NCBI NO: 30694900 NR Description: ribosomal protein L14p family [Arabidopsis
MFSQQQRTFIQMRTVLKVVDNSGAKKVMCIQALKGKKGARLGDTIIASVKEAHPNGKVKKGKVVYGVVVRAAMQKGRCDGSEVKFDDNAVVLVDKQGQPIGTRVFGPVPHELRQKKHVKILTLAGHIA

SEQ ID NO: 52511 - protein, 117 aa, Glycine max
  peptide (1)..(117): Ceres Seq. ID no. 14315256
  misc_feature (1)..(117): Pfam Name: Ribosomal protein L14p/L23e Pfam Description: Ribosomal protein L14p/L23e
  misc_feature (1)..(116): Homolog of NCBI NO: 15892919 NR Description: 50S ribosomal protein L14 [Rickettsia conorii]
  misc_feature (1)..(116): Homolog of NCBI NO: 15604495 NR Description: 50S RIBOSOMAL PROTEIN L14 (rplN) [Rickettsia
  misc_feature (1)..(87): Homolog of NCBI NO: 15220161 NR Description: ribosomal protein L14p family [Arabidopsis
  misc_feature (1)..(87): Homolog of NCBI NO: 18140858 NR Description: HUELLENLOS [Arabidopsis thaliana]
  misc_feature (1)..(87): Homolog of NCBI NO: 8778471 NR Description: F1L3.27 [Arabidopsis thaliana]
  misc_feature (1)..(117): Homolog of NCBI NO: 9757736 NR Description: 50S ribosomal protein L14 [Arabidopsis thaliana]
  misc_feature (1)..(116): Homolog of NCBI NO: 18140856 NR Description: HUELLENLOS-like protein [Oryza sativa]
  misc_feature (1)..(117): Homolog of NCBI NO: 20260394 NR Description: unknown protein [Arabidopsis thaliana]
  misc_feature (1)..(117): Homolog of NCBI NO: 30694896 NR Description: ribosomal protein L14p family [Arabidopsis
  misc_feature (1)..(117): Homolog of NCBI NO: 30694900 NR Description: ribosomal protein L14p family [Arabidopsis
MRTVLKVVDNSGAKKVMCIQALKGKKGARLGDTIIASVKEAHPNGKVKKGKVVYGVVVRAAMQKGRCDGSEVKFDDNAVVLVDKQGQPIGTRVFGPVPHELRQKKHVKILTLAGHIA

SEQ ID NO: 52512 - DNA, 1415 bp, Glycine max
  misc_feature (1)..(1415): Ceres Seq. ID no. 14315249
atgctttggttagagtttgatttcggtataggaaaaagtgaagctagcaagaacgaaaggttggctcagattgcaatattttaaggctcaagagaatcaaagactccttggcatatttaacttttaagacggcaaaaaatgtttccattttctgctcaagctatctcagatagatagccataaagtttgtcaagttaatgtgatgttttctgcataaaaattacttggatgttgtgttttctcttcatttaagaatggaaaagattccaaatgcaggatttacacgtgttttcggttttccaatggaaatgaagaatgaggatcagatcacacaacaggctcagagaccaaaatatgattgccttctatttgatttagatgatactttgtatcctctcaattctggtcttgcaaatgcaattgacaaaaatattaaagactacatggtcgagaagcttggcgcagaaccaagtaaaactggtgaattggtcaacctcctttacagtaactatggaactactattgctggtctaagggctattggatatgacattgactatgaagaatattacagttttgttcatgggaaattaccttatgagaacttaaagccagacccagttctgaggaatctgctgctgagtctcccctatagaaagcttattttcacaaactcagacaaagtccatacgattaaggcacttgaaagacttgggttggaagactgctttgaaggaatgatatgctttgagacccttaatcctatccaaaagagcactgttttttattatgaagctgacataaagtttgagggttcaaagagcataaatccaacacccaaaaatggtgtagaatgctctgaaatctttgacatcatagagcattttgctcaacctgaacccagtgcagtcctgccagagacaccaattatctgcaaaccatccgaacatgccattaaattggccctcaagatggccaaccttaacccacaaagaaccttgttctttgaggatagtgtccgcaacatacaatctggaaaacgattgggccttcacactgtgttggttggtagatcctacagggttaaaggtgctgattatgccatggaaagcattcacaaccttaaggaggcagtgcctgaactgtgggaagctgacataaaagcacaagttgcatgcccgggaactgagaagcttgcagtggagacatcagatatagcttgagacttcgcaagaatgccccttttagtatcgttaataaattgaaaatctatgtagaaataaagaagcagtcagccacagggttttccatcttcaaatgtttttttttaaatctataggatcattgcattcaatatcagagatttgataacattcacagatcctattcaatcaatgatttagatttcttcgttc

SEQ ID NO: 52513 - protein, 322 aa, Glycine max
  peptide (1)..(322): Ceres Seq. ID no. 14315250
  misc_feature (34)..(175): Pfam Name: haloacid dehalogenase-like hydrolase Pfam Description: haloacid dehalogenase-like hydrolase
  misc_feature (220)..(319): Homolog of NCBI NO: 8885554 NR Description: ripening-related protein-like; hydrolase-like
  misc_feature (32)..(170): Homolog of NCBI NO: 15238429 NR Description: haloacid dehalogenase-like hydrolase family
  misc_feature (32)..(170): Homolog of NCBI NO: 8885554 NR Description: ripening-related protein-like; hydrolase-like
  misc_feature (179)..(318): Homolog of NCBI NO: 21618155 NR Description: putative ripening-related protein-like
  misc_feature (27)..(174): Homolog of NCBI NO: 21618155 NR Description: putative ripening-related protein-like
  misc_feature (179)..(318): Homolog of NCBI NO: 30697236 NR Description: haloacid dehalogenase-like hydrolase family
  misc_feature (27)..(174): Homolog of NCBI NO: 30697236 NR Description: haloacid dehalogenase-like hydrolase family
  misc_feature (179)..(318): Homolog of NCBI NO: 30697234 NR Description: haloacid dehalogenase-like hydrolase family
  misc_feature (27)..(174): Homolog of NCBI NO: 30697234 NR Description: haloacid dehalogenase-like hydrolase family
  misc_feature (28)..(318): Homolog of NCBI NO: 7406669 NR Description: putative ripening-related protein [Vitis vinifera]
MEKIPNAGFTRVFGFPMEMKNEDQITQQAQRPKYDCLLFDLDDTLYPLNSGLANAIDKNIKDYMVEKLGAEPSKTGELVNLLYSNYGTTIAGLRAIGYDIDYEEYYSFVHGKLPYENLKPDPVLRNLLLSLPYRKLIFTNSDKVHTIKALERLGLEDCFEGMICFETLNPIQKSTVFYYEADIKFEGSKSINPTPKNGVECSEIFDIIEHFAQPEPSAVLPETPIICKPSEHAIKLALKMANLNPQRTLFFEDSVRNIQSGKRLGLHTVLVGRSYRVKGADYAMESIHNLKEAVPELWEADIKAQVACPGTEKLAVETSDIA

SEQ ID NO: 52514 - protein, 306 aa, Glycine max
  peptide (1)..(306): Ceres Seq. ID no. 14315251
  misc_feature (18)..(159): Pfam Name: haloacid dehalogenase-like hydrolase Pfam Description: haloacid dehalogenase-like hydrolase
  misc_feature (204)..(303): Homolog of NCBI NO: 8885554 NR Description: ripening-related protein-like; hydrolase-like
  misc_feature (16)..(154): Homolog of NCBI NO: 15238429 NR Description: haloacid dehalogenase-like hydrolase family
  misc_feature (16)..(154): Homolog of NCBI NO: 8885554 NR Description: ripening-related protein-like; hydrolase-like
  misc_feature (163)..(302): Homolog of NCBI NO: 21618155 NR Description: putative ripening-related protein-like
  misc_feature (11)..(158): Homolog of NCBI NO: 21618155 NR Description: putative ripening-related protein-like
  misc_feature (163)..(302): Homolog of NCBI NO: 30697236 NR Description: haloacid dehalogenase-like hydrolase family
  misc_feature (11)..(158): Homolog of NCBI NO: 30697236 NR Description: haloacid dehalogenase-like hydrolase family
  misc_feature (163)..(302): Homolog of NCBI NO: 30697234 NR Description: haloacid dehalogenase-like hydrolase family
  misc_feature (11)..(158): Homolog of NCBI NO: 30697234 NR Description: haloacid dehalogenase-like hydrolase family
  misc_feature (12)..(302): Homolog of NCBI NO: 7406669 NR Description: putative ripening-related protein [Vitis vinifera]
MEMKNEDQITQQAQRPKYDCLLFDLDDTLYPLNSGLANAIDKNIKDYMVEKLGAEPSKTGELVNLLYSNYGTTIAGLRAIGYDIDYEEYYSFVHGKLPYENLKPDPVLRNLLLSLPYRKLIFTNSDKVHTIKALERLGLEDCFEGMICFETLNPIQKSTVFYYEADIKFEGSKSINPTPKNGVECSEIFDIIEHFAQPEPSAVLPETPIICKPSEHAIKLALKMANLNPQRTLFFEDSVRNIQSGKRLGLHTVLVGRSYRVKGADYAMESIHNLKEAVPELWEADIKAQVACPGTEKLAVETSDIA

SEQ ID NO: 52515 - protein, 304 aa, Glycine max
  peptide (1)..(304): Ceres Seq. ID no. 14315252
  misc_feature (16)..(157): Pfam Name: haloacid dehalogenase-like hydrolase Pfam Description: haloacid dehalogenase-like hydrolase
  misc_feature (202)..(301): Homolog of NCBI NO: 8885554 NR Description: ripening-related protein-like; hydrolase-like
  misc_feature (14)..(152): Homolog of NCBI NO: 15238429 NR Description: haloacid dehalogenase-like hydrolase family
  misc_feature (14)..(152): Homolog of NCBI NO: 8885554 NR Description: ripening-related protein-like; hydrolase-like
  misc_feature (161)..(300): Homolog of NCBI NO: 21618155 NR Description: putative ripening-related protein-like
  misc_feature (9)..(156): Homolog of NCBI NO: 21618155 NR Description: putative ripening-related protein-like
  misc_feature (161)..(300): Homolog of NCBI NO: 30697236 NR Description: haloacid dehalogenase-like hydrolase family
  misc_feature (9)..(156): Homolog of NCBI NO: 30697236 NR Description: haloacid dehalogenase-like hydrolase family
  misc_feature (161)..(300): Homolog of NCBI NO: 30697234 NR Description: haloacid dehalogenase-like hydrolase family
  misc_feature (9)..(156): Homolog of NCBI NO: 30697234 NR Description: haloacid dehalogenase-like hydrolase family
  misc_feature (10)..(300): Homolog of NCBI NO: 7406669 NR Description: putative ripening-related protein [Vitis vinifera]
MKNEDQITQQAQRPKYDCLLFDLDDTLYPLNSGLANAIDKNIKDYMVEKLGAEPSKTGELVNLLYSNYGTTIAGLRAIGYDIDYEEYYSFVHGKLPYENLKPDPVLRNLLLSLPYRKLIFTNSDKVHTIKALERLGLEDCFEGMICFETLNPIQKSTVFYYEADIKFEGSKSINPTPKNGVECSEIFDIIEHFAQPEPSAVLPETPIICKPSEHAIKLALKMANLNPQRTLFFEDSVRNIQSGKRLGLHTVLVGRSYRVKGADYAMESIHNLKEAVPELWEADIKAQVACPGTEKLAVETSDIA

SEQ ID NO: 52516 - DNA, 1599 bp, Glycine max
  misc_feature (1)..(1599): Ceres Seq. ID no. 14315241
aacagaaagacacaatgggcaaagaaagtagtacttgtgttcttctatcccttctcattctttcactctttgtggctgaaatatatggaaatagacaagttcaagctcttaacaaactgcacaagtccaccaagttcagaggaaattcacaaattgataggagtgagtttgaggtagaggagcttgcttatgatggcattgttcactctcaagagggtctcaaagagaaagatagaattgagagtcttccaggacaaccccctgtgagtttttctcactatggagggtatgtcactgtggataaagaagcaggtcgtgccttctattattacttcgttgaagctcaacgttctaaacaaacactcccacttcttctttggctcaatggaggtcctggatgttcatctcttggctatggagcaatgcaagaacttggaccttttcgagtaaacagtgatggtaaaacactccacagaaatatattttcttggaacaaagttgcaaatgttttattcctggagtcacctgctggagtaggattttcctattcaaacaaatcaaaagattatgatacgaatggagataagaaaacagctgcagacaattatttattcttggtgaattggttggagagatatccagaatataaggaaagagatttctatattgctggggaaagctatgctgggcattatgtgcctcaatttgcacataccattctctatcataacaaaaaggcaaataagaaaatcatcaatctaaaaggaatcttgattgggaatgcagtgatcaacgaggaaactgactcggacggactgtatgattatcttgccagccatgcaatcatctcagacaaagcagcttatctcaacaaagcttgtgattcatcatcatcaaagattcaggaaagtgtgtgcgatgcagccggagatgaacttggggaggatattgaatacattgatttatacaatatttatgctccactatgcaagaatgcaaatctcacagccctgcccaaaaggaacacaattgtgactgatccatgtagtgagaattatgtgtacgcatatcttaatagaaaagatgttcaagaggctctccatgccaatgtaaccaacctcaaacatgactgggaaccctgcagcgatgtcataacaaagtgggttgatcaagcttcaacagttcttccacttttacatgaattcctcaacaatagcctcagggtttggattttcagtggtgacacagatggaagggtgcctattacatcaaccaagtattcagttaagaagatgaaccttcccattaaatctgtttggcacccttggttttcctatggagaggttggtggctatgtagaagtatacaagggaggcctaacattagctacggtgagggaagcagggcatcaagtgccaagttaccaaccagccagagccctaactttgatcaaatatttcttagacggcactcctcttcccggtcctcccaaaagaaaggactaggactagtttcttcaaatccacttttcaataattgttgtggtaattattaatttaaggaaaataaatacaattatattatagtggggtttcttgg

SEQ ID NO: 52517 - protein, 500 aa, Glycine max
  peptide (1)..(500): Ceres Seq. ID no. 14315242
  misc_feature (83)..(489): Pfam Name: Serine carboxypeptidase Pfam Description: Serine carboxypeptidase
  misc_feature (74)..(493): Homolog of NCBI NO: 13877871 NR Description: putative serine carboxypeptidase II [Arabidopsis
  misc_feature (346)..(493): Homolog of NCBI NO: 15241571 NR Description: serine carboxypeptidase II -related [Arabidopsis
  misc_feature (69)..(347): Homolog of NCBI NO: 15241571 NR Description: serine carboxypeptidase II -related [Arabidopsis
  misc_feature (79)..(493): Homolog of NCBI NO: 29367473 NR Description: serine carboxypepsidase [Oryza sativa (japonica
  misc_feature (5)..(496): Homolog of NCBI NO: 15231103 NR Description: serine carboxypeptidase family [Arabidopsis
  misc_feature (12)..(496): Homolog of NCBI NO: 34329345 NR Description: putative serine carboxypeptidase [Medicago
  misc_feature (72)..(493): Homolog of NCBI NO: 34899032 NR Description: putative serine carboxypeptidase II-3 precursor
  misc_feature (70)..(493): Homolog of NCBI NO: 1706082 NR Description: Serine carboxypeptidase II-3 precursor (CP-MII.3)
  misc_feature (6)..(493): Homolog of NCBI NO: 15229439 NR Description: serine carboxypeptidase, putative [Arabidopsis
  misc_feature (11)..(495): Homolog of NCBI NO: 11967861 NR Description: putative serine carboxypeptidase [Pisum sativum]
QKDTMGKESSTCVLLSLLILSLFVAEIYGNRQVQALNKLHKSTKFRGNSQIDRSEFEVEELAYDGIVHSQEGLKEKDRIESLPGQPPVSFSHYGGYVTVDKEAGRAFYYYFVEAQRSKQTLPLLLWLNGGPGCSSLGYGAMQELGPFRVNSDGKTLHRNIFSWNKVANVLFLESPAGVGFSYSNKSKDYDTNGDKKTAADNYLFLVNWLERYPEYKERDFYIAGESYAGHYVPQFAHTILYHNKKANKKIINLKGILIGNAVINEETDSDGLYDYLASHAIISDKAAYLNKACDSSSSKIQESVCDAAGDELGEDIEYIDLYNIYAPLCKNANLTALPKRNTIVTDPCSENYVYAYLNRKDVQEALHANVTNLKHDWEPCSDVITKWVDQASTVLPLLHEFLNNSLRVWIFSGDTDGRVPITSTKYSVKKMNLPIKSVWHPWFSYGEVGGYVEVYKGGLTLATVREAGHQVPSYQPARALTLIKYFLDGTPLPGPPKRKD

SEQ ID NO: 52518 - protein, 496 aa, Glycine max
  peptide (1)..(496): Ceres Seq. ID no. 14315243
  misc_feature (79)..(485): Pfam Name: Serine carboxypeptidase Pfam Description: Serine carboxypeptidase
  misc_feature (70)..(489): Homolog of NCBI NO: 13877871 NR Description: putative serine carboxypeptidase II [Arabidopsis
  misc_feature (342)..(489): Homolog of NCBI NO: 15241571 NR Description: serine carboxypeptidase II -related [Arabidopsis
  misc_feature (65)..(343): Homolog of NCBI NO: 15241571 NR Description: serine carboxypeptidase II -related [Arabidopsis
  misc_feature (75)..(489): Homolog of NCBI NO: 29367473 NR Description: serine carboxypepsidase [Oryza sativa (japonica
  misc_feature (1)..(492): Homolog of NCBI NO: 15231103 NR Description: serine carboxypeptidase family [Arabidopsis
  misc_feature (8)..(492): Homolog of NCBI NO: 34329345 NR Description: putative serine carboxypeptidase [Medicago
  misc_feature (68)..(489): Homolog of NCBI NO: 34899032 NR Description: putative serine carboxypeptidase II-3 precursor
  misc_feature (66)..(489): Homolog of NCBI NO: 1706082 NR Description: Serine carboxypeptidase II-3 precursor (CP-MII.3)
  misc_feature (2)..(489): Homolog of NCBI NO: 15229439 NR Description: serine carboxypeptidase, putative [Arabidopsis
  misc_feature (7)..(491): Homolog of NCBI NO: 11967861 NR Description: putative serine carboxypeptidase [Pisum sativum]
MGKESSTCVLLSLLILSLFVAEIYGNRQVQALNKLHKSTKFRGNSQIDRSEFEVEELAYDGIVHSQEGLKEKDRIESLPGQPPVSFSHYGGYVTVDKEAGRAFYYYFVEAQRSKQTLPLLLWLNGGPGCSSLGYGAMQELGPFRVNSDGKTLHRNIFSWNKVANVLFLESPAGVGFSYSNKSKDYDTNGDKKTAADNYLFLVNWLERYPEYKERDFYIAGESYAGHYVPQFAHTILYHNKKANKKIINLKGILIGNAVINEETDSDGLYDYLASHAIISDKAAYLNKACDSSSSKIQESVCDAAGDELGEDIEYIDLYNIYAPLCKNANLTALPKRNTIVTDPCSENYVYAYLNRKDVQEALHANVTNLKHDWEPCSDVITKWVDQASTVLPLLHEFLNNSLRVWIFSGDTDGRVPITSTKYSVKKMNLPIKSVWHPWFSYGEVGGYVEVYKGGLTLATVREAGHQVPSYQPARALTLIKYFLDGTPLPGPPKRKD

SEQ ID NO: 52519 - protein, 360 aa, Glycine max
  peptide (1)..(360): Ceres Seq. ID no. 14315244
  misc_feature (1)..(349): Pfam Name: Serine carboxypeptidase Pfam Description: Serine carboxypeptidase
  misc_feature (1)..(353): Homolog of NCBI NO: 13877871 NR Description: putative serine carboxypeptidase II [Arabidopsis
  misc_feature (206)..(353): Homolog of NCBI NO: 15241571 NR Description: serine carboxypeptidase II -related [Arabidopsis
  misc_feature (1)..(207): Homolog of NCBI NO: 15241571 NR Description: serine carboxypeptidase II -related [Arabidopsis
  misc_feature (1)..(353): Homolog of NCBI NO: 29367473 NR Description: serine carboxypepsidase [Oryza sativa (japonica
  misc_feature (1)..(356): Homolog of NCBI NO: 15231103 NR Description: serine carboxypeptidase family [Arabidopsis
  misc_feature (1)..(356): Homolog of NCBI NO: 34329345 NR Description: putative serine carboxypeptidase [Medicago
  misc_feature (1)..(353): Homolog of NCBI NO: 34899032 NR Description: putative serine carboxypeptidase II-3 precursor
  misc_feature (1)..(353): Homolog of NCBI NO: 1706082 NR Description: Serine carboxypeptidase II-3 precursor (CP-MII.3)
  misc_feature (1)..(353): Homolog of NCBI NO: 15229439 NR Description: serine carboxypeptidase, putative [Arabidopsis
  misc_feature (1)..(355): Homolog of NCBI NO: 11967861 NR Description: putative serine carboxypeptidase [Pisum sativum]
MQELGPFRVNSDGKTLHRNIFSWNKVANVLFLESPAGVGFSYSNKSKDYDTNGDKKTAADNYLFLVNWLERYPEYKERDFYIAGESYAGHYVPQFAHTILYHNKKANKKIINLKGILIGNAVINEETDSDGLYDYLASHAIISDKAAYLNKACDSSSSKIQESVCDAAGDELGEDIEYIDLYNIYAPLCKNANLTALPKRNTIVTDPCSENYVYAYLNRKDVQEALHANVTNLKHDWEPCSDVITKWVDQASTVLPLLHEFLNNSLRVWIFSGDTDGRVPITSTKYSVKKMNLPIKSVWHPWFSYGEVGGYVEVYKGGLTLATVREAGHQVPSYQPARALTLIKYFLDGTPLPGPPKRKD

SEQ ID NO: 52520 - DNA, 478 bp, Glycine max
  misc_feature (1)..(478): Ceres Seq. ID no. 14305686
caagtttcagctctaagcttcatctatctccgtctttcaggcaaactaaaaagtttataatctagttttctgtcctcctctatctagaatggcgcttgtcaaaagtattgtttcaacagtaagacccaacttaatgacatttctgaagtttgcaaaagttgaattaactccacctactcctggtgacattccagcaatttcccgtgggtttggagacatcgttagtgcagccaagactggtcggtggaagcaactgactgttaaagaagcatggctgaatgttttggtgttcactgaagtaacatgctggttttggattggagaagtaattggcaagaggaacatgattggatatgacgttcaagtataagtcatgccatcaaaaaaagtttagaaatgtatctttcaatttagcaggcattgtttaacactcatattgagatttggtaatgtaaatgttaaaataaaacttgtttct

SEQ ID NO: 52521 - protein, 93 aa, Glycine max
  peptide (1)..(93): Ceres Seq. ID no. 14305687
  misc_feature (3)..(91): Pfam Name: Mitochondrial ATP synthase g subunit Pfam Description: Mitochondrial ATP synthase g subunit
  misc_feature (2)..(91): Homolog of NCBI NO: 3123646 NR Description: F1F0-ATP synthase g subunit [Mus musculus]
  misc_feature (2)..(92): Homolog of NCBI NO: 12841973 NR Description: unnamed protein product [Mus musculus]
  misc_feature (2)..(91): Homolog of NCBI NO: 20888181 NR Description: similar to ATP synthase, H+ transporting, F0 complex, subunit g~data source:MGD, source key:MGI:1351597,
  misc_feature (1)..(91): Homolog of NCBI NO: 29568101 NR Description: ATP synthase, H+ transporting, mitochondrial F0
  misc_feature (2)..(91): Homolog of NCBI NO: 7579922 NR Description: F1Fo-ATP synthase complex Fo membrane domain g
  misc_feature (1)..(91): Homolog of NCBI NO: 7513261 NR Description: probable H+-transporting two-sector ATPase (EC
  misc_feature (1)..(91): Homolog of NCBI NO: 3659901 NR Description: F1F0-type ATP synthase subunit g [Homo sapiens]
  misc_feature (1)..(91): Homolog of NCBI NO: 23596629 NR Description: similar to ATP synthase, H+ transporting,
  misc_feature (2)..(91): Homolog of NCBI NO: 2493093 NR Description: ATP synthase g chain, mitochondrial (ATPase
  misc_feature (3)..(91): Homolog of NCBI NO: 21356001 NR Description: CG6105-PA [Drosophila melanogaster]
MALVKSIVSTVRPNLMTFLKFAKVELTPPTPGDIPAISRGFGDIVSAAKTGRWKQLTVKEAWLNVLVFTEVTCWFWIGEVIGKRNMIGYDVQV

SEQ ID NO: 52522 - protein, 78 aa, Glycine max
  peptide (1)..(78): Ceres Seq. ID no. 14305688
  misc_feature (1)..(76): Pfam Name: Mitochondrial ATP synthase g subunit Pfam Description: Mitochondrial ATP synthase g subunit
  misc_feature (1)..(76): Homolog of NCBI NO: 3123646 NR Description: F1F0-ATP synthase g subunit [Mus musculus]
  misc_feature (1)..(77): Homolog of NCBI NO: 12841973 NR Description: unnamed protein product [Mus musculus]
  misc_feature (1)..(76): Homolog of NCBI NO: 20888181 NR Description: similar to ATP synthase, H+ transporting, F0 complex, subunit g~data source:MGD, source key:MGI:1351597,
  misc_feature (1)..(76): Homolog of NCBI NO: 29568101 NR Description: ATP synthase, H+ transporting, mitochondrial F0
  misc_feature (1)..(76): Homolog of NCBI NO: 7579922 NR Description: F1Fo-ATP synthase complex Fo membrane domain g
  misc_feature (1)..(76): Homolog of NCBI NO: 7513261 NR Description: probable H+-transporting two-sector ATPase (EC
  misc_feature (1)..(76): Homolog of NCBI NO: 3659901 NR Description: F1F0-type ATP synthase subunit g [Homo sapiens]
  misc_feature (1)..(76): Homolog of NCBI NO: 23596629 NR Description: similar to ATP synthase, H+ transporting,
  misc_feature (1)..(76): Homolog of NCBI NO: 2493093 NR Description: ATP synthase g chain, mitochondrial (ATPase
  misc_feature (1)..(76): Homolog of NCBI NO: 21356001 NR Description: CG6105-PA [Drosophila melanogaster]
MTFLKFAKVELTPPTPGDIPAISRGFGDIVSAAKTGRWKQLTVKEAWLNVLVFTEVTCWFWIGEVIGKRNMIGYDVQV

SEQ ID NO: 52523 - DNA, 1779 bp, Glycine max
  misc_feature (1)..(1779): Ceres Seq. ID no. 15177328
gagggaaagacgttcttcaatttcatcgctcgagcttcatttctgactcagagtaacactacagagtacaaacatcaaacaccttctctgcacgcaaaaaccgcgaaaagaactagaaccaaagatgcagagattcaaagctctgctacctcaacaaactaggtcctcacttcgcactctctgttctcaccgtcgagctttctccgctcaaccgaattacgcaaagcaccacgacgacgattctcaggaacagattttagtcgaaggaagagcgaaatcacgagcagctattctcaacaggccgtcttcgctgaactcgctcaatgcttcaatggttgctcggttgaagaggctgtatgattcctgggaagaaaactctgatattggctttgttttgatgaagggtagtggcagagctttctgttctggtgcagatgttgttaggctgtatcactcactcaatgaaggaaatactgacgaagctgaacagtttttcaaaacattatattcatttgtatatcttcaagggacatatcttaaaccacatgttgccattttggatggaataacaatggtatgtggatctggaatttctctaccaggaatgttccgtgtggtaactgataaaactgttttttctcacccagaagctcaaataggtttccacccagatgcaggagcttcttatgttttgtctcgtctacctggctacttaggggaatacttggcccttacaggagataagcttaatggtgttgaaatgattgcctgccgccttgctactcattattcactaaatgcaaggctctctttgcttgaagaacgtcttggtaaactaatcacagacgaaccttctgttgtggagtcatccctcgcacagtatggtgatcttgtttatccagataggagcagtgtccttcacaggattgatactattgatagatgtttcagtcacgaaactgtggaggaaattattgaagctttggagaaagaggctgctgagtctaatgacgaatggtactcgactactctaaggagaataagagaagcctccccgttgagtttgaaagttactttacaatctatacgtgaaggtagatttgaaacacttgataaatgtcttgtacgtgagtatcgtatgtccctacgtggtatttcaaagcatgtctcctctgatttctttgagggtgttcgggcacgaatggttgatagagattttgcaccaaagtgggacccacctagattaaaagatatatcagaggacatggttgaatactatttctctcctttaagtgaagttcaatctgaattagtgctgccaacagctttgcgagaaccttacatgtgaaaccagcatacctcttagaaaggattttgattaaaaaaataaattccgtgtaaagaggcgttgatgcagttggaagatggcacaatccatgaactatcgcattcacctgcctttgacaaaacttccaccaccaacggttcctgtctgactatctgtcggattaccgaatgaactttccaatgttcggaattatctttgttcttgaatgtgtgtagtctaatgttggccccataaatataagtgaaaggaccatatctgcttctttcattgtttatgctttgattgctcacattggcatgagatgcttttctaatagacgtgctgcagtgatgcctatttttatatcttatttttcgtgcttttatgttgtctgattatgttatttgtagaatacaacacatgttaacattaaaaatctgtttgtagaatac

SEQ ID NO: 52524 - protein, 407 aa, Glycine max
  peptide (1)..(407): Ceres Seq. ID no. 15177329
  misc_feature (54)..(224): Pfam Name: Enoyl-CoA hydratase/isomerase family Pfam Description: Enoyl-CoA hydratase/isomerase family
  misc_feature (40)..(399): Homolog of NCBI NO: 15239206 NR Description: 3-hydroxyisobutyryl-coenzyme A hydrolase
  misc_feature (1)..(88): Homolog of NCBI NO: 11357284 NR Description: enoyl-CoA-hydratase-like protein - Arabidopsis
  misc_feature (288)..(404): Homolog of NCBI NO: 11357284 NR Description: enoyl-CoA-hydratase-like protein - Arabidopsis
  misc_feature (170)..(287): Homolog of NCBI NO: 11357284 NR Description: enoyl-CoA-hydratase-like protein - Arabidopsis
  misc_feature (73)..(190): Homolog of NCBI NO: 11357284 NR Description: enoyl-CoA-hydratase-like protein - Arabidopsis
  misc_feature (288)..(404): Homolog of NCBI NO: 30695218 NR Description: enoyl-CoA hydratase/isomerase family [Arabidopsis
  misc_feature (1)..(287): Homolog of NCBI NO: 30695218 NR Description: enoyl-CoA hydratase/isomerase family [Arabidopsis
  misc_feature (1)..(406): Homolog of NCBI NO: 7484947 NR Description: enoyl-CoA hydratase homolog F11C18.10 -
  misc_feature (23)..(407): Homolog of NCBI NO: 37536724 NR Description: putative enoyl-CoA-hydratase
  misc_feature (1)..(406): Homolog of NCBI NO: 22329062 NR Description: 3-hydroxyisobutyryl-coenzyme A hydrolase
MQRFKALLPQQTRSSLRTLCSHRRAFSAQPNYAKHHDDDSQEQILVEGRAKSRAAILNRPSSLNSLNASMVARLKRLYDSWEENSDIGFVLMKGSGRAFCSGADVVRLYHSLNEGNTDEAEQFFKTLYSFVYLQGTYLKPHVAILDGITMVCGSGISLPGMFRVVTDKTVFSHPEAQIGFHPDAGASYVLSRLPGYLGEYLALTGDKLNGVEMIACRLATHYSLNARLSLLEERLGKLITDEPSVVESSLAQYGDLVYPDRSSVLHRIDTIDRCFSHETVEEIIEALEKEAAESNDEWYSTTLRRIREASPLSLKVTLQSIREGRFETLDKCLVREYRMSLRGISKHVSSDFFEGVRARMVDRDFAPKWDPPRLKDISEDMVEYYFSPLSEVQSELVLPTALREPYM

SEQ ID NO: 52525 - protein, 338 aa, Glycine max
  peptide (1)..(338): Ceres Seq. ID no. 15177330
  misc_feature (1)..(155): Pfam Name: Enoyl-CoA hydratase/isomerase family Pfam Description: Enoyl-CoA hydratase/isomerase family
  misc_feature (1)..(330): Homolog of NCBI NO: 15239206 NR Description: 3-hydroxyisobutyryl-coenzyme A hydrolase
  misc_feature (1)..(19): Homolog of NCBI NO: 11357284 NR Description: enoyl-CoA-hydratase-like protein - Arabidopsis
  misc_feature (219)..(335): Homolog of NCBI NO: 11357284 NR Description: enoyl-CoA-hydratase-like protein - Arabidopsis
  misc_feature (101)..(218): Homolog of NCBI NO: 11357284 NR Description: enoyl-CoA-hydratase-like protein - Arabidopsis
  misc_feature (4)..(121): Homolog of NCBI NO: 11357284 NR Description: enoyl-CoA-hydratase-like protein - Arabidopsis
  misc_feature (219)..(335): Homolog of NCBI NO: 30695218 NR Description: enoyl-CoA hydratase/isomerase family [Arabidopsis
  misc_feature (1)..(218): Homolog of NCBI NO: 30695218 NR Description: enoyl-CoA hydratase/isomerase family [Arabidopsis
  misc_feature (1)..(337): Homolog of NCBI NO: 7484947 NR Description: enoyl-CoA hydratase homolog F11C18.10 -
  misc_feature (1)..(338): Homolog of NCBI NO: 37536724 NR Description: putative enoyl-CoA-hydratase
  misc_feature (1)..(337): Homolog of NCBI NO: 22329062 NR Description: 3-hydroxyisobutyryl-coenzyme A hydrolase
MVARLKRLYDSWEENSDIGFVLMKGSGRAFCSGADVVRLYHSLNEGNTDEAEQFFKTLYSFVYLQGTYLKPHVAILDGITMVCGSGISLPGMFRVVTDKTVFSHPEAQIGFHPDAGASYVLSRLPGYLGEYLALTGDKLNGVEMIACRLATHYSLNARLSLLEERLGKLITDEPSVVESSLAQYGDLVYPDRSSVLHRIDTIDRCFSHETVEEIIEALEKEAAESNDEWYSTTLRRIREASPLSLKVTLQSIREGRFETLDKCLVREYRMSLRGISKHVSSDFFEGVRARMVDRDFAPKWDPPRLKDISEDMVEYYFSPLSEVQSELVLPTALREPYM

SEQ ID NO: 52526 - protein, 316 aa, Glycine max
  peptide (1)..(316): Ceres Seq. ID no. 15177331
  misc_feature (1)..(133): Pfam Name: Enoyl-CoA hydratase/isomerase family Pfam Description: Enoyl-CoA hydratase/isomerase family
  misc_feature (1)..(300): Homolog of NCBI NO: 15224549 NR Description: 3-hydroxyisobutyryl-coenzyme A hydrolase
  misc_feature (1)..(308): Homolog of NCBI NO: 15239206 NR Description: 3-hydroxyisobutyryl-coenzyme A hydrolase
  misc_feature (197)..(313): Homolog of NCBI NO: 11357284 NR Description: enoyl-CoA-hydratase-like protein - Arabidopsis
  misc_feature (79)..(196): Homolog of NCBI NO: 11357284 NR Description: enoyl-CoA-hydratase-like protein - Arabidopsis
  misc_feature (1)..(99): Homolog of NCBI NO: 11357284 NR Description: enoyl-CoA-hydratase-like protein - Arabidopsis
  misc_feature (197)..(313): Homolog of NCBI NO: 30695218 NR Description: enoyl-CoA hydratase/isomerase family [Arabidopsis
  misc_feature (1)..(196): Homolog of NCBI NO: 30695218 NR Description: enoyl-CoA hydratase/isomerase family [Arabidopsis
  misc_feature (1)..(315): Homolog of NCBI NO: 7484947 NR Description: enoyl-CoA hydratase homolog F11C18.10 -
  misc_feature (1)..(316): Homolog of NCBI NO: 37536724 NR Description: putative enoyl-CoA-hydratase
  misc_feature (1)..(315): Homolog of NCBI NO: 22329062 NR Description: 3-hydroxyisobutyryl-coenzyme A hydrolase
MKGSGRAFCSGADVVRLYHSLNEGNTDEAEQFFKTLYSFVYLQGTYLKPHVAILDGITMVCGSGISLPGMFRVVTDKTVFSHPEAQIGFHPDAGASYVLSRLPGYLGEYLALTGDKLNGVEMIACRLATHYSLNARLSLLEERLGKLITDEPSVVESSLAQYGDLVYPDRSSVLHRIDTIDRCFSHETVEEIIEALEKEAAESNDEWYSTTLRRIREASPLSLKVTLQSIREGRFETLDKCLVREYRMSLRGISKHVSSDFFEGVRARMVDRDFAPKWDPPRLKDISEDMVEYYFSPLSEVQSELVLPTALREPYM

SEQ ID NO: 52527 - DNA, 1426 bp, Glycine max
  misc_feature (1)..(1426): Ceres Seq. ID no. 14315223
attcagattagaaagtgagagtttggattctcaaagacagatattgagattttgcacacacagagagagagagagagagagagatgggaagagctccatgttgtgacaaggcaagtgttaagagagggccatggtccccagaagaagacacaaagctgaaggagtacatagagaagcatggaactggagggaattggattgctcttcctcagaaagctggacttaagagatgtggaaaaagttgtagattgagatggctcaactatctcaggcccaacattaagcatggagatttctcagatgaggaagacagaataatttgcagcctttatgttaatattggaagcaggtggtcaattatagctgctcagttaccaggaaggacagacaatgatattaagaactactggaacaccaagttgaagaaaaagctcatgggtttgcttcctctttctcatcacagaaaacaaccttcatttccatcctctacccttcaaaactctccaccctctccttcatctgaccaactttacggagagtactgcacctacacccccttaacaaccacatctttcacaagtaatattgaacccttttccctcccttcaagtaactacgcaagcacaagtacaacctcagtttctcactccttttaccagaaccaagactccatgcaacaatgctatcaccctacgagagacaacaacatgctcatgtttggaagcgaaggaagttgcagtacttcctctgacggaagctgcactcaaggcagagaaattatcaagcaagaagaaattggttaccacagctacaataatgattataactttatgcttaatcacagcaacaatattaatgatggagaaaagtcatgttttggtgagtggtttagccaaacactactaacaccgttggattatgatcttgaggatattaagcaattgattagtagcagcagtagcactgctagcttcaataatgttgatgaaaacaagacagaagagaaggccatgtactactactactactagtgcctgcaaactgatgatgatgactgaatctgactactggtaaaagatatgatgatggagaaagggtatgttaagttggtgtggcaaagattcagaaaaaaaaaaattgatgagatcttctggggttctgcgttctctgatgaaacatttcttgttttgacagtacatggtaaaagcttctcttatattttgtgcatatcttctcggaatgggtgatgatgatgaccacaacgacaaagaagaaaaagaagatgttgttagatttgttttttgttaagtattctctcctaatcagatattaatgttgtgaaaaaacactcaatgatcaattcaaattattttatatcagagattataattatatatataacatagtttagtgtgttataagtact

SEQ ID NO: 52528 - protein, 315 aa, Glycine max
  peptide (1)..(315): Ceres Seq. ID no. 14315224
  misc_feature (14)..(62): Pfam Name: Myb-like DNA-binding domain Pfam Description: Myb-like DNA-binding domain
  misc_feature (1)..(118): Homolog of NCBI NO: 15239158 NR Description: myb DNA-binding protein (MYB68) [Arabidopsis
  misc_feature (1)..(118): Homolog of NCBI NO: 11273952 NR Description: myb-related transcription factor MYB68
  misc_feature (1)..(119): Homolog of NCBI NO: 33773103 NR Description: P-type R2R3 Myb protein [Sorghum bicolor]
  misc_feature (1)..(119): Homolog of NCBI NO: 19073324 NR Description: typical P-type R2R3 Myb protein [Sorghum bicolor]
  misc_feature (1)..(129): Homolog of NCBI NO: 40253739 NR Description: putative P-type R2R3 Myb protein
  misc_feature (1)..(314): Homolog of NCBI NO: 15237193 NR Description: myb family transcription factor [Arabidopsis
  misc_feature (1)..(314): Homolog of NCBI NO: 15242793 NR Description: myb family transcription factor [Arabidopsis
  misc_feature (1)..(314): Homolog of NCBI NO: 11358686 NR Description: probable transcription factor MYB36
  misc_feature (1)..(313): Homolog of NCBI NO: 18419456 NR Description: blind [Lycopersicon esculentum]
  misc_feature (1)..(313): Homolog of NCBI NO: 15228049 NR Description: light-regulated myb protein, putative
MGRAPCCDKASVKRGPWSPEEDTKLKEYIEKHGTGGNWIALPQKAGLKRCGKSCRLRWLNYLRPNIKHGDFSDEEDRIICSLYVNIGSRWSIIAAQLPGRTDNDIKNYWNTKLKKKLMGLLPLSHHRKQPSFPSSTLQNSPPSPSSDQLYGEYCTYTPLTTTSFTSNIEPFSLPSSNYASTSTTSVSHSFYQNQDSMQQCYHPTRDNNMLMFGSEGSCSTSSDGSCTQGREIIKQEEIGYHSYNNDYNFMLNHSNNINDGEKSCFGEWFSQTLLTPLDYDLEDIKQLISSSSSTASFNNVDENKTEEKAMYYYYY

SEQ ID NO: 52529 - protein, 198 aa, Glycine max
  peptide (1)..(198): Ceres Seq. ID no. 14315225
  misc_feature (1)..(28): Homolog of NCBI NO: 15241132 NR Description: myb family transcription factor [Arabidopsis
  misc_feature (1)..(70): Homolog of NCBI NO: 19072760 NR Description: typical P-type R2R3 Myb protein [Oryza sativa]
  misc_feature (1)..(53): Homolog of NCBI NO: 15235710 NR Description: myb DNA-binding protein (AtMYB87) [Arabidopsis
  misc_feature (1)..(16): Homolog of NCBI NO: 34911254 NR Description: putative Myb-related transcription factor-l
  misc_feature (1)..(12): Homolog of NCBI NO: 40253739 NR Description: putative P-type R2R3 Myb protein
  misc_feature (1)..(197): Homolog of NCBI NO: 15237193 NR Description: myb family transcription factor [Arabidopsis
  misc_feature (1)..(197): Homolog of NCBI NO: 15242793 NR Description: myb family transcription factor [Arabidopsis
  misc_feature (1)..(197): Homolog of NCBI NO: 11358686 NR Description: probable transcription factor MYB36
  misc_feature (1)..(196): Homolog of NCBI NO: 18419456 NR Description: blind [Lycopersicon esculentum]
  misc_feature (1)..(196): Homolog of NCBI NO: 15228049 NR Description: light-regulated myb protein, putative
MGLLPLSHHRKQPSFPSSTLQNSPPSPSSDQLYGEYCTYTPLTTTSFTSNIEPFSLPSSNYASTSTTSVSHSFYQNQDSMQQCYHPTRDNNMLMFGSEGSCSTSSDGSCTQGREIIKQEEIGYHSYNNDYNFMLNHSNNINDGEKSCFGEWFSQTLLTPLDYDLEDIKQLISSSSSTASFNNVDENKTEEKAMYYYYY

SEQ ID NO: 52530 - DNA, 874 bp, Glycine max
  misc_feature (1)..(874): Ceres Seq. ID no. 14315297
atctgttaaatgtaactgctccaatcagatgctatcatatctgtgagattatatacagataagcttccacaatgaattgaagggctagctattccgttttcataaagtagggaaagagatcgatcttcttcttcatctttcttctccttttctattcttggtttcttcttttagaaatgaacgtgaagggtatcatggatggtaaaattgaagctgggaacaccaattgtattgttaaggaggatgtgaatgatgattcgatatccattggatcagtatcagaagattcaatgaactctgtgtgttcatcttcttcatcagaattggctgaggatgcatcatcctcttcagcatcttatttgtcaacctcatcatcgcattcaaacggccctttgtttgaactatcagagctaatgagtcaactccctatcaagagaggcttgtctatgttttatcaagggaaggctcagtctttcagttctctagcaagcgtggagagcataggggatcttcctaagaagaaagagagattttacaggaagaaaatgaaatcatgcaaaagcttcgcgggaggcttggatagcagccacagaatatcgttcgctccaaaggctacaatatcaaagaaatcttcgagagcaacttttgtatccgtgctaactaaaagagggagtttccttggaggctccagaacttccttttctgtacagaagaacttttgatatccaaccttgttaattagagcttagttaatatttcatgcacaaaatagggaaaattttgagtccctcaccttcagcttttctcacacgaagaagtcatgtcatattgtttattggtaaataattaatatacatatgattcattaattagt

SEQ ID NO: 52531 - protein, 181 aa, Glycine max
  peptide (1)..(181): Ceres Seq. ID no. 14315298
  misc_feature (22)..(139): Homolog of NCBI NO: 20159729 NR Description: unknown cold induced protein [Deschampsia
  misc_feature (22)..(152): Homolog of NCBI NO: 34909358 NR Description: P0638D12.11 [Oryza sativa (japonica
  misc_feature (19)..(132): Homolog of NCBI NO: 38346806 NR Description: OSJNBa0088A01.13 [Oryza sativa (japonica
  misc_feature (1)..(164): Homolog of NCBI NO: 15241248 NR Description: expressed protein [Arabidopsis thaliana]
MNVKGIMDGKIEAGNTNCIVKEDVNDDSISIGSVSEDSMNSVCSSSSSELAEDASSSSASYLSTSSSHSNGPLFELSELMSQLPIKRGLSMFYQGKAQSFSSLASVESIGDLPKKKERFYRKKMKSCKSFAGGLDSSHRISFAPKATISKKSSRATFVSVLTKRGSFLGGSRTSFSVQKNF

SEQ ID NO: 52532 - protein, 175 aa, Glycine max
  peptide (1)..(175): Ceres Seq. ID no. 14315299
  misc_feature (16)..(133): Homolog of NCBI NO: 20159729 NR Description: unknown cold induced protein [Deschampsia
  misc_feature (16)..(146): Homolog of NCBI NO: 34909358 NR Description: P0638D12.11 [Oryza sativa (japonica
  misc_feature (13)..(126): Homolog of NCBI NO: 38346806 NR Description: OSJNBa0088A01.13 [Oryza sativa (japonica
  misc_feature (1)..(158): Homolog of NCBI NO: 15241248 NR Description: expressed protein [Arabidopsis thaliana]
MDGKIEAGNTNCIVKEDVNDDSISIGSVSEDSMNSVCSSSSSELAEDASSSSASYLSTSSSHSNGPLFELSELMSQLPIKRGLSMFYQGKAQSFSSLASVESIGDLPKKKERFYRKKMKSCKSFAGGLDSSHRISFAPKATISKKSSRATFVSVLTKRGSFLGGSRTSFSVQKNF

SEQ ID NO: 52533 - protein, 143 aa, Glycine max
  peptide (1)..(143): Ceres Seq. ID no. 14315300
  misc_feature (1)..(101): Homolog of NCBI NO: 20159729 NR Description: unknown cold induced protein [Deschampsia
  misc_feature (1)..(114): Homolog of NCBI NO: 34909358 NR Description: P0638D12.11 [Oryza sativa (japonica
  misc_feature (1)..(94): Homolog of NCBI NO: 38346806 NR Description: OSJNBa0088A01.13 [Oryza sativa (japonica
  misc_feature (1)..(126): Homolog of NCBI NO: 15241248 NR Description: expressed protein [Arabidopsis thaliana]
MNSVCSSSSSELAEDASSSSASYLSTSSSHSNGPLFELSELMSQLPIKRGLSMFYQGKAQSFSSLASVESIGDLPKKKERFYRKKMKSCKSFAGGLDSSHRISFAPKATISKKSSRATFVSVLTKRGSFLGGSRTSFSVQKNF

SEQ ID NO: 52534 - DNA, 1665 bp, Glycine max
  misc_feature (1)..(1665): Ceres Seq. ID no. 14315279
atagaatttctgaaacaaagaatcttccctctatttctccccaattttccatcaccatttttcctcaaatttctcttcttcttcatccagaaaatgaatcccaatcccaacaccaacgatttccctctcctctcccaccttcttaaccaccttgatccccaaacacacccacccctccccgcagagctagaccaatctctattaacccaattccctcacttgaaccaccccagcgtgttatcctcactcgcccgtcacgcctccaccctcaacgtcacccccacactctccctcctccgcaccctcggcccccgcccagacccctccgctgtcgccgccgcccgcgccaggatcgccgacccccacgcgcgcgaggacggcggcgaggcccacgtggtccacgcgctggtgcgcgtggacgacacgcacgaggagtgcgtgaagcagctgagagcctccgagaaaaagctcctcgaggcctatgctgaatcggtgaaaggggtcgttgaagaagtgagcgaaggagtggttagggtattgaagaaagcggagagtgaggaagtggaaagggttgatctctctgggtcccacttgaggattctccccgaagcgttcgggaagattcgtggcctcgttgtgcttaatttgtctcagaatcagttagaggtgattcctgattcaatagcaggactacagaggcttgtggagctggatgtttcatctaatgttttagagtccctacctgactctattggattgttggttaatctgaagatctttaatgtgtcagcaaacaagctaactgctcttcctgaatccattgctctttgcaggtcactagtcgaattggatgcaagctttaacaacttaatgtgtctgccaacgaacatgggttttggacttgttaaccttgagaagctcttgatccatttgaacaagatacgatttcttcccgcctccattggagaaatgaaatctctcaggcatcttgatgttcatttcaatgagcttcatggcctacctcaatccattgggaaactcacaaatctggaatatctgaatgttagcagtaactttagtgacatgacagagctacctgaaacacttggtgatctggtcaacttaagggagcttgacctcagcaacaaccaaatccgagctcttccttactcgttcggtaggcttgaaaaattgacaaagctcaacctggaccagaatccaatcatagttcccccaattgaggttgtaaatcaaggggctgaggctgtgaaggagttcatggccaagtggtggctcgatctcattgaagaagctcaacagaaaagcatgtccgaaacacaaaatcagcaagcacagacaggatggctcgcatggggagcctcattgttgaataatgttgctgaagtttctgaaagtgttgcagaatattttggcgctaaaaaagctcctagagacccatggttggatcaacagctgtgatacaagaatatctggactctgcctacatacactgggtttataatttcgtgggatgtatagtttgtgatatagcttttggactcttgttaccactgtaatcaatacttttgtttttcatcttttttttttttttttacttgcagttatacttacacggtataatttgtttggcattactgtctgatc

SEQ ID NO: 52535 - protein, 492 aa, Glycine max
  peptide (1)..(492): Ceres Seq. ID no. 14315280
  misc_feature (184)..(429): Homolog of NCBI NO: 15224761 NR Description: leucine-rich-repeat protein -related [Arabidopsis
  misc_feature (41)..(412): Homolog of NCBI NO: 25518616 NR Description: hypothetical protein F13K23.23 - Arabidopsis
  misc_feature (167)..(492): Homolog of NCBI NO: 25518616 NR Description: hypothetical protein F13K23.23 - Arabidopsis
  misc_feature (129)..(458): Homolog of NCBI NO: 7489337 NR Description: leucine-rich protein - common sunflower
  misc_feature (200)..(492): Homolog of NCBI NO: 12321872 NR Description: hypothetical protein; 91861-89496 [Arabidopsis
  misc_feature (104)..(491): Homolog of NCBI NO: 38605760 NR Description: OSJNBa0044K18.1 [Oryza sativa (japonica
  misc_feature (27)..(492): Homolog of NCBI NO: 22330985 NR Description: leucine rich repeat protein-related [Arabidopsis
  misc_feature (135)..(492): Homolog of NCBI NO: 15239256 NR Description: expressed protein [Arabidopsis thaliana]
  misc_feature (41)..(492): Homolog of NCBI NO: 30688342 NR Description: leucine rich repeat protein family [Arabidopsis
  misc_feature (41)..(492): Homolog of NCBI NO: 18391461 NR Description: leucine rich repeat protein-related [Arabidopsis
IEFLKQRIFPLFLPNFPSPFFLKFLFFFIQKMNPNPNTNDFPLLSHLLNHLDPQTHPPLPAELDQSLLTQFPHLNHPSVLSSLARHASTLNVTPTLSLLRTLGPRPDPSAVAAARARIADPHAREDGGEAHVVHALVRVDDTHEECVKQLRASEKKLLEAYAESVKGVVEEVSEGVVRVLKKAESEEVERVDLSGSHLRILPEAFGKIRGLVVLNLSQNQLEVIPDSIAGLQRLVELDVSSNVLESLPDSIGLLVNLKIFNVSANKLTALPESIALCRSLVELDASFNNLMCLPTNMGFGLVNLEKLLIHLNKIRFLPASIGEMKSLRHLDVHFNELHGLPQSIGKLTNLEYLNVSSNFSDMTELPETLGDLVNLRELDLSNNQIRALPYSFGRLEKLTKLNLDQNPIIVPPIEVVNQGAEAVKEFMAKWWLDLIEEAQQKSMSETQNQQAQTGWLAWGASLLNNVAEVSESVAEYFGAKKAPRDPWLDQQL

SEQ ID NO: 52536 - protein, 461 aa, Glycine max
  peptide (1)..(461): Ceres Seq. ID no. 14315281
  misc_feature (153)..(398): Homolog of NCBI NO: 15224761 NR Description: leucine-rich-repeat protein -related [Arabidopsis
  misc_feature (10)..(381): Homolog of NCBI NO: 25518616 NR Description: hypothetical protein F13K23.23 - Arabidopsis
  misc_feature (136)..(461): Homolog of NCBI NO: 25518616 NR Description: hypothetical protein F13K23.23 - Arabidopsis
  misc_feature (98)..(427): Homolog of NCBI NO: 7489337 NR Description: leucine-rich protein - common sunflower
  misc_feature (169)..(461): Homolog of NCBI NO: 12321872 NR Description: hypothetical protein; 91861-89496 [Arabidopsis
  misc_feature (73)..(460): Homolog of NCBI NO: 38605760 NR Description: OSJNBa0044K18.1 [Oryza sativa (japonica
  misc_feature (1)..(461): Homolog of NCBI NO: 22330985 NR Description: leucine rich repeat protein-related [Arabidopsis
  misc_feature (104)..(461): Homolog of NCBI NO: 15239256 NR Description: expressed protein [Arabidopsis thaliana]
  misc_feature (10)..(461): Homolog of NCBI NO: 30688342 NR Description: leucine rich repeat protein family [Arabidopsis
  misc_feature (10)..(461): Homolog of NCBI NO: 18391461 NR Description: leucine rich repeat protein-related [Arabidopsis
MNPNPNTNDFPLLSHLLNHLDPQTHPPLPAELDQSLLTQFPHLNHPSVLSSLARHASTLNVTPTLSLLRTLGPRPDPSAVAAARARIADPHAREDGGEAHVVHALVRVDDTHEECVKQLRASEKKLLEAYAESVKGVVEEVSEGVVRVLKKAESEEVERVDLSGSHLRILPEAFGKIRGLVVLNLSQNQLEVIPDSIAGLQRLVELDVSSNVLESLPDSIGLLVNLKIFNVSANKLTALPESIALCRSLVELDASFNNLMCLPTNMGFGLVNLEKLLIHLNKIRFLPASIGEMKSLRHLDVHFNELHGLPQSIGKLTNLEYLNVSSNFSDMTELPETLGDLVNLRELDLSNNQIRALPYSFGRLEKLTKLNLDQNPIIVPPIEVVNQGAEAVKEFMAKWWLDLIEEAQQKSMSETQNQQAQTGWLAWGASLLNNVAEVSESVAEYFGAKKAPRDPWLDQQL

SEQ ID NO: 52537 - DNA, 1585 bp, Glycine max
  misc_feature (1)..(1585): Ceres Seq. ID no. 14315301
ttttgagtgctatgttcaatttttatgaaacttatcaatattggaatctattttatttggtcatgattcttttggttattgttctgatccggaacttagtgtatgaggaatgaggatagctgcaattttttgctgttttttgtaacttttgattctgatgcaaatgctgcattctgtttccaaaagtaaacctgcgacttggctgtaaactttcaataagatgtagagaattgggtatttgtatcaatgaatgtgtatactgccccttaatattgattgtcatttgtcttggttagatactaagatgtacagaaatgttctaattgtactgtagtggagacttttccattgttaataacaacaatgaagccttatcccacaagatgagttcaactacatagatcgcacaatgacatttggcttggttaaagaccaaatcttcacagatagcaacattatattcgggtgctgatgcagtggctctaactcatttgacacagtactgtagccatatacaacactttacttctggataacaacctagcattagcaaaaatctgttgtgtgtgatccatgtcccgtatatcgacaagttttatgttaactgcctagagcctgatacaatcctcctcctttacttgggcttgggactggctatgaaactataggcggtgttactttttcattgttaatgtttcatataatttcaagctcatgaatttgaatgtttcttgaccctccaaatataatagttgatcacaagagaatactttgtctaatttgtaatttagtttatgtcattctgcactgttaaggttggttgctttagattttaatttttcattgtttactgatagccagaacatcatgttaatgaccctgaatccgatcctgttcttcttgatgcaatccctactttgaagttcaaccaagaggctttcagttcccttgaacacacacagtgtgtaatatgtttggcagattacagagaaagagaagtattgcgcatcatgcccaaatgtggccacacttttcatctttcttgcattgatatatggctgaggaaacaatccacctgtccagtatgccgtctgccattgaaaaactcttccgaaacgaaacatgtgagacctgtgacatttaccatgagccaatcccttgacgagtctcacacatcagacagaaacgatgatattgagagatatgttgaacctacacctactgcagccagtaactctttacaaccaacttcaggagaacaagaagcaaggcaatgatcttagagaactaaaggggttgttctgctcaaaaagagaagaatgtagaatttctgcttctatagaggaatgcttctaattatagattggattcaaattctttgtctgtaatatggccttcatattcacttggtggtgtaaatatgtttccttttgtagcatatgcgggccaaggttttggtggaatttcttgcataccgatttgaagttcttttgtctatggtatcgcttactctagcaagcacactgctcttgttaatgcttaacagattaaacaaatggttgattacatattttttttcttgtac

SEQ ID NO: 52538 - protein, 88 aa, Glycine max
  peptide (1)..(88): Ceres Seq. ID no. 14315302
  misc_feature (1)..(63): Homolog of NCBI NO: 15242855 NR Description: zinc finger (C3HC4-type RING finger) protein
  misc_feature (1)..(63): Homolog of NCBI NO: 19698827 NR Description: unknown protein [Arabidopsis thaliana]
  misc_feature (1)..(88): Homolog of NCBI NO: 15234955 NR Description: zinc finger (C3HC4-type RING finger) protein
  misc_feature (1)..(88): Homolog of NCBI NO: 15231830 NR Description: zinc finger (C3HC4-type RING finger) protein
  misc_feature (1)..(38): Homolog of NCBI NO: 15234956 NR Description: zinc finger (C3HC4-type RING finger) protein
  misc_feature (1)..(76): Homolog of NCBI NO: 4928401 NR Description: RING-H2 zinc finger protein ATL5 [Arabidopsis
  misc_feature (1)..(63): Homolog of NCBI NO: 18418241 NR Description: zinc finger (C3HC4-type RING finger) protein
  misc_feature (1)..(76): Homolog of NCBI NO: 12003386 NR Description: Avr9/Cf-9 rapidly elicited protein 132 [Nicotiana
  misc_feature (1)..(76): Homolog of NCBI NO: 15228830 NR Description: RING-H2 zinc finger protein ATL5 [Arabidopsis
  misc_feature (1)..(53): Homolog of NCBI NO: 38567907 NR Description: OSJNBa0088I22.3 [Oryza sativa (japonica
MPKCGHTFHLSCIDIWLRKQSTCPVCRLPLKNSSETKHVRPVTFTMSQSLDESHTSDRNDDIERYVEPTPTAASNSLQPTSGEQEARQ

SEQ ID NO: 52539 - protein, 55 aa, Glycine max
  peptide (1)..(55): Ceres Seq. ID no. 14315303
MILRDMLNLHLLQPVTLYNQLQENKKQGNDLRELKGLFCSKREECRISASIEECF

SEQ ID NO: 52540 - protein, 50 aa, Glycine max
  peptide (1)..(50): Ceres Seq. ID no. 14315304
MLNLHLLQPVTLYNQLQENKKQGNDLRELKGLFCSKREECRISASIEECF

SEQ ID NO: 52541 - DNA, 679 bp, Glycine max
  misc_feature (1)..(679): Ceres Seq. ID no. 14315294
aaaaaaattcatccccatcaaaacacaagcaaatcctaaaaagttgattgagatatatagaaactagcttcaatttcacaaaatgaagaaagtgtttgtcacatttttagctgtgctagttgtatttgttcttacagcgaaagcttcagaggcacgactaccagttaaaacaaattcagcatcaaatgactacaattgttcacaagtctataacctgttagtttcgtgcgtagattacatgattggtggagatgatggtgccccttcaggtgtttgttgccaaagtgttaatgcagtgaaagcatcagcaccaacacaaattcaacgaatggctgcatgtaagtgctttttcgacgtagcaactcgccttccttccttgctcgaaaacaaggccaattcacttcctaaattatgtggtgttgatttgggttttatcatgagcaagcagaacaccaattgtaacaatgttcctgtaagctcaaggcaagggagagattagtacaataaaattgatgcatgtttggaagtttctttcttcttgaaaaaagaaaataaaatggtttgttgaatatacaagcgtttcatgttggaaataataatgagtggatattttctaaatgtgttcttattcatatgcatcttcatcatatagattaatatataatgtttaattaagtcg

SEQ ID NO: 52542 - protein, 138 aa, Glycine max
  peptide (1)..(138): Ceres Seq. ID no. 14315295
  misc_feature (39)..(126): Pfam Name: Protease inhibitor/seed storage/LTP family Pfam Description: Protease inhibitor/seed storage/LTP family
  misc_feature (27)..(129): Homolog of NCBI NO: 2497739 NR Description: NONSPECIFIC LIPID-TRANSFER PROTEIN B PRECURSOR
  misc_feature (33)..(129): Homolog of NCBI NO: 11095210 NR Description: lipid transfer protein 3 precursor [Gossypium
  misc_feature (9)..(129): Homolog of NCBI NO: 2497756 NR Description: NONSPECIFIC LIPID-TRANSFER PROTEIN 2 PRECURSOR
  misc_feature (33)..(129): Homolog of NCBI NO: 11273807 NR Description: lipid transfer protein precursor [imported] -
  misc_feature (27)..(129): Homolog of NCBI NO: 2497740 NR Description: Nonspecific lipid-transfer protein D precursor
  misc_feature (27)..(129): Homolog of NCBI NO: 2497737 NR Description: NONSPECIFIC LIPID-TRANSFER PROTEIN 3 PRECURSOR
  misc_feature (38)..(129): Homolog of NCBI NO: 128380 NR Description: NONSPECIFIC LIPID-TRANSFER PROTEIN B (NS-LTP B)
  misc_feature (39)..(127): Homolog of NCBI NO: 22329114 NR Description: protease inhibitor/seed storage/lipid transfer
  misc_feature (26)..(129): Homolog of NCBI NO: 34904060 NR Description: P0489G09.18 [Oryza sativa (japonica
  misc_feature (38)..(129): Homolog of NCBI NO: 128378 NR Description: NONSPECIFIC LIPID-TRANSFER PROTEIN A (NS-LTP A)
MKKVFVTFLAVLVVFVLTAKASEARLPVKTNSASNDYNCSQVYNLLVSCVDYMIGGDDGAPSGVCCQSVNAVKASAPTQIQRMAACKCFFDVATRLPSLLENKANSLPKLCGVDLGFIMSKQNTNCNNVPVSSRQGRD

SEQ ID NO: 52543 - protein, 86 aa, Glycine max
  peptide (1)..(86): Ceres Seq. ID no. 14315296
  misc_feature (1)..(74): Pfam Name: Protease inhibitor/seed storage/LTP family Pfam Description: Protease inhibitor/seed storage/LTP family
  misc_feature (1)..(77): Homolog of NCBI NO: 2497739 NR Description: NONSPECIFIC LIPID-TRANSFER PROTEIN B PRECURSOR
  misc_feature (1)..(77): Homolog of NCBI NO: 11095210 NR Description: lipid transfer protein 3 precursor [Gossypium
  misc_feature (1)..(77): Homolog of NCBI NO: 2497756 NR Description: NONSPECIFIC LIPID-TRANSFER PROTEIN 2 PRECURSOR
  misc_feature (1)..(77): Homolog of NCBI NO: 11273807 NR Description: lipid transfer protein precursor [imported] -
  misc_feature (1)..(77): Homolog of NCBI NO: 2497740 NR Description: Nonspecific lipid-transfer protein D precursor
  misc_feature (1)..(77): Homolog of NCBI NO: 2497737 NR Description: NONSPECIFIC LIPID-TRANSFER PROTEIN 3 PRECURSOR
  misc_feature (1)..(77): Homolog of NCBI NO: 128380 NR Description: NONSPECIFIC LIPID-TRANSFER PROTEIN B (NS-LTP B)
  misc_feature (1)..(75): Homolog of NCBI NO: 22329114 NR Description: protease inhibitor/seed storage/lipid transfer
  misc_feature (1)..(77): Homolog of NCBI NO: 34904060 NR Description: P0489G09.18 [Oryza sativa (japonica
  misc_feature (1)..(77): Homolog of NCBI NO: 128378 NR Description: NONSPECIFIC LIPID-TRANSFER PROTEIN A (NS-LTP A)
MIGGDDGAPSGVCCQSVNAVKASAPTQIQRMAACKCFFDVATRLPSLLENKANSLPKLCGVDLGFIMSKQNTNCNNVPVSSRQGRD

SEQ ID NO: 52544 - DNA, 648 bp, Glycine max
  misc_feature (1)..(648): Ceres Seq. ID no. 14305657
tccacagaaaaaaaaccctaaagagaccttctccatttccaaaccggcggcgaaaatgaagtacaacccaagagtcacctcctcccgcaggaagaaccgcaaggctcacttcacagcctcctcaagcgagaggcgcgtcatcatgagctcccctctctccaccgaccttcgcgccaagtacaacgtcagatccatgcccatccgcaaggacgacgaggtccagatcgtccgcgggacctacaagggacgcgaaggaaaggtcgtgcaggtgtaccgtcgcaagtgggtgattcacatcgagaggatcacgagggagaaggtgaacggcaccaccgtgaacgtcggcgtgcagccgtcgaaggttgtgataacgaagctgaggttggataaggacaggaagtcgcttttggagaggaaggccaagggccgtgccgcggcggataaggacaaggggaccaagttcactgctgaggatgttatgcagaacgttgattaaacacaaggtttattatctttttagttttttattatcagcgagtactctcttggctttgagttttgttttgtcggatgttatatttatgtttcggacatgagaaggatcgtttcaatttcgattatgagtttgaagatttagccattttcttc

SEQ ID NO: 52545 - protein, 164 aa, Glycine max
  peptide (1)..(164): Ceres Seq. ID no. 14305658
  misc_feature (67)..(100): Pfam Name: KOW motif Pfam Description: KOW motif
  misc_feature (19)..(157): Homolog of NCBI NO: 7705813 NR Description: ribosomal protein L26-like 1
  misc_feature (15)..(157): Homolog of NCBI NO: 31207009 NR Description: ENSANGP00000022122 [Anopheles gambiae]
  misc_feature (19)..(159): Homolog of NCBI NO: 15293919 NR Description: ribosomal protein L26 [Ictalurus punctatus]
  misc_feature (19)..(159): Homolog of NCBI NO: 4506621 NR Description: ribosomal protein L26; 60S ribosomal protein L26
  misc_feature (19)..(159): Homolog of NCBI NO: 132827 NR Description: 60S RIBOSOMAL PROTEIN L26
  misc_feature (19)..(137): Homolog of NCBI NO: 3747050 NR Description: ribosomal protein L26 [Zea mays]
  misc_feature (19)..(159): Homolog of NCBI NO: 34895672 NR Description: putative ribosomal protein L26
  misc_feature (19)..(164): Homolog of NCBI NO: 15240766 NR Description: 60S ribosomal protein L26 (RPL26B) [Arabidopsis
  misc_feature (19)..(163): Homolog of NCBI NO: 3914740 NR Description: 60S ribosomal protein L26
  misc_feature (19)..(164): Homolog of NCBI NO: 15229631 NR Description: 60S ribosomal protein L26 (RPL26A) [Arabidopsis
PQKKNPKETFSISKPAAKMKYNPRVTSSRRKNRKAHFTASSSERRVIMSSPLSTDLRAKYNVRSMPIRKDDEVQIVRGTYKGREGKVVQVYRRKWVIHIERITREKVNGTTVNVGVQPSKVVITKLRLDKDRKSLLERKAKGRAAADKDKGTKFTAEDVMQNVD

SEQ ID NO: 52546 - protein, 146 aa, Glycine max
  peptide (1)..(146): Ceres Seq. ID no. 14305659
  misc_feature (49)..(82): Pfam Name: KOW motif Pfam Description: KOW motif
  misc_feature (1)..(139): Homolog of NCBI NO: 7705813 NR Description: ribosomal protein L26-like 1
  misc_feature (1)..(139): Homolog of NCBI NO: 31207009 NR Description: ENSANGP00000022122 [Anopheles gambiae]
  misc_feature (1)..(141): Homolog of NCBI NO: 15293919 NR Description: ribosomal protein L26 [Ictalurus punctatus]
  misc_feature (1)..(141): Homolog of NCBI NO: 4506621 NR Description: ribosomal protein L26; 60S ribosomal protein L26
  misc_feature (1)..(141): Homolog of NCBI NO: 132827 NR Description: 60S RIBOSOMAL PROTEIN L26
  misc_feature (1)..(119): Homolog of NCBI NO: 3747050 NR Description: ribosomal protein L26 [Zea mays]
  misc_feature (1)..(141): Homolog of NCBI NO: 34895672 NR Description: putative ribosomal protein L26
  misc_feature (1)..(146): Homolog of NCBI NO: 15240766 NR Description: 60S ribosomal protein L26 (RPL26B) [Arabidopsis
  misc_feature (1)..(145): Homolog of NCBI NO: 3914740 NR Description: 60S ribosomal protein L26
  misc_feature (1)..(146): Homolog of NCBI NO: 15229631 NR Description: 60S ribosomal protein L26 (RPL26A) [Arabidopsis
MKYNPRVTSSRRKNRKAHFTASSSERRVIMSSPLSTDLRAKYNVRSMPIRKDDEVQIVRGTYKGREGKVVQVYRRKWVIHIERITREKVNGTTVNVGVQPSKVVITKLRLDKDRKSLLERKAKGRAAADKDKGTKFTAEDVMQNVD

SEQ ID NO: 52547 - protein, 117 aa, Glycine max
  peptide (1)..(117): Ceres Seq. ID no. 14305660
  misc_feature (20)..(53): Pfam Name: KOW motif Pfam Description: KOW motif
  misc_feature (1)..(110): Homolog of NCBI NO: 7705813 NR Description: ribosomal protein L26-like 1
  misc_feature (1)..(110): Homolog of NCBI NO: 31207009 NR Description: ENSANGP00000022122 [Anopheles gambiae]
  misc_feature (1)..(112): Homolog of NCBI NO: 15293919 NR Description: ribosomal protein L26 [Ictalurus punctatus]
  misc_feature (1)..(112): Homolog of NCBI NO: 4506621 NR Description: ribosomal protein L26; 60S ribosomal protein L26
  misc_feature (1)..(112): Homolog of NCBI NO: 132827 NR Description: 60S RIBOSOMAL PROTEIN L26
  misc_feature (1)..(90): Homolog of NCBI NO: 3747050 NR Description: ribosomal protein L26 [Zea mays]
  misc_feature (1)..(112): Homolog of NCBI NO: 34895672 NR Description: putative ribosomal protein L26
  misc_feature (1)..(117): Homolog of NCBI NO: 15240766 NR Description: 60S ribosomal protein L26 (RPL26B) [Arabidopsis
  misc_feature (1)..(116): Homolog of NCBI NO: 3914740 NR Description: 60S ribosomal protein L26
  misc_feature (1)..(117): Homolog of NCBI NO: 15229631 NR Description: 60S ribosomal protein L26 (RPL26A) [Arabidopsis
MSSPLSTDLRAKYNVRSMPIRKDDEVQIVRGTYKGREGKVVQVYRRKWVIHIERITREKVNGTTVNVGVQPSKVVITKLRLDKDRKSLLERKAKGRAAADKDKGTKFTAEDVMQNVD

SEQ ID NO: 52548 - DNA, 925 bp, Glycine max
  misc_feature (1)..(925): Ceres Seq. ID no. 14305649
tccctttgcccgaaaatttcagcctaatcagcaaaatagatagagcattgcagcgaccctctcctatgcttcatccttctgtctctcatcccatgtgaaggttcaatggtcactaagctagttcagccaccaatgacagattcccatgtgagtcctctcatttatagaaccatgaatgtcatgaagctccaaaattttgtcccagctagaaatcatccaagaataaacacctcaagatttggtgagagaccattatggtttagacccattacaatcattaaagttgcagaacacaattctggctcaggcttagttgagcttgaagcacttgctcagaagaaaagagagctttaccaggcggtggaaggaatcaataggggaattttcggaatcccatctaccaagaaatctgaaattgaaagtttggtgaagcagctagaatctctgaatcctactccattcccaactctagaactggagaaggtggctgggtgctggaggcttgtttacagtacaatctccattttgggatcaaagaggaccaagttaggcctcagagattttatctcattggatgatttttttcagtcgattgatatatccaagagcaaagcagttaatgtgataaagttcagtgcaaggggattgagtttgttgtctggacaacttagtattgaggcctctttcaggatttcttcctcaacaagggttgacattaatttcgaaaactcaacgatcactcctgaccggttgatgaatgtatttcggaaaaattatgatcttttgttgggcgtcttcaatccagagggatggctggaaatcacatatgttgatgaaactatgagaataggaagggacgacaaaagcaatatctttgtactggaaagatttgatgataataataacatgtagccactttccttcc

SEQ ID NO: 52549 - protein, 268 aa, Glycine max
  peptide (1)..(268): Ceres Seq. ID no. 14305650
  misc_feature (79)..(200): Pfam Name: PAP_fibrillin Pfam Description: PAP_fibrillin
  misc_feature (232)..(259): Homolog of NCBI NO: 29367475 NR Description: fibrillin-like protein [Oryza sativa (japonica
  misc_feature (75)..(232): Homolog of NCBI NO: 29367475 NR Description: fibrillin-like protein [Oryza sativa (japonica
  misc_feature (79)..(261): Homolog of NCBI NO: 5020103 NR Description: fibrillin [Nostoc sp. PCC 8009]
  misc_feature (79)..(261): Homolog of NCBI NO: 23126201 NR Description: hypothetical protein [Nostoc punctiforme]
  misc_feature (78)..(261): Homolog of NCBI NO: 17231810 NR Description: fibrillin [Nostoc sp. PCC 7120]
  misc_feature (72)..(261): Homolog of NCBI NO: 16329838 NR Description: fibrillin [Synechocystis sp. PCC 6803]
  misc_feature (79)..(261): Homolog of NCBI NO: 22297962 NR Description: fibrillin [Thermosynechococcus elongatus BP-1]
  misc_feature (1)..(200): Homolog of NCBI NO: 9758960 NR Description: gene_id:MYH9.3~pir||S75332~similar to unknown
  misc_feature (74)..(241): Homolog of NCBI NO: 32489298 NR Description: OSJNBa0028I23.21 [Oryza sativa (japonica
  misc_feature (1)..(263): Homolog of NCBI NO: 30682868 NR Description: plastid-lipid associated protein PAP/fibrillin
MVTKLVQPPMTDSHVSPLIYRTMNVMKLQNFVPARNHPRINTSRFGERPLWFRPITIIKVAEHNSGSGLVELEALAQKKRELYQAVEGINRGIFGIPSTKKSEIESLVKQLESLNPTPFPTLELEKVAGCWRLVYSTISILGSKRTKLGLRDFISLDDFFQSIDISKSKAVNVIKFSARGLSLLSGQLSIEASFRISSSTRVDINFENSTITPDRLMNVFRKNYDLLLGVFNPEGWLEITYVDETMRIGRDDKSNIFVLERFDDNNNM

SEQ ID NO: 52550 - protein, 259 aa, Glycine max
  peptide (1)..(259): Ceres Seq. ID no. 14305651
  misc_feature (70)..(191): Pfam Name: PAP_fibrillin Pfam Description: PAP_fibrillin
  misc_feature (223)..(250): Homolog of NCBI NO: 29367475 NR Description: fibrillin-like protein [Oryza sativa (japonica
  misc_feature (66)..(223): Homolog of NCBI NO: 29367475 NR Description: fibrillin-like protein [Oryza sativa (japonica
  misc_feature (70)..(252): Homolog of NCBI NO: 5020103 NR Description: fibrillin [Nostoc sp. PCC 8009]
  misc_feature (70)..(252): Homolog of NCBI NO: 23126201 NR Description: hypothetical protein [Nostoc punctiforme]
  misc_feature (69)..(252): Homolog of NCBI NO: 17231810 NR Description: fibrillin [Nostoc sp. PCC 7120]
  misc_feature (63)..(252): Homolog of NCBI NO: 16329838 NR Description: fibrillin [Synechocystis sp. PCC 6803]
  misc_feature (70)..(252): Homolog of NCBI NO: 22297962 NR Description: fibrillin [Thermosynechococcus elongatus BP-1]
  misc_feature (1)..(191): Homolog of NCBI NO: 9758960 NR Description: gene_id:MYH9.3~pir||S75332~similar to unknown
  misc_feature (65)..(232): Homolog of NCBI NO: 32489298 NR Description: OSJNBa0028I23.21 [Oryza sativa (japonica
  misc_feature (1)..(254): Homolog of NCBI NO: 30682868 NR Description: plastid-lipid associated protein PAP/fibrillin
MTDSHVSPLIYRTMNVMKLQNFVPARNHPRINTSRFGERPLWFRPITIIKVAEHNSGSGLVELEALAQKKRELYQAVEGINRGIFGIPSTKKSEIESLVKQLESLNPTPFPTLELEKVAGCWRLVYSTISILGSKRTKLGLRDFISLDDFFQSIDISKSKAVNVIKFSARGLSLLSGQLSIEASFRISSSTRVDINFENSTITPDRLMNVFRKNYDLLLGVFNPEGWLEITYVDETMRIGRDDKSNIFVLERFDDNNNM

SEQ ID NO: 52551 - protein, 246 aa, Glycine max
  peptide (1)..(246): Ceres Seq. ID no. 14305652
  misc_feature (57)..(178): Pfam Name: PAP_fibrillin Pfam Description: PAP_fibrillin
  misc_feature (210)..(237): Homolog of NCBI NO: 29367475 NR Description: fibrillin-like protein [Oryza sativa (japonica
  misc_feature (53)..(210): Homolog of NCBI NO: 29367475 NR Description: fibrillin-like protein [Oryza sativa (japonica
  misc_feature (57)..(239): Homolog of NCBI NO: 5020103 NR Description: fibrillin [Nostoc sp. PCC 8009]
  misc_feature (57)..(239): Homolog of NCBI NO: 23126201 NR Description: hypothetical protein [Nostoc punctiforme]
  misc_feature (56)..(239): Homolog of NCBI NO: 17231810 NR Description: fibrillin [Nostoc sp. PCC 7120]
  misc_feature (50)..(239): Homolog of NCBI NO: 16329838 NR Description: fibrillin [Synechocystis sp. PCC 6803]
  misc_feature (57)..(239): Homolog of NCBI NO: 22297962 NR Description: fibrillin [Thermosynechococcus elongatus BP-1]
  misc_feature (1)..(178): Homolog of NCBI NO: 9758960 NR Description: gene_id:MYH9.3~pir||S75332~similar to unknown
  misc_feature (52)..(219): Homolog of NCBI NO: 32489298 NR Description: OSJNBa0028I23.21 [Oryza sativa (japonica
  misc_feature (1)..(241): Homolog of NCBI NO: 30682868 NR Description: plastid-lipid associated protein PAP/fibrillin
MNVMKLQNFVPARNHPRINTSRFGERPLWFRPITIIKVAEHNSGSGLVELEALAQKKRELYQAVEGINRGIFGIPSTKKSEIESLVKQLESLNPTPFPTLELEKVAGCWRLVYSTISILGSKRTKLGLRDFISLDDFFQSIDISKSKAVNVIKFSARGLSLLSGQLSIEASFRISSSTRVDINFENSTITPDRLMNVFRKNYDLLLGVFNPEGWLEITYVDETMRIGRDDKSNIFVLERFDDNNNM

SEQ ID NO: 52552 - DNA, 1499 bp, Glycine max
  misc_feature (1)..(1499): Ceres Seq. ID no. 14315257
aataattcaaagctccttggtcatcttatcatgactagatttgaagtggttttcatcgctaccccagccctcggcaaccttgttccaattgtggaattcgcggatctcctaaccaaacacaaccctcaattatctgcaaccgttctcactgtcaccacgccgcaacgacccctcataagcacctacgtccaatcccgcgcctcctcagccactaatctcaaactcctccacctccctacagtggacccacccacacccgaccagtaccaatccttcatcgccttcgtctccctccacatccaaaatcacaaacaccaggtcaagaacgagctcctcaacctcaaaaaaaacgagtcaaactcgtttgactcggttcgactcgtcgctctcttcgtcgacatgttctccaccacgctcatcgacgtcgccgccgagctcgccgtcccgtgctacctcttcttcgcgtcaccggcgagcttcctcggcttcacgctccacctcgaccgagtcgacccggtcgagtcggaatccgagttggcggttccgagttttgaaaaccccttgccacggtccgttttgcccaacctcgtgttggacgcgaacgacgcgttttcttgggtggcataccacgcgagaaggtacagggaaacaaagggcatcttcgtgaatacggttcaagagcttgaacctcacgcgcttcagtcactctacaacgattcggaattgccacgcgtttatccaattgggccggttcttgaccttgttggatcgaaccaatgggatccgaacccggcccaatacaagcgaattatggagtggcttgatcagcagcctgtgtcttcagtggtttttgtctgcttcgggagcatgggaagcttaaaggcaaaccaggtggaggagattgcaactgggcttgaaatggctaatgttagattcttatgggctttgcgggagcctccgaaggcccaattggaagacccgagagattacacaaaccccaaggacgtgctaccagatggatttcttgaacgaacggctgagatgggtttggtgtgtgggtgggtcccacaagcggtggtgttggcccacaaggccgtagggggtttcgtgtcgcattgtggttggaactcgatattagagagcttgtggcatggtgtaccgattgccacgtggccggtgtacgctgagcaacaaatgaacgcgtttcaaatggttagggaattgggattagcggtggagattagggtagattatagggtgggtggggatctggtgcgggcagaagaagtgctgaatggcgtgaggtcgctgatgaagggtgctgatgagatccaaaaaaaggtgaaagagatgagtgacatctgtagaagcgcattgatggagaacaggtcatcttacaataatctagtgttcctaattcaacacttgacaagttgaacaacccatgcaatcaactgcttttttagggattaaataataaagtttcataagtatggatt

SEQ ID NO: 52553 - protein, 478 aa, Glycine max
  peptide (1)..(478): Ceres Seq. ID no. 14315258
  misc_feature (15)..(466): Pfam Name: UDP-glucoronosyl and UDP-glucosyl transferase Pfam Description: UDP-glucoronosyl and UDP-glucosyl transferase
  misc_feature (13)..(476): Homolog of NCBI NO: 11994646 NR Description: UTP-glucose glucosyltransferase [Arabidopsis
  misc_feature (100)..(465): Homolog of NCBI NO: 2501495 NR Description: Flavonol 3-O-glucosyltransferase 6 (UDP-glucose
  misc_feature (31)..(465): Homolog of NCBI NO: 21954072 NR Description: putative UDP-glucose glucosyltransferase
  misc_feature (15)..(466): Homolog of NCBI NO: 15222348 NR Description: UDP-glycosyltransferase family [Arabidopsis
  misc_feature (13)..(477): Homolog of NCBI NO: 15233151 NR Description: glycosyltransferase family [Arabidopsis thaliana]
  misc_feature (15)..(465): Homolog of NCBI NO: 30680040 NR Description: glycosyltransferase family [Arabidopsis thaliana]
  misc_feature (24)..(470): Homolog of NCBI NO: 2501491 NR Description: Flavonol 3-O-glucosyltransferase 1 (UDP-glucose
  misc_feature (13)..(474): Homolog of NCBI NO: 20146091 NR Description: glucosyltransferase NTGT3 [Nicotiana tabacum]
  misc_feature (11)..(466): Homolog of NCBI NO: 14349251 NR Description: glucosyltransferase [Nicotiana tabacum]
  misc_feature (11)..(466): Homolog of NCBI NO: 14349253 NR Description: glucosyltransferase [Nicotiana tabacum]
NNSKLLGHLIMTRFEVVFIATPALGNLVPIVEFADLLTKHNPQLSATVLTVTTPQRPLISTYVQSRASSATNLKLLHLPTVDPPTPDQYQSFIAFVSLHIQNHKHQVKNELLNLKKNESNSFDSVRLVALFVDMFSTTLIDVAAELAVPCYLFFASPASFLGFTLHLDRVDPVESESELAVPSFENPLPRSVLPNLVLDANDAFSWVAYHARRYRETKGIFVNTVQELEPHALQSLYNDSELPRVYPIGPVLDLVGSNQWDPNPAQYKRIMEWLDQQPVSSVVFVCFGSMGSLKANQVEEIATGLEMANVRFLWALREPPKAQLEDPRDYTNPKDVLPDGFLERTAEMGLVCGWVPQAVVLAHKAVGGFVSHCGWNSILESLWHGVPIATWPVYAEQQMNAFQMVRELGLAVEIRVDYRVGGDLVRAEEVLNGVRSLMKGADEIQKKVKEMSDICRSALMENRSSYNNLVFLIQHLTS

SEQ ID NO: 52554 - protein, 468 aa, Glycine max
  peptide (1)..(468): Ceres Seq. ID no. 14315259
  misc_feature (5)..(456): Pfam Name: UDP-glucoronosyl and UDP-glucosyl transferase Pfam Description: UDP-glucoronosyl and UDP-glucosyl transferase
  misc_feature (3)..(466): Homolog of NCBI NO: 11994646 NR Description: UTP-glucose glucosyltransferase [Arabidopsis
  misc_feature (90)..(455): Homolog of NCBI NO: 2501495 NR Description: Flavonol 3-O-glucosyltransferase 6 (UDP-glucose
  misc_feature (21)..(455): Homolog of NCBI NO: 21954072 NR Description: putative UDP-glucose glucosyltransferase
  misc_feature (5)..(456): Homolog of NCBI NO: 15222348 NR Description: UDP-glycosyltransferase family [Arabidopsis
  misc_feature (3)..(467): Homolog of NCBI NO: 15233151 NR Description: glycosyltransferase family [Arabidopsis thaliana]
  misc_feature (5)..(455): Homolog of NCBI NO: 30680040 NR Description: glycosyltransferase family [Arabidopsis thaliana]
  misc_feature (14)..(460): Homolog of NCBI NO: 2501491 NR Description: Flavonol 3-O-glucosyltransferase 1 (UDP-glucose
  misc_feature (3)..(464): Homolog of NCBI NO: 20146091 NR Description: glucosyltransferase NTGT3 [Nicotiana tabacum]
  misc_feature (1)..(456): Homolog of NCBI NO: 14349251 NR Description: glucosyltransferase [Nicotiana tabacum]
  misc_feature (1)..(456): Homolog of NCBI NO: 14349253 NR Description: glucosyltransferase [Nicotiana tabacum]
MTRFEVVFIATPALGNLVPIVEFADLLTKHNPQLSATVLTVTTPQRPLISTYVQSRASSATNLKLLHLPTVDPPTPDQYQSFIAFVSLHIQNHKHQVKNELLNLKKNESNSFDSVRLVALFVDMFSTTLIDVAAELAVPCYLFFASPASFLGFTLHLDRVDPVESESELAVPSFENPLPRSVLPNLVLDANDAFSWVAYHARRYRETKGIFVNTVQELEPHALQSLYNDSELPRVYPIGPVLDLVGSNQWDPNPAQYKRIMEWLDQQPVSSVVFVCFGSMGSLKANQVEEIATGLEMANVRFLWALREPPKAQLEDPRDYTNPKDVLPDGFLERTAEMGLVCGWVPQAVVLAHKAVGGFVSHCGWNSILESLWHGVPIATWPVYAEQQMNAFQMVRELGLAVEIRVDYRVGGDLVRAEEVLNGVRSLMKGADEIQKKVKEMSDICRSALMENRSSYNNLVFLIQHLTS

SEQ ID NO: 52555 - protein, 345 aa, Glycine max
  peptide (1)..(345): Ceres Seq. ID no. 14315260
  misc_feature (1)..(333): Pfam Name: UDP-glucoronosyl and UDP-glucosyl transferase Pfam Description: UDP-glucoronosyl and UDP-glucosyl transferase
  misc_feature (1)..(343): Homolog of NCBI NO: 11994646 NR Description: UTP-glucose glucosyltransferase [Arabidopsis
  misc_feature (1)..(332): Homolog of NCBI NO: 2501495 NR Description: Flavonol 3-O-glucosyltransferase 6 (UDP-glucose
  misc_feature (1)..(332): Homolog of NCBI NO: 21954072 NR Description: putative UDP-glucose glucosyltransferase
  misc_feature (1)..(333): Homolog of NCBI NO: 15222348 NR Description: UDP-glycosyltransferase family [Arabidopsis
  misc_feature (1)..(344): Homolog of NCBI NO: 15233151 NR Description: glycosyltransferase family [Arabidopsis thaliana]
  misc_feature (1)..(332): Homolog of NCBI NO: 30680040 NR Description: glycosyltransferase family [Arabidopsis thaliana]
  misc_feature (1)..(337): Homolog of NCBI NO: 2501491 NR Description: Flavonol 3-O-glucosyltransferase 1 (UDP-glucose
  misc_feature (1)..(341): Homolog of NCBI NO: 20146091 NR Description: glucosyltransferase NTGT3 [Nicotiana tabacum]
  misc_feature (1)..(333): Homolog of NCBI NO: 14349251 NR Description: glucosyltransferase [Nicotiana tabacum]
  misc_feature (1)..(333): Homolog of NCBI NO: 14349253 NR Description: glucosyltransferase [Nicotiana tabacum]
MFSTTLIDVAAELAVPCYLFFASPASFLGFTLHLDRVDPVESESELAVPSFENPLPRSVLPNLVLDANDAFSWVAYHARRYRETKGIFVNTVQELEPHALQSLYNDSELPRVYPIGPVLDLVGSNQWDPNPAQYKRIMEWLDQQPVSSVVFVCFGSMGSLKANQVEEIATGLEMANVRFLWALREPPKAQLEDPRDYTNPKDVLPDGFLERTAEMGLVCGWVPQAVVLAHKAVGGFVSHCGWNSILESLWHGVPIATWPVYAEQQMNAFQMVRELGLAVEIRVDYRVGGDLVRAEEVLNGVRSLMKGADEIQKKVKEMSDICRSALMENRSSYNNLVFLIQHLTS

SEQ ID NO: 52556 - DNA, 1810 bp, Glycine max
  misc_feature (1)..(1810): Ceres Seq. ID no. 14315275
attacagattcaattgcttaattaaatactattttcccctccttctataataccctccaaaatctttttccttcttcattctccctttctctatgttttggcaaaccactttaggtaaccagattactactactattgcttcatatacaaagatgctatcgtaaaaaagagagaaacttgggaagtgggaacacattcaaaatccttgtttttctttttggtctaatttttcatctcaaaacacacccattgagtatttttcatttttttgttcttttgggacaaaaaaggtgggtgttgttggcattattgaagatagaggcccccaaaatgaagaggtctccagcatcttcttgttcatcatctacttcctctgttgggtttgaagctcccattgaaaaaagaaggcctaagcatccaaggaggaataatttgaagtcacaaaaatgcaagcagaaccaaaccaccactggtggcagaagaagctctatctatagaggagttacaaggcataggtggacagggaggtttgaagctcacctatgggataagagctcttggaacaacattcagagcaagaagggtcgacaaggggcatatgatactgaagaatctgcagcccgtacctatgaccttgcagcccttaaatactggggaaaagatgcaaccctgaatttcccgatagaaacttataccaaggagctcgaggaaatggacaaggtttcaagagaagaatatttggcttctttgcggcgccaaagcagtggcttttctagaggcctgtctaagtaccgtggggttgctaggcatcatcataatggtcgctgggaagcacgaattggaagagtatgcggaaacaagtacctctacttggggacatataaaactcaagaggaggcagcagtggcatatgacatggcagcaatagagtaccgtggagtcaatgcagtgaccaattttgacataagcaactacatggacaaaataaagaagaaaaatgaccaaacccaacaacaacaaacagaagcacaaacggaaacagttcctaactcctctgactctgaagaagtagaagtagaacaacagacaacaacaataaccacaccacccccatctgaaaatctgcacatgccaccacagcagcaccaagttcaatacaccccccatgtctctccaagggaagaagaatcatcatcactgatcacaattatgaaccatgtgcttgagcaggatctgccatggagcttcatgtacactggcttgtctcagtttcaagatccaaacttggctttctgcaaaggtgatgatgacttggtgggcatgtttgatagtgcagggtttgaggaagacattgattttctgttcagcactcaacctggtgatgagactgagagtgatgtcaacaatatgagcgcagttttggatagtgttgagtgtggagacacaaatggggctggtggaagcatgatgcatgtggataacaagcagaagatagtatcatttgcttcttcaccatcatctacaactacagtttcttgtgactatgctctagatctatgatctcttcagaagggtgatggatgacctacatggaatggaaccttgtgtagattattattgggtttgttatgcatgttgttggggtttgttgtgataggttggtggatgggtgtgacttgtgaaaatgttcattggttttaggattttcctttcatccatactccgttatcgaaagaagaaaatgttcattttagacttggattttagtataaaaaaaaaggagaaaaaaccaaaaatgtgatttgggtgc

SEQ ID NO: 52557 - protein, 409 aa, Glycine max
  peptide (1)..(409): Ceres Seq. ID no. 14315276
  misc_feature (52)..(122): Pfam Name: AP2 domain Pfam Description: AP2 domain
  misc_feature (47)..(243): Homolog of NCBI NO: 28201307 NR Description: putative ovule development protein antitegumenta
  misc_feature (37)..(269): Homolog of NCBI NO: 15238491 NR Description: ovule development protein, putative [Arabidopsis
  misc_feature (22)..(259): Homolog of NCBI NO: 15242120 NR Description: ovule development protein, putative [Arabidopsis
  misc_feature (6)..(277): Homolog of NCBI NO: 20330778 NR Description: Putative ovule development protein antitegumenta
  misc_feature (49)..(290): Homolog of NCBI NO: 21304225 NR Description: aintegumenta-like protein [Oryza sativa]
  misc_feature (6)..(368): Homolog of NCBI NO: 34909212 NR Description: P0425G02.29 [Oryza sativa (japonica
  misc_feature (4)..(186): Homolog of NCBI NO: 15232481 NR Description: ovule development protein, putative [Arabidopsis
  misc_feature (35)..(216): Homolog of NCBI NO: 18394319 NR Description: ovule development protein, putative [Arabidopsis
  misc_feature (50)..(259): Homolog of NCBI NO: 15219975 NR Description: ovule development protein, putative [Arabidopsis
  misc_feature (35)..(216): Homolog of NCBI NO: 25518475 NR Description: hypothetical protein T24D18.16 - Arabidopsis
MKRSPASSCSSSTSSVGFEAPIEKRRPKHPRRNNLKSQKCKQNQTTTGGRRSSIYRGVTRHRWTGRFEAHLWDKSSWNNIQSKKGRQGAYDTEESAARTYDLAALKYWGKDATLNFPIETYTKELEEMDKVSREEYLASLRRQSSGFSRGLSKYRGVARHHHNGRWEARIGRVCGNKYLYLGTYKTQEEAAVAYDMAAIEYRGVNAVTNFDISNYMDKIKKKNDQTQQQQTEAQTETVPNSSDSEEVEVEQQTTTITTPPPSENLHMPPQQHQVQYTPHVSPREEESSSLITIMNHVLEQDLPWSFMYTGLSQFQDPNLAFCKGDDDLVGMFDSAGFEEDIDFLFSTQPGDETESDVNNMSAVLDSVECGDTNGAGGSMMHVDNKQKIVSFASSPSSTTTVSCDYALDL

SEQ ID NO: 52558 - protein, 282 aa, Glycine max
  peptide (1)..(282): Ceres Seq. ID no. 14315277
  misc_feature (25)..(88): Pfam Name: AP2 domain Pfam Description: AP2 domain
  misc_feature (1)..(116): Homolog of NCBI NO: 28201307 NR Description: putative ovule development protein antitegumenta
  misc_feature (1)..(142): Homolog of NCBI NO: 15238491 NR Description: ovule development protein, putative [Arabidopsis
  misc_feature (1)..(132): Homolog of NCBI NO: 15242120 NR Description: ovule development protein, putative [Arabidopsis
  misc_feature (1)..(150): Homolog of NCBI NO: 20330778 NR Description: Putative ovule development protein antitegumenta
  misc_feature (1)..(163): Homolog of NCBI NO: 21304225 NR Description: aintegumenta-like protein [Oryza sativa]
  misc_feature (1)..(241): Homolog of NCBI NO: 34909212 NR Description: P0425G02.29 [Oryza sativa (japonica
  misc_feature (1)..(59): Homolog of NCBI NO: 15232481 NR Description: ovule development protein, putative [Arabidopsis
  misc_feature (1)..(89): Homolog of NCBI NO: 18394319 NR Description: ovule development protein, putative [Arabidopsis
  misc_feature (1)..(132): Homolog of NCBI NO: 15219975 NR Description: ovule development protein, putative [Arabidopsis
  misc_feature (1)..(89): Homolog of NCBI NO: 25518475 NR Description: hypothetical protein T24D18.16 - Arabidopsis
MDKVSREEYLASLRRQSSGFSRGLSKYRGVARHHHNGRWEARIGRVCGNKYLYLGTYKTQEEAAVAYDMAAIEYRGVNAVTNFDISNYMDKIKKKNDQTQQQQTEAQTETVPNSSDSEEVEVEQQTTTITTPPPSENLHMPPQQHQVQYTPHVSPREEESSSLITIMNHVLEQDLPWSFMYTGLSQFQDPNLAFCKGDDDLVGMFDSAGFEEDIDFLFSTQPGDETESDVNNMSAVLDSVECGDTNGAGGSMMHVDNKQKIVSFASSPSSTTTVSCDYALDL

SEQ ID NO: 52559 - protein, 214 aa, Glycine max
  peptide (1)..(214): Ceres Seq. ID no. 14315278
  misc_feature (1)..(53): Homolog of NCBI NO: 38492172 NR Description: ANT-like protein [Nicotiana tabacum]
  misc_feature (1)..(48): Homolog of NCBI NO: 28201307 NR Description: putative ovule development protein antitegumenta
  misc_feature (1)..(74): Homolog of NCBI NO: 15238491 NR Description: ovule development protein, putative [Arabidopsis
  misc_feature (1)..(64): Homolog of NCBI NO: 15242120 NR Description: ovule development protein, putative [Arabidopsis
  misc_feature (1)..(82): Homolog of NCBI NO: 20330778 NR Description: Putative ovule development protein antitegumenta
  misc_feature (1)..(95): Homolog of NCBI NO: 21304225 NR Description: aintegumenta-like protein [Oryza sativa]
  misc_feature (1)..(173): Homolog of NCBI NO: 34909212 NR Description: P0425G02.29 [Oryza sativa (japonica
  misc_feature (1)..(21): Homolog of NCBI NO: 18394319 NR Description: ovule development protein, putative [Arabidopsis
  misc_feature (1)..(64): Homolog of NCBI NO: 15219975 NR Description: ovule development protein, putative [Arabidopsis
  misc_feature (1)..(21): Homolog of NCBI NO: 25518475 NR Description: hypothetical protein T24D18.16 - Arabidopsis
MAAIEYRGVNAVTNFDISNYMDKIKKKNDQTQQQQTEAQTETVPNSSDSEEVEVEQQTTTITTPPPSENLHMPPQQHQVQYTPHVSPREEESSSLITIMNHVLEQDLPWSFMYTGLSQFQDPNLAFCKGDDDLVGMFDSAGFEEDIDFLFSTQPGDETESDVNNMSAVLDSVECGDTNGAGGSMMHVDNKQKIVSFASSPSSTTTVSCDYALDL

SEQ ID NO: 52560 - DNA, 1336 bp, Glycine max
  misc_feature (1)..(1336): Ceres Seq. ID no. 14316165
aaaacaagttttctagtgttttacactttgcacatgtgatgagagactagactagtcccttgagagaagctcctaacaaataaaacgaaaccatacttcactgtcgcagtcaaaatctccgtatttgaatccaatgacgcatatatcaattcaactctgaatctgaagcttcccgtatgtcaacggaagcgcccaagcgcgaccaatggcagtgggagaacgccaccgccggcgccgccgctggattcgccaccgtcgccgtcatgcatcccctcgatgttgtccgaactaggttccaagttaacgatggtcgagtctctaattttcccagttacaagaacaccgctcacgccgttttcactatcgctcgttccgagggattaagagggttatatgcaggcttccttcctggggttcttgggtcaactatttcatggagtttatatttcttcttctatgacagagccaaacagagatatgcaaggaacagggaggggaagttgagcccaggtctgcatcttgcctcagcagctgaagcaggagctatagtttccttcttcacaaatccagtatggctggtaaagacaagattgcagcttcaaactcctcttcatcagacacgaccatactctggggtttatgatgcatttaggaccataatgagggaagaaggatttagtgcactttacagaggaattgttcctggtctatttctgttctctcatggtgctattcagtttacagcatatgaggagctacgcaaagttattgttgattttaagagtaagggaagtacagtagataatcaaaaccctgataaattgctggtacaactgtttgtcccctctctttggaaggaggattctagcttctacagtccttaagtatgatatatcaatcattgaagaagttgctttctcatgagacatactttatcccccctttttcaggttatacgggctcgattgcagcaaagacccagtggtgatggggttccaagatatatggacactttgcatgttgtgaaagaaactgcacgatttgaaagtgtccgaggtttttacaaaggaattaccgcaaacctcttgaagaatgctcccgcttcttcgataacatttattgtttatgaaaatgtcctaaaattgcttaaaccggctagaaggaatgactgagtatttcatgattctttcctttctccttattgctgtttaatctcctttcttatctgatatttgttgcattgaaaaattgctcatttttcctatcactttttaatgatgggattctacacaatacacaattgctcattgaagttagacaaccccaaaaacaaagt

SEQ ID NO: 52561 - protein, 235 aa, Glycine max
  peptide (1)..(235): Ceres Seq. ID no. 14316166
  misc_feature (12)..(195): Homolog of NCBI NO: 14388376 NR Description: hypothetical protein [Macaca fascicularis]
  misc_feature (16)..(218): Homolog of NCBI NO: 6322185 NR Description: Hypothetical ORF; Yil006wp [Saccharomyces
  misc_feature (2)..(202): Homolog of NCBI NO: 24652037 NR Description: CG8026-PA [Drosophila melanogaster]
  misc_feature (12)..(195): Homolog of NCBI NO: 34222684 NR Description: Mitochondrial folate transporter/carrier
  misc_feature (12)..(195): Homolog of NCBI NO: 14042724 NR Description: unnamed protein product [Homo sapiens]
  misc_feature (12)..(195): Homolog of NCBI NO: 34222668 NR Description: Mitochondrial folate transporter/carrier
  misc_feature (12)..(195): Homolog of NCBI NO: 27369517 NR Description: mitochondrial folate transporter/carrier [Mus
  misc_feature (11)..(210): Homolog of NCBI NO: 10177519 NR Description: contains similarity to peroxisomal membrane
  misc_feature (11)..(210): Homolog of NCBI NO: 18425065 NR Description: mitochondrial carrier protein family [Arabidopsis
  misc_feature (11)..(210): Homolog of NCBI NO: 21537040 NR Description: contains similarity to peroxisomal membrane
MSTEAPKRDQWQWENATAGAAAGFATVAVMHPLDVVRTRFQVNDGRVSNFPSYKNTAHAVFTIARSEGLRGLYAGFLPGVLGSTISWSLYFFFYDRAKQRYARNREGKLSPGLHLASAAEAGAIVSFFTNPVWLVKTRLQLQTPLHQTRPYSGVYDAFRTIMREEGFSALYRGIVPGLFLFSHGAIQFTAYEELRKVIVDFKSKGSTVDNQNPDKLLVQLFVPSLWKEDSSFYSP

SEQ ID NO: 52562 - protein, 206 aa, Glycine max
  peptide (1)..(206): Ceres Seq. ID no. 14316167
  misc_feature (1)..(166): Homolog of NCBI NO: 14388376 NR Description: hypothetical protein [Macaca fascicularis]
  misc_feature (1)..(189): Homolog of NCBI NO: 6322185 NR Description: Hypothetical ORF; Yil006wp [Saccharomyces
  misc_feature (1)..(173): Homolog of NCBI NO: 24652037 NR Description: CG8026-PA [Drosophila melanogaster]
  misc_feature (1)..(166): Homolog of NCBI NO: 34222684 NR Description: Mitochondrial folate transporter/carrier
  misc_feature (1)..(166): Homolog of NCBI NO: 14042724 NR Description: unnamed protein product [Homo sapiens]
  misc_feature (1)..(166): Homolog of NCBI NO: 34222668 NR Description: Mitochondrial folate transporter/carrier
  misc_feature (1)..(166): Homolog of NCBI NO: 27369517 NR Description: mitochondrial folate transporter/carrier [Mus
  misc_feature (1)..(181): Homolog of NCBI NO: 10177519 NR Description: contains similarity to peroxisomal membrane
  misc_feature (1)..(181): Homolog of NCBI NO: 18425065 NR Description: mitochondrial carrier protein family [Arabidopsis
  misc_feature (1)..(181): Homolog of NCBI NO: 21537040 NR Description: contains similarity to peroxisomal membrane
MHPLDVVRTRFQVNDGRVSNFPSYKNTAHAVFTIARSEGLRGLYAGFLPGVLGSTISWSLYFFFYDRAKQRYARNREGKLSPGLHLASAAEAGAIVSFFTNPVWLVKTRLQLQTPLHQTRPYSGVYDAFRTIMREEGFSALYRGIVPGLFLFSHGAIQFTAYEELRKVIVDFKSKGSTVDNQNPDKLLVQLFVPSLWKEDSSFYSP

SEQ ID NO: 52563 - DNA, 754 bp, Glycine max
  misc_feature (1)..(754): Ceres Seq. ID no. 14314807
atcacactaatcactcactcttcactcaaaactcttctctttcattttcataattcccacacattatggctgagcttcactaccaaccacaacaccaataccccctccgctaccctaacgatccacaccaacaaacccgttcctccacccaccaggtcgtcaaggccgccaccgccgtcacagcgggcggctccctcttgatcctcgcctcgttgatcctcgccgccaccgtcattgccctcaccatcgtcaccccgctgttcgtcattttcagtccggttctcgtccccgccgtaatcaccgttgcgctcctgagcctggggttcctcgcctcgagtgggttcggtgtggcggcgatcacggtgctggcgtggatctacaggtacgtcaccggcaagcaaccacctggcgcggatcagttagacagcgcgcgtcacaagatcatggacaaggcgcgtgagatcaaggactacggacagcaacaaatcagcggggtccaggcttcttaattctgcactcgcacgcacatgatcgtatccatctcgtggaatatttctctctttgtctagttagtttatatttaccatttatgaatgaatgaatgcatgattgagcgttaaagttgaatttgaatctctcttttctttgtattttcgtttattgtgggtgttcgctcatcatcacttgttgtaatgtcttaattttgtgtgcatgctgcgactattcaaggacgatccatttgtgtttttattct

SEQ ID NO: 52564 - protein, 147 aa, Glycine max
  peptide (1)..(147): Ceres Seq. ID no. 14314808
  misc_feature (28)..(135): Pfam Name: Oleosin Pfam Description: Oleosin
  misc_feature (18)..(147): Homolog of NCBI NO: 3334281 NR Description: Oleosin 16 kDa
  misc_feature (26)..(143): Homolog of NCBI NO: 129082 NR Description: Oleosin Bn-III (BnIII)
  misc_feature (26)..(143): Homolog of NCBI NO: 228416 NR Description: oleosin
  misc_feature (26)..(143): Homolog of NCBI NO: 129097 NR Description: Major oleosin NAP-II
  misc_feature (11)..(143): Homolog of NCBI NO: 15234945 NR Description: oleosin [Arabidopsis thaliana]
  misc_feature (1)..(147): Homolog of NCBI NO: 5381321 NR Description: 15 kDa oleosin [Sesamum indicum]
  misc_feature (1)..(145): Homolog of NCBI NO: 7442009 NR Description: oleosin-like protein, salt stress-induced - sweet
  misc_feature (11)..(147): Homolog of NCBI NO: 29170509 NR Description: oleosin [Corylus avellana]
  misc_feature (1)..(145): Homolog of NCBI NO: 2119749 NR Description: oleosin - almond
  misc_feature (1)..(147): Homolog of NCBI NO: 3914199 NR Description: OLEOSIN 1
MAELHYQPQHQYPLRYPNDPHQQTRSSTHQVVKAATAVTAGGSLLILASLILAATVIALTIVTPLFVIFSPVLVPAVITVALLSLGFLASSGFGVAAITVLAWIYRYVTGKQPPGADQLDSARHKIMDKAREIKDYGQQQISGVQAS

SEQ ID NO: 52565 - DNA, 1083 bp, Glycine max
  misc_feature (1)..(1083): Ceres Seq. ID no. 14314823
ttttttctacctctagggtttttcaatgctacctactccaccctcttctctaaattctttcactttctttctctctcaatgttttcttcttgttttatttaattaattattactcgcccaattttttatgaataaatattaattgtttatttcttagtttttgttactcgccaaattatgtatgtaaaattttgtccattgatcttttcccccttaattttcaggtaagtgttccttgcacaagcttgttcaagaccgtcactgtccgatgcggccattgcactaacctcctcccagtgaacatgcgagggttgcttatgccatctcccactcaatttcatttgggtcactctttcttctccccatctcataaccttctggaggagataccaaaccccactccaaattttcttatgaaccaaacaaatttcagtgcgtcacatgagttctctatgcctgctaggactgcagctgatgagcttccacggccaccgatcacaaacagacctcctgagaagagacagagagtcccctcagcgtacaatcgctttatcaaggacgagatccaacgcatcaagtctgtcaatcccgatataactcacagggaagccttcagtgcagctgcaaagaattgggcccacttcccacacatccactttggtctcatgcctgatcagactgtgaagaagacaaatgtgtgccagcaggatggagaagaggttctcatgaaagatgggttttatgcttcggctaatgttggtgtctcaccctactaattcaccccagtctgttttctctttcgaagaaattatgcaaagaggaaaaattttccaagttccaccaacctatgaagctcaggaactctgattccttaacttataaatgcatctatttgtggctcaagagcgattatgttgatataactaaggactactactacactaggactagctcttggggttgtgcatgcatgcatgtagttctcttcttatgagtagactttaattattaactttcatgttcttcaattcccccagtactactgcagctgattgcttatctaatcaataattaattagccat

SEQ ID NO: 52566 - protein, 157 aa, Glycine max
  peptide (1)..(157): Ceres Seq. ID no. 14314824
  misc_feature (1)..(121): Pfam Name: YABBY protein Pfam Description: YABBY protein
  misc_feature (1)..(52): Homolog of NCBI NO: 32330679 NR Description: yabby9 protein [Zea mays]
  misc_feature (56)..(157): Homolog of NCBI NO: 32330679 NR Description: yabby9 protein [Zea mays]
  misc_feature (54)..(157): Homolog of NCBI NO: 37535908 NR Description: hypothetical protein [Oryza sativa (japonica
  misc_feature (1)..(58): Homolog of NCBI NO: 32330675 NR Description: yabby14 protein [Zea mays]
  misc_feature (42)..(157): Homolog of NCBI NO: 32330675 NR Description: yabby14 protein [Zea mays]
  misc_feature (20)..(157): Homolog of NCBI NO: 32330681 NR Description: yabby10 protein [Zea mays]
  misc_feature (61)..(157): Homolog of NCBI NO: 37551421 NR Description: FIL-like protein [Triticum aestivum]
  misc_feature (1)..(155): Homolog of NCBI NO: 18411242 NR Description: YABBY3 axial regulator -related [Arabidopsis
  misc_feature (1)..(157): Homolog of NCBI NO: 18406725 NR Description: abnormal floral organs protein (AFO) (FIL) YABBY1
  misc_feature (1)..(157): Homolog of NCBI NO: 27804377 NR Description: MADS-box transcription factor CDM51
MRGLLMPSPTQFHLGHSFFSPSHNLLEEIPNPTPNFLMNQTNFSASHEFSMPARTAADELPRPPITNRPPEKRQRVPSAYNRFIKDEIQRIKSVNPDITHREAFSAAAKNWAHFPHIHFGLMPDQTVKKTNVCQQDGEEVLMKDGFYASANVGVSPY

SEQ ID NO: 52567 - protein, 152 aa, Glycine max
  peptide (1)..(152): Ceres Seq. ID no. 14314825
  misc_feature (1)..(116): Pfam Name: YABBY protein Pfam Description: YABBY protein
  misc_feature (1)..(47): Homolog of NCBI NO: 32330679 NR Description: yabby9 protein [Zea mays]
  misc_feature (51)..(152): Homolog of NCBI NO: 32330679 NR Description: yabby9 protein [Zea mays]
  misc_feature (49)..(152): Homolog of NCBI NO: 37535908 NR Description: hypothetical protein [Oryza sativa (japonica
  misc_feature (1)..(53): Homolog of NCBI NO: 32330675 NR Description: yabby14 protein [Zea mays]
  misc_feature (37)..(152): Homolog of NCBI NO: 32330675 NR Description: yabby14 protein [Zea mays]
  misc_feature (15)..(152): Homolog of NCBI NO: 32330681 NR Description: yabby10 protein [Zea mays]
  misc_feature (56)..(152): Homolog of NCBI NO: 37551421 NR Description: FIL-like protein [Triticum aestivum]
  misc_feature (1)..(150): Homolog of NCBI NO: 18411242 NR Description: YABBY3 axial regulator -related [Arabidopsis
  misc_feature (1)..(152): Homolog of NCBI NO: 18406725 NR Description: abnormal floral organs protein (AFO) (FIL) YABBY1
  misc_feature (1)..(152): Homolog of NCBI NO: 27804377 NR Description: MADS-box transcription factor CDM51
MPSPTQFHLGHSFFSPSHNLLEEIPNPTPNFLMNQTNFSASHEFSMPARTAADELPRPPITNRPPEKRQRVPSAYNRFIKDEIQRIKSVNPDITHREAFSAAAKNWAHFPHIHFGLMPDQTVKKTNVCQQDGEEVLMKDGFYASANVGVSPY

SEQ ID NO: 52568 - protein, 120 aa, Glycine max
  peptide (1)..(120): Ceres Seq. ID no. 14314826
  misc_feature (1)..(84): Pfam Name: YABBY protein Pfam Description: YABBY protein
  misc_feature (1)..(15): Homolog of NCBI NO: 32330679 NR Description: yabby9 protein [Zea mays]
  misc_feature (19)..(120): Homolog of NCBI NO: 32330679 NR Description: yabby9 protein [Zea mays]
  misc_feature (17)..(120): Homolog of NCBI NO: 37535908 NR Description: hypothetical protein [Oryza sativa (japonica
  misc_feature (1)..(21): Homolog of NCBI NO: 32330675 NR Description: yabby14 protein [Zea mays]
  misc_feature (5)..(120): Homolog of NCBI NO: 32330675 NR Description: yabby14 protein [Zea mays]
  misc_feature (1)..(120): Homolog of NCBI NO: 32330681 NR Description: yabby10 protein [Zea mays]
  misc_feature (24)..(120): Homolog of NCBI NO: 37551421 NR Description: FIL-like protein [Triticum aestivum]
  misc_feature (1)..(118): Homolog of NCBI NO: 18411242 NR Description: YABBY3 axial regulator -related [Arabidopsis
  misc_feature (1)..(120): Homolog of NCBI NO: 18406725 NR Description: abnormal floral organs protein (AFO) (FIL) YABBY1
  misc_feature (1)..(120): Homolog of NCBI NO: 27804377 NR Description: MADS-box transcription factor CDM51
MNQTNFSASHEFSMPARTAADELPRPPITNRPPEKRQRVPSAYNRFIKDEIQRIKSVNPDITHREAFSAAAKNWAHFPHIHFGLMPDQTVKKTNVCQQDGEEVLMKDGFYASANVGVSPY

SEQ ID NO: 52569 - DNA, 779 bp, Glycine max
  misc_feature (1)..(779): Ceres Seq. ID no. 14314812
atccaggatttaaaccaagatatccatcatttctttctctccccttcttccaattatcgatttggtgaggatttctccctcccgcttgaatgaactatcgcagagccaaaacgataaatccaaacccattgatccattatgccaataatcgatcaataccccacacccacaaacctcgaccccatgaaagaccaactccaaagttccgcaagcgcattcccttcgtcaccgaagtcaaaacagtggaagacccggaagaagcattgtccctctttcaccgttacaaagaacagggtttccggcactattacccttcctatgccgcattactctacaaactagctcgttctagaatgttcgatgccgttgaaacgattctcgctcacatgaaagacaccgaaatgcaatgcagagagagcgttttcattgccctctttcaacattacggtcccgaaaaagccgttgaactcttcaacagaatgcctcagttcaattgcacccgcacgatacagtccttcaacgcgcttctcaatgttctaattgacaatgacaggtttgacgaggccaatgatatttggggtcattagtttttgttggtcggatttgtgtttgcttttatttattggtattgctcattagtattttctacttgtttgctctgtcccttgttttagtagcttggattagctgtgtctcaccatgcatttgtacttcacttttcatgttttttgggttactactatgaaactggaacaattggttgcaattagtgcttttac

SEQ ID NO: 52570 - protein, 165 aa, Glycine max
  peptide (1)..(165): Ceres Seq. ID no. 14314813
  misc_feature (75)..(109): Pfam Name: PPR repeat Pfam Description: PPR repeat
  misc_feature (66)..(159): Homolog of NCBI NO: 15231160 NR Description: pentatricopeptide (PPR) repeat-containing protein
  misc_feature (52)..(163): Homolog of NCBI NO: 15231886 NR Description: pentatricopeptide (PPR) repeat-containing protein
  misc_feature (54)..(151): Homolog of NCBI NO: 15219274 NR Description: pentatricopeptide (PPR) repeat-containing protein
  misc_feature (37)..(163): Homolog of NCBI NO: 15221300 NR Description: pentatricopeptide (PPR) repeat-containing protein
  misc_feature (26)..(157): Homolog of NCBI NO: 15237345 NR Description: pentatricopeptide (PPR) repeat-containing protein
  misc_feature (16)..(163): Homolog of NCBI NO: 15222997 NR Description: pentatricopeptide (PPR) repeat-containing protein
MNYRRAKTINPNPLIHYANNRSIPHTHKPRPHERPTPKFRKRIPFVTEVKTVEDPEEALSLFHRYKEQGFRHYYPSYAALLYKLARSRMFDAVETILAHMKDTEMQCRESVFIALFQHYGPEKAVELFNRMPQFNCTRTIQSFNALLNVLIDNDRFDEANDIWGH

SEQ ID NO: 52571 - DNA, 1285 bp, Glycine max
  misc_feature (1)..(1285): Ceres Seq. ID no. 14314817
agtcttccatcgaagtgtattgcattggattattgacttttgacttgggtgttgtcacacggccacaccggagtatcgcgtgtccttcgtcagcctgtcctgtcagtcctttgtgcatctttgcctgacccagtcgctgttgtgagcggccgcgttttcgtctgtcaaacagagcatcgccgacaagggcagcgccaagatggccgactggaagagcgcttcgtctgtgtacgacttcagcgtcaaggacatcactggcgccgacgtcagcctagacaagtacaagggccacgttctgctgatcgtcaacatcgcctcgctgtgcgggctgacggccaccaactacaaggagctcgtcgagctggacgagaagtaccgcgagcgcgggctgcgcatcctcgccttcccctgcaaccagttcaacggccaggagcccggcacggccgacgacatcgtgtgcttcgccaagaagcagaacgccaactttgacctgttcgagaaggtgaacgtcaacggcgacgacgccagccccctctggaagtacctgaagaacaagcagggcggcaccttcggagacttcatcaagtggaacttcaccaagttcatcgtcgacaaggagggccagcccgtggagcgacacagccccactacggagccacacaaactgatctctcacattgagaagtacctgtaaagtgccctggctccggggaaactccactattgttactattgaagtttaggatgcttaatagttgttagaaatcacaagggaaagtcaccgaacacctgcaacacacaattgtgataagacaaactagaggtactttgttttaatttacccttgtcatgattttgtagctcttttaacaatgttagtctaaattaatgaatgaaatgtgtagattatttaattttaaatgttttagcttggtgaaggagataaatttacttctcatttataaatagcggaactttgaacttcaccagttccgtagcacaaggaatcaaacaaacacatattgtcacattcaatactctgcccttgtggttttttcactcacatttttcattgtgtcataatcgctgccatgaatagtgtttttacttttttaatagatgatttttgcagccgtgtattgtttctgaagtgtaattctcatgtggctcatggacaaaaatgagcccaccccgatcgctgagcacatttttgtgtgaagactgtgttgcacaaagtgcacgtcaaggctgtgtaatgttcgaataaaggtataacgagaaccct

SEQ ID NO: 52572 - protein, 164 aa, Glycine max
  peptide (1)..(164): Ceres Seq. ID no. 14314818
  misc_feature (9)..(117): Pfam Name: Glutathione peroxidase Pfam Description: Glutathione peroxidase
  misc_feature (6)..(164): Homolog of NCBI NO: 6179600 NR Description: GPX12Hv, glutathione peroxidase-like protein
  misc_feature (6)..(164): Homolog of NCBI NO: 27544804 NR Description: phospholipid hydroperoxide glutathione
  misc_feature (1)..(164): Homolog of NCBI NO: 21068666 NR Description: putative phospholipid hydroperoxide glutathione
  misc_feature (1)..(164): Homolog of NCBI NO: 22268405 NR Description: putative glutathione peroxidase [Zea mays]
  misc_feature (1)..(164): Homolog of NCBI NO: 6179604 NR Description: glutathione peroxidase-like protein GPX54Hv
  misc_feature (1)..(164): Homolog of NCBI NO: 34334012 NR Description: cytosolic glutathione peroxidase [Triticum
  misc_feature (1)..(164): Homolog of NCBI NO: 21360380 NR Description: glutathione peroxidase 1 [Oryza sativa]
  misc_feature (1)..(157): Homolog of NCBI NO: 31208401 NR Description: ENSANGP00000013962 [Anopheles gambiae]
  misc_feature (1)..(164): Homolog of NCBI NO: 31208399 NR Description: ENSANGP00000024750 [Anopheles gambiae]
  misc_feature (3)..(163): Homolog of NCBI NO: 33089112 NR Description: putative thioredoxin perxidase [Apis mellifera
MADWKSASSVYDFSVKDITGADVSLDKYKGHVLLIVNIASLCGLTATNYKELVELDEKYRERGLRILAFPCNQFNGQEPGTADDIVCFAKKQNANFDLFEKVNVNGDDASPLWKYLKNKQGGTFGDFIKWNFTKFIVDKEGQPVERHSPTTEPHKLISHIEKYL

SEQ ID NO: 52573 - DNA, 1235 bp, Glycine max
  misc_feature (1)..(1235): Ceres Seq. ID no. 14314838
cattctatacggaaatctcaattttcattttctcttgtaaattcagaaaccccaacacgctctgtcggtgtaggttcggtgaaaatgagttcaagaggaaagcagggtgccatcgtttcttaccaaaacgtcgtcgtaatgaggcacggcgagcgcttcgacaacttcgagccgtcatgggcggcgacggcggcgcggccttgggacccgccgctggccgaggccggccggaaacgggcgttcaaaacgggcctgaggctccgagagagtgtcgagtttccgatcgggcgcgtcttcgtttcgccgttcctccgctgcctccagaccgccgtggaactcgtggcatctctctccgatggtgttgccgttaagccttccgaagtcaaggtctctgtcgagtatggattgtgcgaaatgatgaacagcaaggctatccgtcccaatgttgcccccaaagatggaaacatggggtttgatgtagcagtttgtgaagccatgctcccagctgagatagtggataaaaatgttgaaaggatgtgtaaagagttgccccagtgggaagaatcagttctgcaagcaggggcaagatatcagcagttaattaaggaccttgcagataaataccctactgagaacttgctgcttgttacacatggggaaggagtcaaggtagctgtttcttcattcaaaaaggatgctgaggtaaatgaagtcgattactgtggatatgtggaacttagacgtcccatgttcataaaagatcacacatttgccgctggagagttcgatttacttacaactagtggtcaaactggcgtaagctatttcctaccacgtcctttgggaagtgacaccaaccaaactttaccatgatcaagcatatactcgtgattctcacttcaagtttgtgagctttatacttgagtggtgtctgtttcaaggtttataattaggtgaattaaaaaaaaaacatgttaattaggatttaacatgtataggaacttttcaaatgctaggagaaaatgaaagtgaaaatctacatgttcctgattcggatgtcataatttcagaatatttccatagaaaattaatatatcctctccttaacatggagaatggagattaaagtcaagtaaaatatcacaaaactttcttaaagaacaaatatatagcccgtttggttgtaagttacacaagtacttcgctttcgtcaaagtaatatataaataagtagg

SEQ ID NO: 52574 - protein, 290 aa, Glycine max
  peptide (1)..(290): Ceres Seq. ID no. 14314839
  misc_feature (42)..(158): Pfam Name: Phosphoglycerate mutase family Pfam Description: Phosphoglycerate mutase family
  misc_feature (42)..(141): Homolog of NCBI NO: 23128704 NR Description: hypothetical protein [Nostoc punctiforme]
  misc_feature (42)..(143): Homolog of NCBI NO: 23042637 NR Description: hypothetical protein [Trichodesmium erythraeum
  misc_feature (47)..(275): Homolog of NCBI NO: 21592687 NR Description: unknown [Arabidopsis thaliana]
  misc_feature (38)..(275): Homolog of NCBI NO: 15232324 NR Description: expressed protein [Arabidopsis thaliana]
  misc_feature (41)..(275): Homolog of NCBI NO: 15232326 NR Description: hypothetical protein [Arabidopsis thaliana]
  misc_feature (40)..(275): Homolog of NCBI NO: 15232328 NR Description: expressed protein [Arabidopsis thaliana]
  misc_feature (68)..(277): Homolog of NCBI NO: 25347741 NR Description: pRIB5 protein [imported] - Ribes nigrum
  misc_feature (41)..(275): Homolog of NCBI NO: 21553703 NR Description: pRIB5 protein [Arabidopsis thaliana]
  misc_feature (41)..(275): Homolog of NCBI NO: 15232331 NR Description: expressed protein [Arabidopsis thaliana]
HSIRKSQFSFSLVNSETPTRSVGVGSVKMSSRGKQGAIVSYQNVVVMRHGERFDNFEPSWAATAARPWDPPLAEAGRKRAFKTGLRLRESVEFPIGRVFVSPFLRCLQTAVELVASLSDGVAVKPSEVKVSVEYGLCEMMNSKAIRPNVAPKDGNMGFDVAVCEAMLPAEIVDKNVERMCKELPQWEESVLQAGARYQQLIKDLADKYPTENLLLVTHGEGVKVAVSSFKKDAEVNEVDYCGYVELRRPMFIKDHTFAAGEFDLLTTSGQTGVSYFLPRPLGSDTNQTLP

SEQ ID NO: 52575 - protein, 262 aa, Glycine max
  peptide (1)..(262): Ceres Seq. ID no. 14314840
  misc_feature (14)..(130): Pfam Name: Phosphoglycerate mutase family Pfam Description: Phosphoglycerate mutase family
  misc_feature (14)..(113): Homolog of NCBI NO: 23128704 NR Description: hypothetical protein [Nostoc punctiforme]
  misc_feature (14)..(115): Homolog of NCBI NO: 23042637 NR Description: hypothetical protein [Trichodesmium erythraeum
  misc_feature (19)..(247): Homolog of NCBI NO: 21592687 NR Description: unknown [Arabidopsis thaliana]
  misc_feature (10)..(247): Homolog of NCBI NO: 15232324 NR Description: expressed protein [Arabidopsis thaliana]
  misc_feature (13)..(247): Homolog of NCBI NO: 15232326 NR Description: hypothetical protein [Arabidopsis thaliana]
  misc_feature (12)..(247): Homolog of NCBI NO: 15232328 NR Description: expressed protein [Arabidopsis thaliana]
  misc_feature (40)..(249): Homolog of NCBI NO: 25347741 NR Description: pRIB5 protein [imported] - Ribes nigrum
  misc_feature (13)..(247): Homolog of NCBI NO: 21553703 NR Description: pRIB5 protein [Arabidopsis thaliana]
  misc_feature (13)..(247): Homolog of NCBI NO: 15232331 NR Description: expressed protein [Arabidopsis thaliana]
MSSRGKQGAIVSYQNVVVMRHGERFDNFEPSWAATAARPWDPPLAEAGRKRAFKTGLRLRESVEFPIGRVFVSPFLRCLQTAVELVASLSDGVAVKPSEVKVSVEYGLCEMMNSKAIRPNVAPKDGNMGFDVAVCEAMLPAEIVDKNVERMCKELPQWEESVLQAGARYQQLIKDLADKYPTENLLLVTHGEGVKVAVSSFKKDAEVNEVDYCGYVELRRPMFIKDHTFAAGEFDLLTTSGQTGVSYFLPRPLGSDTNQTLP

SEQ ID NO: 52576 - protein, 244 aa, Glycine max
  peptide (1)..(244): Ceres Seq. ID no. 14314841
  misc_feature (1)..(112): Pfam Name: Phosphoglycerate mutase family Pfam Description: Phosphoglycerate mutase family
  misc_feature (1)..(95): Homolog of NCBI NO: 23128704 NR Description: hypothetical protein [Nostoc punctiforme]
  misc_feature (1)..(97): Homolog of NCBI NO: 23042637 NR Description: hypothetical protein [Trichodesmium erythraeum
  misc_feature (1)..(229): Homolog of NCBI NO: 21592687 NR Description: unknown [Arabidopsis thaliana]
  misc_feature (1)..(229): Homolog of NCBI NO: 15232324 NR Description: expressed protein [Arabidopsis thaliana]
  misc_feature (1)..(229): Homolog of NCBI NO: 15232326 NR Description: hypothetical protein [Arabidopsis thaliana]
  misc_feature (1)..(229): Homolog of NCBI NO: 15232328 NR Description: expressed protein [Arabidopsis thaliana]
  misc_feature (22)..(231): Homolog of NCBI NO: 25347741 NR Description: pRIB5 protein [imported] - Ribes nigrum
  misc_feature (1)..(229): Homolog of NCBI NO: 21553703 NR Description: pRIB5 protein [Arabidopsis thaliana]
  misc_feature (1)..(229): Homolog of NCBI NO: 15232331 NR Description: expressed protein [Arabidopsis thaliana]
MRHGERFDNFEPSWAATAARPWDPPLAEAGRKRAFKTGLRLRESVEFPIGRVFVSPFLRCLQTAVELVASLSDGVAVKPSEVKVSVEYGLCEMMNSKAIRPNVAPKDGNMGFDVAVCEAMLPAEIVDKNVERMCKELPQWEESVLQAGARYQQLIKDLADKYPTENLLLVTHGEGVKVAVSSFKKDAEVNEVDYCGYVELRRPMFIKDHTFAAGEFDLLTTSGQTGVSYFLPRPLGSDTNQTLP

SEQ ID NO: 52577 - DNA, 1170 bp, Glycine max
  misc_feature (1)..(1170): Ceres Seq. ID no. 14304378
tcctctacactgttccttttcaccaatccattttctgacttttctcactctgctcatggctttgcttttcttatcatcacctattctcttggaatcatagttagttatcttttgcaacgtaaataacaacaataattatagccaatggaggaggagagcgagtttcttttagaaatgaagctaattatcatctcgttatgcactgaaacactttctcttctctctgttcactcttcccaacctctgttttcatgcattgtcactttctgtttcttgattctcctttatttgcctcatctattttggaagatagttttctcacccgtgctgattctgtccggggttctcttgctcctcctcctccgtctcggtgcaattcagaggtctcaaaatgaagagaagaaaaactcggttgaaccagaacccattgcaaacgaagaaaacaggggaaacagagaagagaaacaggggaaccccattgaaccggtggaaaccgattctctcgatcatgtttacaggtgggtcacgagccaatctcaaaaagagatcaaatctcaaatgggttttcaatcaagttcgcgttttgacgagtctttcgtggagtggaatgtgaaagcgccgttggaggtcatatacgaaggtgaagaaacagagcaggatcagaatgagaaacgtgacgagggtattttgaggtacccgtcgttgtcacggtactaccctgaaactgactccgatagctcgtcggagagtgagtttccggcgacggagaactgggactcgccggagaacatgtgcttcaggtgggatgaagaagacagagaagggttaattgagattgctcttgacggttgcaagaagagggacgtggggtttcacttcgatgaggagaatttgattgaaattgatatttctccgacgaggcacagggaattttccggcaaggacgaccccttttccggtgagatttgttgcaattagtgtgatgtttactaaagattaacatggtggattattatgtgatttgtttggggataagggaaagggaaaattagagatttggagttactttgggttatggcagagtatgcctgttttggatgtggtcaccgttgtactctcttatcaaagctttaagtgcaattaatccctaatccctaatattcaaatgtc

SEQ ID NO: 52578 - protein, 277 aa, Glycine max
  peptide (1)..(277): Ceres Seq. ID no. 14304379
  misc_feature (21)..(93): Homolog of NCBI NO: 15234492 NR Description: hypothetical protein [Arabidopsis thaliana]
  misc_feature (151)..(257): Homolog of NCBI NO: 15234492 NR Description: hypothetical protein [Arabidopsis thaliana]
MEEESEFLLEMKLIIISLCTETLSLLSVHSSQPLFSCIVTFCFLILLYLPHLFWKIVFSPVLILSGVLLLLLLRLGAIQRSQNEEKKNSVEPEPIANEENRGNREEKQGNPIEPVETDSLDHVYRWVTSQSQKEIKSQMGFQSSSRFDESFVEWNVKAPLEVIYEGEETEQDQNEKRDEGILRYPSLSRYYPETDSDSSSESEFPATENWDSPENMCFRWDEEDREGLIEIALDGCKKRDVGFHFDEENLIEIDISPTRHREFSGKDDPFSGEICCN

SEQ ID NO: 52579 - protein, 267 aa, Glycine max
  peptide (1)..(267): Ceres Seq. ID no. 14304380
  misc_feature (11)..(83): Homolog of NCBI NO: 15234492 NR Description: hypothetical protein [Arabidopsis thaliana]
  misc_feature (141)..(247): Homolog of NCBI NO: 15234492 NR Description: hypothetical protein [Arabidopsis thaliana]
MKLIIISLCTETLSLLSVHSSQPLFSCIVTFCFLILLYLPHLFWKIVFSPVLILSGVLLLLLLRLGAIQRSQNEEKKNSVEPEPIANEENRGNREEKQGNPIEPVETDSLDHVYRWVTSQSQKEIKSQMGFQSSSRFDESFVEWNVKAPLEVIYEGEETEQDQNEKRDEGILRYPSLSRYYPETDSDSSSESEFPATENWDSPENMCFRWDEEDREGLIEIALDGCKKRDVGFHFDEENLIEIDISPTRHREFSGKDDPFSGEICCN

SEQ ID NO: 52580 - protein, 139 aa, Glycine max
  peptide (1)..(139): Ceres Seq. ID no. 14304381
  misc_feature (13)..(119): Homolog of NCBI NO: 15234492 NR Description: hypothetical protein [Arabidopsis thaliana]
MGFQSSSRFDESFVEWNVKAPLEVIYEGEETEQDQNEKRDEGILRYPSLSRYYPETDSDSSSESEFPATENWDSPENMCFRWDEEDREGLIEIALDGCKKRDVGFHFDEENLIEIDISPTRHREFSGKDDPFSGEICCN

SEQ ID NO: 52581 - DNA, 1600 bp, Glycine max
  misc_feature (1)..(1600): Ceres Seq. ID no. 14304359
gatcattgaccaatcaacaccaactccaaacagttggaatcgacgaaacgcaaaggcatattgacattggcatggctacctcgctgtgtacacccagctacagagtcacactgaaactgtacggaacagattcccataagttaaacgcaaagccctcagttcgttataggcgtcgttttggcaccaccaccagaatatgctgcacctctaataattacaacgacaacaacatccaacgacgaccccaatccgaagctattcaagtttactcgcaaatcgagagattacttacagattctgttagacaatcacaggatggttggtggggttccccagactggagtgaagttgagggagcttggattctcaaaccgaaaagctctgaacccaattatgtagtgcattttatcggaggtatatttgttggagctgctcctcagcttacctaccggaggtttcttgagcgtctctcagaaaagggtatattgatcattgcaacgccatatgctagtgggtttgatcacttcctcattgctgatgaagtacagttcaaatttgataggtgctatcgcacactgcaagaaacaatccaagaccttcctatttttggtgttggccattctttggggtcggtggtccaccttctgattggatcaagatatgcagtgcaaagatctggaaatgttctcatggcattcaataacaaggaagcaagttcagctgttcctttgttctctcctgtgatcgtcccaatggctcaaaccattggtccacttctatcagatattttttcttcaccaactctaagagctggggcagagatgactttgaagcaactagaaaacgttagccctccaattatgaagcaggttcttcctttagttgagcagctccctcccttgtacatggatttggtcaagggaagagaagatttttctccaaagcctgaggagacacgtcgacttataaaatcatactatggcatatccagaaatcttctgataaaattccaggatgatttaatagatgagacttcaactctagcgcaggtgcttagttcagaatcagccattagctcagtgctagacatgtcaatacgaaagttgcctggagatcacggtcttccattgcaacaggccctaccaaatgttccgccagcaatggccgatgcagttaatcgtggaagtgagcttttgtcaaatcttactgttggaacaccgtgggagatagttgcgaaagaagtaggaaactcgctaggcatggattctggagtcctgcgcgctgaagtttcaaaggacatggatatgcttgtcgatgtcatcgcagcctggatagcctccaatgcagggcctaaacttcttcggccctaaggtcacggtttcatctggtccttgtcagttaaagaacacatgctgtagaaatgtataataaatcaatattggcaccgacacttctttcatcctatctcggagaatgccaatcatgtgaatccatacaagtaaagaaaatagaactctgacaatcacctgatgctgtaaaaatatgaattacattgttacaaaaaaaaaaaaaatagttgttatatagaaattattcgttc

SEQ ID NO: 52582 - protein, 455 aa, Glycine max
  peptide (1)..(455): Ceres Seq. ID no. 14304360
  misc_feature (292)..(380): Homolog of NCBI NO: 22300018 NR Description: ORF_ID:tll2476~hypothetical protein
  misc_feature (112)..(242): Homolog of NCBI NO: 22300018 NR Description: ORF_ID:tll2476~hypothetical protein
  misc_feature (271)..(378): Homolog of NCBI NO: 16329812 NR Description: hypothetical protein [Synechocystis sp. PCC 6803]
  misc_feature (112)..(242): Homolog of NCBI NO: 16329812 NR Description: hypothetical protein [Synechocystis sp. PCC 6803]
  misc_feature (288)..(378): Homolog of NCBI NO: 23129803 NR Description: hypothetical protein [Nostoc punctiforme]
  misc_feature (112)..(243): Homolog of NCBI NO: 23129803 NR Description: hypothetical protein [Nostoc punctiforme]
  misc_feature (281)..(454): Homolog of NCBI NO: 38347589 NR Description: OSJNBa0042I15.2 [Oryza sativa (japonica
  misc_feature (81)..(273): Homolog of NCBI NO: 38347589 NR Description: OSJNBa0042I15.2 [Oryza sativa (japonica
  misc_feature (194)..(441): Homolog of NCBI NO: 38569178 NR Description: OJ000315_02.20 [Oryza sativa (japonica
  misc_feature (24)..(455): Homolog of NCBI NO: 15238825 NR Description: expressed protein [Arabidopsis thaliana]
SLTNQHQLQTVGIDETQRHIDIGMATSLCTPSYRVTLKLYGTDSHKLNAKPSVRYRRRFGTTTRICCTSNNYNDNNIQRRPQSEAIQVYSQIERLLTDSVRQSQDGWWGSPDWSEVEGAWILKPKSSEPNYVVHFIGGIFVGAAPQLTYRRFLERLSEKGILIIATPYASGFDHFLIADEVQFKFDRCYRTLQETIQDLPIFGVGHSLGSVVHLLIGSRYAVQRSGNVLMAFNNKEASSAVPLFSPVIVPMAQTIGPLLSDIFSSPTLRAGAEMTLKQLENVSPPIMKQVLPLVEQLPPLYMDLVKGREDFSPKPEETRRLIKSYYGISRNLLIKFQDDLIDETSTLAQVLSSESAISSVLDMSIRKLPGDHGLPLQQALPNVPPAMADAVNRGSELLSNLTVGTPWEIVAKEVGNSLGMDSGVLRAEVSKDMDMLVDVIAAWIASNAGPKLLRP

SEQ ID NO: 52583 - protein, 432 aa, Glycine max
  peptide (1)..(432): Ceres Seq. ID no. 14304361
  misc_feature (269)..(357): Homolog of NCBI NO: 22300018 NR Description: ORF_ID:tll2476~hypothetical protein
  misc_feature (89)..(219): Homolog of NCBI NO: 22300018 NR Description: ORF_ID:tll2476~hypothetical protein
  misc_feature (248)..(355): Homolog of NCBI NO: 16329812 NR Description: hypothetical protein [Synechocystis sp. PCC 6803]
  misc_feature (89)..(219): Homolog of NCBI NO: 16329812 NR Description: hypothetical protein [Synechocystis sp. PCC 6803]
  misc_feature (265)..(355): Homolog of NCBI NO: 23129803 NR Description: hypothetical protein [Nostoc punctiforme]
  misc_feature (89)..(220): Homolog of NCBI NO: 23129803 NR Description: hypothetical protein [Nostoc punctiforme]
  misc_feature (258)..(431): Homolog of NCBI NO: 38347589 NR Description: OSJNBa0042I15.2 [Oryza sativa (japonica
  misc_feature (58)..(250): Homolog of NCBI NO: 38347589 NR Description: OSJNBa0042I15.2 [Oryza sativa (japonica
  misc_feature (171)..(418): Homolog of NCBI NO: 38569178 NR Description: OJ000315_02.20 [Oryza sativa (japonica
  misc_feature (1)..(432): Homolog of NCBI NO: 15238825 NR Description: expressed protein [Arabidopsis thaliana]
MATSLCTPSYRVTLKLYGTDSHKLNAKPSVRYRRRFGTTTRICCTSNNYNDNNIQRRPQSEAIQVYSQIERLLTDSVRQSQDGWWGSPDWSEVEGAWILKPKSSEPNYVVHFIGGIFVGAAPQLTYRRFLERLSEKGILIIATPYASGFDHFLIADEVQFKFDRCYRTLQETIQDLPIFGVGHSLGSVVHLLIGSRYAVQRSGNVLMAFNNKEASSAVPLFSPVIVPMAQTIGPLLSDIFSSPTLRAGAEMTLKQLENVSPPIMKQVLPLVEQLPPLYMDLVKGREDFSPKPEETRRLIKSYYGISRNLLIKFQDDLIDETSTLAQVLSSESAISSVLDMSIRKLPGDHGLPLQQALPNVPPAMADAVNRGSELLSNLTVGTPWEIVAKEVGNSLGMDSGVLRAEVSKDMDMLVDVIAAWIASNAGPKLLRP

SEQ ID NO: 52584 - DNA, 848 bp, Glycine max
  misc_feature (1)..(848): Ceres Seq. ID no. 14304339
attttttttcaatgtcatgttcaggaaatatctctaatgaggcatgtgtaacacctcctgatagaaccagttcacaggataaagataaagaaaagagtgcagtggaaaatggtcttatcaaggagcaagctcagccgatgatgactaagcaaacatccaatgggagcaatgaagatcattctccacaaaaggcagacagtggtcacagctggtgaggatgccattgtacctgaacataaatctggtgttgaggcactaatgccaaaactgcggcagtctgtgggacaagggctgaataagcctgctgaggtaacactactaaaccttagacgtttcagcaaaagaattggacatcagtatatggaagggccaaagatcgagaaatacaagtagatgctcaagagaatggctgaggaccaaggtgctgaatttgtatcatatgataccattaaaggagagtggaagatcaaggtcaaacacttcagcatctacaagctggtagataaaaacagttagataaacgatcacaagtaaggtttggtccatttggttcgatatggtggaggacaaaagtacagttgatagttttagaaccaaagttctgctcaaaaatgtatgtttttttcctgtcaatagtgtggatagagcttgggccaacgttattgatgatgtgcttcttatcttacggatgatgatgcattgggggatattttatagaattcaaatgtgggttttttcaagtttgattcacacagaggttatggttatttttaacttatttttcagaatcatgagggtggtgtttgatatgattttcctatttcaataataagttgatcaagagtgtc

SEQ ID NO: 52585 - protein, 90 aa, Glycine max
  peptide (1)..(90): Ceres Seq. ID no. 14304340
MVEDKSTVDSFRTKVLLKNVCFFPVNSVDRAWANVIDDVLLILRMMMHWGIFYRIQMWVFSSLIHTEVMVIFNLFFRIMRVVFDMIFLFQ

SEQ ID NO: 52586 - protein, 77 aa, Glycine max
  peptide (1)..(77): Ceres Seq. ID no. 14304341
  misc_feature (41)..(77): Homolog of NCBI NO: 34914964 NR Description: similar to Arabidopsis thaliana chromosome 1,
  misc_feature (1)..(77): Homolog of NCBI NO: 25404873 NR Description: protein T30E16.23 [imported] - Arabidopsis
  misc_feature (1)..(77): Homolog of NCBI NO: 15218866 NR Description: nucleoporin 98-related protein [Arabidopsis
  misc_feature (17)..(40): Homolog of NCBI NO: 25402598 NR Description: protein F14N23.29 [imported] - Arabidopsis
  misc_feature (38)..(77): Homolog of NCBI NO: 25402598 NR Description: protein F14N23.29 [imported] - Arabidopsis
  misc_feature (17)..(40): Homolog of NCBI NO: 22329468 NR Description: expressed protein [Arabidopsis thaliana]
  misc_feature (38)..(77): Homolog of NCBI NO: 22329468 NR Description: expressed protein [Arabidopsis thaliana]
MGAMKIILHKRQTVVTAGEDAIVPEHKSGVEALMPKLRQSVGQGLNKPAEVTLLNLRRFSKRIGHQYMEGPKIEKYK

SEQ ID NO: 52587 - protein, 74 aa, Glycine max
  peptide (1)..(74): Ceres Seq. ID no. 14304342
  misc_feature (38)..(74): Homolog of NCBI NO: 34914964 NR Description: similar to Arabidopsis thaliana chromosome 1,
  misc_feature (1)..(74): Homolog of NCBI NO: 25404873 NR Description: protein T30E16.23 [imported] - Arabidopsis
  misc_feature (1)..(74): Homolog of NCBI NO: 15218866 NR Description: nucleoporin 98-related protein [Arabidopsis
  misc_feature (14)..(37): Homolog of NCBI NO: 25402598 NR Description: protein F14N23.29 [imported] - Arabidopsis
  misc_feature (35)..(74): Homolog of NCBI NO: 25402598 NR Description: protein F14N23.29 [imported] - Arabidopsis
  misc_feature (14)..(37): Homolog of NCBI NO: 22329468 NR Description: expressed protein [Arabidopsis thaliana]
  misc_feature (35)..(74): Homolog of NCBI NO: 22329468 NR Description: expressed protein [Arabidopsis thaliana]
MKIILHKRQTVVTAGEDAIVPEHKSGVEALMPKLRQSVGQGLNKPAEVTLLNLRRFSKRIGHQYMEGPKIEKYK

SEQ ID NO: 52588 - DNA, 801 bp, Glycine max
  misc_feature (1)..(801): Ceres Seq. ID no. 12612527
atccaatccagcacagcagaccacacgtgtgtctgagaagaaaatcgaaacgcagacagtgtctctgatggcagcgtcgttcaggtggatattacaactacacaaggatgttccaaaagccgcacgcttctactccgaaggcttggacttcagcatcaatgtctgcagccttcgttgggccgaactccaatccggttctctcaagcttgccctcatgcattctcccaatgagcaagccacacagaaagggtactcatcgcttctgtcatttactgttcctgatatgaacagtacagtaactaaattaatggcgttaggagctgaactagatggacccatcaaatatgaggtccatggaaaggttgcagctatgcggtgtattgatggacatatcttaggcctctatgaacccgtgtaaagatacacataacataggagattcagtatcaacagtaccctcttttgtcatggtggattccttgcaataattgatgctgttctcttgtcaagacctgtagcagcaggattgtagcgtgtgaagcaatagggctgagaataaggcaaaatgattaggagatagaaaaaaagctatccagatatctccaaattatctgtcttgtagatgggtttgtttggtgccatccatatctgctagaggtgacagcaaatcatctgttggttttatttaatttttcgtctccctgttgaaacgttgaaacttgacgctttcaattgtagactttgcccatgcaattactcaacgattgaaatatttatggattaatgtatgtctcgtgtgcc

SEQ ID NO: 52589 - protein, 138 aa, Glycine max
  peptide (1)..(138): Ceres Seq. ID no. 12612528
  misc_feature (26)..(134): Pfam Name: Glyoxalase/Bleomycin resistance Pfam Description: Glyoxalase/Bleomycin resistance
  misc_feature (23)..(137): Homolog of NCBI NO: 23039663 NR Description: hypothetical protein [Trichodesmium erythraeum
  misc_feature (23)..(137): Homolog of NCBI NO: 37523202 NR Description: hypothetical protein glr3633 [Gloeobacter
  misc_feature (25)..(74): Homolog of NCBI NO: 34898280 NR Description: hypothetical protein~predicted by GENSCAN etc.
  misc_feature (8)..(121): Homolog of NCBI NO: 25404929 NR Description: protein F22C12.6 [imported] - Arabidopsis
  misc_feature (22)..(136): Homolog of NCBI NO: 15238137 NR Description: putative protein; protein id: At5g41650.1
  misc_feature (22)..(137): Homolog of NCBI NO: 18407989 NR Description: Expressed protein
SNPAQQTTRVSEKKIETQTVSLMAASFRWILQLHKDVPKAARFYSEGLDFSINVCSLRWAELQSGSLKLALMHSPNEQATQKGYSSLLSFTVPDMNSTVTKLMALGAELDGPIKYEVHGKVAAMRCIDGHILGLYEPV

SEQ ID NO: 52590 - protein, 116 aa, Glycine max
  peptide (1)..(116): Ceres Seq. ID no. 12612529
  misc_feature (4)..(112): Pfam Name: Glyoxalase/Bleomycin resistance Pfam Description: Glyoxalase/Bleomycin resistance
  misc_feature (1)..(115): Homolog of NCBI NO: 23039663 NR Description: hypothetical protein [Trichodesmium erythraeum
  misc_feature (1)..(115): Homolog of NCBI NO: 37523202 NR Description: hypothetical protein glr3633 [Gloeobacter
  misc_feature (3)..(52): Homolog of NCBI NO: 34898280 NR Description: hypothetical protein~predicted by GENSCAN etc.
  misc_feature (1)..(99): Homolog of NCBI NO: 25404929 NR Description: protein F22C12.6 [imported] - Arabidopsis
  misc_feature (1)..(114): Homolog of NCBI NO: 15238137 NR Description: putative protein; protein id: At5g41650.1
  misc_feature (1)..(115): Homolog of NCBI NO: 18407989 NR Description: Expressed protein
MAASFRWILQLHKDVPKAARFYSEGLDFSINVCSLRWAELQSGSLKLALMHSPNEQATQKGYSSLLSFTVPDMNSTVTKLMALGAELDGPIKYEVHGKVAAMRCIDGHILGLYEPV

SEQ ID NO: 52591 - DNA, 1732 bp, Glycine max
  misc_feature (1)..(1732): Ceres Seq. ID no. 14311191
gtccttattaatggcttgatttttctgtttccaaaacattggttcctttctcacatgcttggtgtggtcttgtctgggtttcgatttgagtacaactttttgataagcaaaggggatatttgtcctccttgtttgacattggcctgtttgcattgagtacttgtagggagtagtaaataagaaggaaaatggatcagaagatttgtcatgggacacacttcattatgtgtacgagcttgtgaagaatgggaatgcggcatttcgagagaacagaatgcaagaggcaatcaacttatactcgagagccaataacatcaaatcaggattagcgaatatttcatgcgcagaacatcatcatcttcagaacgtaggccattgagtgggcttgaacccacaacaattgctgaactgggtttgaaggatgctgagaagcttgttgaactccaaagtaattcagcaaaatcatatcttttaaaggccagtgctcttttactgttagagaaatatgaaaaagcccgggatgttattctttcaggtcttcaagttgatccttttagtaattctcttcgggcttctcttcaaaatttggaaagagtttcatctagttcaacagggatgagtacacatggacatccagaacgtaatgatgattttgattgcactctctgcctgaagttactgtatgaacctgtcacaaccccttgtggacattctttttgccgatcgtgtctatttcagtcaatggatcgtggaaacagatgcccattgtgtaggacagttctgtttattagtcccagaacatgttccatcagtgtgacattgaagaacattatacaaaagaacttcccagaggaatatgcagaaaggaagcaagagcatgacggtttaatcaatgctggtgtagatttactccctctttttgtcatggatgttgtcataccatgtcagaggtttgcactcaatatatttgaacctcggtatagactcatggtaagaagaataatggaaggcaatcatcggatgggaatggctatacttgattcaacaggttccttagctgagtttgcctgtgaagtggaaataacagagtgtgaaccacttccagatggtcgtttttatatagagattgaaagtcgtaggagatttcgtatcatccgttctagggatcaagatgggtatcgtgttgcagaggttgaatggatacaagatattatgccaccagaaggaacaagtgaaagagagactttacaacaacaaacatataatgcagctgaagatgctcgatcgtggatagcaagagctaaaaaagcagcaaaacatgatccaagaaaacttgagagactcgccagtgttgaagtaatgatgccctcaccaaaagaccctgagcgctttagtttttggctggctactctctccaatcggaggcctgcggaaagattggatctcctacgcataagagacactgctgagaggattagacggggcctgatatttctccgacaagaagaacaaggctgcagaattcagtaagacaagctgaggactagcattattattgcaattgaatatttgtttaatgtaaatgaatatttgtttactgcaaattcatttacaagtcacataatatttttcggcctcgtaaataactgttgatgaggtcatttttgttgtaacattgggttgatcccacttttcatatatatatatatatatataacaacatatttagtgg

SEQ ID NO: 52592 - protein, 396 aa, Glycine max
  peptide (1)..(396): Ceres Seq. ID no. 14311192
  misc_feature (191)..(387): Pfam Name: ATP-dependent protease La (LON) domain Pfam Description: ATP-dependent protease La (LON) domain
  misc_feature (104)..(390): Homolog of NCBI NO: 26449305 NR Description: hypothetical protein [Macaca fascicularis]
  misc_feature (111)..(381): Homolog of NCBI NO: 18676903 NR Description: unnamed protein product [Homo sapiens]
  misc_feature (104)..(390): Homolog of NCBI NO: 34933034 NR Description: similar to hypothetical protein FLJ22612 [Rattus
  misc_feature (104)..(390): Homolog of NCBI NO: 10439066 NR Description: unnamed protein product [Homo sapiens]
  misc_feature (104)..(389): Homolog of NCBI NO: 34875721 NR Description: similar to hypothetical protein FLJ23749 [Rattus
  misc_feature (104)..(389): Homolog of NCBI NO: 38348242 NR Description: FLJ45273 protein [Homo sapiens]
  misc_feature (104)..(381): Homolog of NCBI NO: 40217796 NR Description: hypothetical protein FLJ23749 [Homo sapiens]
  misc_feature (104)..(381): Homolog of NCBI NO: 38089190 NR Description: similar to hypothetical protein FLJ23749 [Mus
  misc_feature (1)..(396): Homolog of NCBI NO: 21554128 NR Description: unknown [Arabidopsis thaliana]
  misc_feature (1)..(396): Homolog of NCBI NO: 18394639 NR Description: RING finger protein family [Arabidopsis thaliana]
MRRTSSSSERRPLSGLEPTTIAELGLKDAEKLVELQSNSAKSYLLKASALLLLEKYEKARDVILSGLQVDPFSNSLRASLQNLERVSSSSTGMSTHGHPERNDDFDCTLCLKLLYEPVTTPCGHSFCRSCLFQSMDRGNRCPLCRTVLFISPRTCSISVTLKNIIQKNFPEEYAERKQEHDGLINAGVDLLPLFVMDVVIPCQRFALNIFEPRYRLMVRRIMEGNHRMGMAILDSTGSLAEFACEVEITECEPLPDGRFYIEIESRRRFRIIRSRDQDGYRVAEVEWIQDIMPPEGTSERETLQQQTYNAAEDARSWIARAKKAAKHDPRKLERLASVEVMMPSPKDPERFSFWLATLSNRRPAERLDLLRIRDTAERIRRGLIFLRQEEQGCRIQ

SEQ ID NO: 52593 - protein, 304 aa, Glycine max
  peptide (1)..(304): Ceres Seq. ID no. 14311193
  misc_feature (99)..(295): Pfam Name: ATP-dependent protease La (LON) domain Pfam Description: ATP-dependent protease La (LON) domain
  misc_feature (12)..(298): Homolog of NCBI NO: 26449305 NR Description: hypothetical protein [Macaca fascicularis]
  misc_feature (19)..(289): Homolog of NCBI NO: 18676903 NR Description: unnamed protein product [Homo sapiens]
  misc_feature (12)..(298): Homolog of NCBI NO: 34933034 NR Description: similar to hypothetical protein FLJ22612 [Rattus
  misc_feature (12)..(298): Homolog of NCBI NO: 10439066 NR Description: unnamed protein product [Homo sapiens]
  misc_feature (12)..(297): Homolog of NCBI NO: 34875721 NR Description: similar to hypothetical protein FLJ23749 [Rattus
  misc_feature (12)..(297): Homolog of NCBI NO: 38348242 NR Description: FLJ45273 protein [Homo sapiens]
  misc_feature (12)..(289): Homolog of NCBI NO: 40217796 NR Description: hypothetical protein FLJ23749 [Homo sapiens]
  misc_feature (12)..(289): Homolog of NCBI NO: 38089190 NR Description: similar to hypothetical protein FLJ23749 [Mus
  misc_feature (1)..(304): Homolog of NCBI NO: 21554128 NR Description: unknown [Arabidopsis thaliana]
  misc_feature (1)..(304): Homolog of NCBI NO: 18394639 NR Description: RING finger protein family [Arabidopsis thaliana]
MSTHGHPERNDDFDCTLCLKLLYEPVTTPCGHSFCRSCLFQSMDRGNRCPLCRTVLFISPRTCSISVTLKNIIQKNFPEEYAERKQEHDGLINAGVDLLPLFVMDVVIPCQRFALNIFEPRYRLMVRRIMEGNHRMGMAILDSTGSLAEFACEVEITECEPLPDGRFYIEIESRRRFRIIRSRDQDGYRVAEVEWIQDIMPPEGTSERETLQQQTYNAAEDARSWIARAKKAAKHDPRKLERLASVEVMMPSPKDPERFSFWLATLSNRRPAERLDLLRIRDTAERIRRGLIFLRQEEQGCRIQ

SEQ ID NO: 52594 - protein, 262 aa, Glycine max
  peptide (1)..(262): Ceres Seq. ID no. 14311194
  misc_feature (57)..(253): Pfam Name: ATP-dependent protease La (LON) domain Pfam Description: ATP-dependent protease La (LON) domain
  misc_feature (1)..(256): Homolog of NCBI NO: 26449305 NR Description: hypothetical protein [Macaca fascicularis]
  misc_feature (1)..(247): Homolog of NCBI NO: 18676903 NR Description: unnamed protein product [Homo sapiens]
  misc_feature (1)..(256): Homolog of NCBI NO: 34933034 NR Description: similar to hypothetical protein FLJ22612 [Rattus
  misc_feature (1)..(256): Homolog of NCBI NO: 10439066 NR Description: unnamed protein product [Homo sapiens]
  misc_feature (1)..(255): Homolog of NCBI NO: 34875721 NR Description: similar to hypothetical protein FLJ23749 [Rattus
  misc_feature (1)..(255): Homolog of NCBI NO: 38348242 NR Description: FLJ45273 protein [Homo sapiens]
  misc_feature (1)..(247): Homolog of NCBI NO: 40217796 NR Description: hypothetical protein FLJ23749 [Homo sapiens]
  misc_feature (1)..(247): Homolog of NCBI NO: 38089190 NR Description: similar to hypothetical protein FLJ23749 [Mus
  misc_feature (1)..(262): Homolog of NCBI NO: 21554128 NR Description: unknown [Arabidopsis thaliana]
  misc_feature (1)..(262): Homolog of NCBI NO: 18394639 NR Description: RING finger protein family [Arabidopsis thaliana]
MDRGNRCPLCRTVLFISPRTCSISVTLKNIIQKNFPEEYAERKQEHDGLINAGVDLLPLFVMDVVIPCQRFALNIFEPRYRLMVRRIMEGNHRMGMAILDSTGSLAEFACEVEITECEPLPDGRFYIEIESRRRFRIIRSRDQDGYRVAEVEWIQDIMPPEGTSERETLQQQTYNAAEDARSWIARAKKAAKHDPRKLERLASVEVMMPSPKDPERFSFWLATLSNRRPAERLDLLRIRDTAERIRRGLIFLRQEEQGCRIQ

SEQ ID NO: 52595 - DNA, 1328 bp, Glycine max
  misc_feature (1)..(1328): Ceres Seq. ID no. 15170745
gtcgtggtgcggtggtttgtggtgaaaatttgcataataatcttttgcagaaagcaagcaagaaagaaaaagggccatggaggccctgcacttgcaccgcgtgcttctcatgcctgtttcccaaaaaacctcaatctttttgcgcgccagtggcaccccattatccacacttgcaaggccaccattgcgttggagctctcaaacttgcagtgccagagcagggtggtttttgggtcttggagcagacagcaagaagaccaatttacctgataccgtcaaagccggtgaccccgttctgcacgagccagcccaggatgttgatcctaacgaaataaagtcggagagagtgcagaagattattgatgacatgatccaggtcatgagaaaggctcctggtgttggtcttgctgctccccagattggaattcctttgaggataattgttttggaagatacaaaagagtacattagttatgtctcaaaggaagaggctaaaactcaagatagaagaccttttgatcttttggtgatcctgaatcccaagctagagaagaagggcaagaggactgctctgttttttgaagggtgcttgagtgttgatgggttcagagcagtggtggagcgacaccttgacgttgaagttacaggtttggatcgttatggtgcaccaatcaaaataatcgcttctggctggcaggctcggattttacaacacgagtgtgatcacttggatggaactctgtatgttgataagatgctacctagaactttcagaactgtggacaacatggacctgcctcttgcccaggggtgccccaaacttggtcctcgctaaaattacactccagctgtttctgataaggcattcaatgcaggtatctaatgcattttagtgaacaattgacatttgtagatcctaaaatggaggccagattctttacattctagaaatagtctcaacttaagaaaaattaaatctccctcaattttcaatgccatcattttgccaagaattgccattgcactactcctgattaattcacttcatttaagtttcaatgttgtagcttatactcgaaaaaaaaaatcagagttgtggactatggagtctggatattgacagtgcctagtttttctgcccattgacaaaaaattgggtttgctgtcttcttgttatttggagcattgaggtggctacttaggcattagaaattcatgtaacttttgtcagctctaatgcaaacttataccaattgtgtgcagatcttggctatttcatccttcaatgatgagggagaattgtcgttctaataaatcagaatgatatg

SEQ ID NO: 52596 - protein, 252 aa, Glycine max
  peptide (1)..(252): Ceres Seq. ID no. 15170746
  misc_feature (68)..(235): Homolog of NCBI NO: 11641243 NR Description: peptide deformylase-like protein [Homo sapiens]
  misc_feature (63)..(226): Homolog of NCBI NO: 21219403 NR Description: polypeptide deformylase. [Streptomyces coelicolor
  misc_feature (70)..(245): Homolog of NCBI NO: 24645728 NR Description: CG31373-PA [Drosophila melanogaster]
  misc_feature (68)..(240): Homolog of NCBI NO: 34851655 NR Description: similar to peptide deformylase-like protein
  misc_feature (65)..(239): Homolog of NCBI NO: 37521298 NR Description: polypeptide deformylase [Gloeobacter violaceus]
  misc_feature (65)..(239): Homolog of NCBI NO: 39930960 NR Description: Peptide deformylase 1 (PDF 1) (Polypeptide
  misc_feature (38)..(220): Homolog of NCBI NO: 34913982 NR Description: peptide deformylase-like protein
  misc_feature (40)..(252): Homolog of NCBI NO: 17433051 NR Description: Peptide deformylase, mitochondrial precursor
  misc_feature (1)..(252): Homolog of NCBI NO: 18394237 NR Description: peptide deformylase-related protein [Arabidopsis
  misc_feature (39)..(250): Homolog of NCBI NO: 17433049 NR Description: Peptide deformylase, mitochondrial precursor
MEALHLHRVLLMPVSQKTSIFLRASGTPLSTLARPPLRWSSQTCSARAGWFLGLGADSKKTNLPDTVKAGDPVLHEPAQDVDPNEIKSERVQKIIDDMIQVMRKAPGVGLAAPQIGIPLRIIVLEDTKEYISYVSKEEAKTQDRRPFDLLVILNPKLEKKGKRTALFFEGCLSVDGFRAVVERHLDVEVTGLDRYGAPIKIIASGWQARILQHECDHLDGTLYVDKMLPRTFRTVDNMDLPLAQGCPKLGPR

SEQ ID NO: 52597 - protein, 241 aa, Glycine max
  peptide (1)..(241): Ceres Seq. ID no. 15170747
  misc_feature (57)..(224): Homolog of NCBI NO: 11641243 NR Description: peptide deformylase-like protein [Homo sapiens]
  misc_feature (52)..(215): Homolog of NCBI NO: 21219403 NR Description: polypeptide deformylase. [Streptomyces coelicolor
  misc_feature (59)..(234): Homolog of NCBI NO: 24645728 NR Description: CG31373-PA [Drosophila melanogaster]
  misc_feature (57)..(229): Homolog of NCBI NO: 34851655 NR Description: similar to peptide deformylase-like protein
  misc_feature (54)..(228): Homolog of NCBI NO: 37521298 NR Description: polypeptide deformylase [Gloeobacter violaceus]
  misc_feature (54)..(228): Homolog of NCBI NO: 39930960 NR Description: Peptide deformylase 1 (PDF 1) (Polypeptide
  misc_feature (27)..(209): Homolog of NCBI NO: 34913982 NR Description: peptide deformylase-like protein
  misc_feature (29)..(241): Homolog of NCBI NO: 17433051 NR Description: Peptide deformylase, mitochondrial precursor
  misc_feature (1)..(241): Homolog of NCBI NO: 18394237 NR Description: peptide deformylase-related protein [Arabidopsis
  misc_feature (28)..(239): Homolog of NCBI NO: 17433049 NR Description: Peptide deformylase, mitochondrial precursor
MPVSQKTSIFLRASGTPLSTLARPPLRWSSQTCSARAGWFLGLGADSKKTNLPDTVKAGDPVLHEPAQDVDPNEIKSERVQKIIDDMIQVMRKAPGVGLAAPQIGIPLRIIVLEDTKEYISYVSKEEAKTQDRRPFDLLVILNPKLEKKGKRTALFFEGCLSVDGFRAVVERHLDVEVTGLDRYGAPIKIIASGWQARILQHECDHLDGTLYVDKMLPRTFRTVDNMDLPLAQGCPKLGPR

SEQ ID NO: 52598 - protein, 155 aa, Glycine max
  peptide (1)..(155): Ceres Seq. ID no. 15170748
  misc_feature (1)..(138): Homolog of NCBI NO: 11641243 NR Description: peptide deformylase-like protein [Homo sapiens]
  misc_feature (1)..(129): Homolog of NCBI NO: 21219403 NR Description: polypeptide deformylase. [Streptomyces coelicolor
  misc_feature (1)..(148): Homolog of NCBI NO: 24645728 NR Description: CG31373-PA [Drosophila melanogaster]
  misc_feature (1)..(143): Homolog of NCBI NO: 34851655 NR Description: similar to peptide deformylase-like protein
  misc_feature (1)..(142): Homolog of NCBI NO: 37521298 NR Description: polypeptide deformylase [Gloeobacter violaceus]
  misc_feature (1)..(142): Homolog of NCBI NO: 39930960 NR Description: Peptide deformylase 1 (PDF 1) (Polypeptide
  misc_feature (1)..(123): Homolog of NCBI NO: 34913982 NR Description: peptide deformylase-like protein
  misc_feature (1)..(155): Homolog of NCBI NO: 17433051 NR Description: Peptide deformylase, mitochondrial precursor
  misc_feature (1)..(155): Homolog of NCBI NO: 18394237 NR Description: peptide deformylase-related protein [Arabidopsis
  misc_feature (1)..(153): Homolog of NCBI NO: 17433049 NR Description: Peptide deformylase, mitochondrial precursor
MIQVMRKAPGVGLAAPQIGIPLRIIVLEDTKEYISYVSKEEAKTQDRRPFDLLVILNPKLEKKGKRTALFFEGCLSVDGFRAVVERHLDVEVTGLDRYGAPIKIIASGWQARILQHECDHLDGTLYVDKMLPRTFRTVDNMDLPLAQGCPKLGPR

SEQ ID NO: 52599 - DNA, 1072 bp, Glycine max
  misc_feature (1)..(1072): Ceres Seq. ID no. 14309527
gcggtgaccggtgaaggactgaattttaattttgattcagtgactctcccagcctgatccaaaccaaaacaaaatccctttaaaaccctagtctcgcaatttcgaaatttatcactcactcaatcactctcatcatccactcgtcttattctcagaaaagagaagaagaaatggtgttaggcgtgagagagataagctgtagcggagagccagtccttgacagtgataacggggaggagttgatgcaggtgcaaccgggcatagacatagtcctcggcgatcttcctcgccagtcccccggcacactctatatcactaacaagtgtgctctcctctcctctcattcgcaatttctcttgtattgttgtgtgttctattcacactttggtctcgcttacacacagattgatacaggagaagcggatgatgaccactctgattctgaatccaatcatatccaacaagatttgtcccacatcacagagatgaggctcattccctctgatcctactcaattggattctctctttgcaatattctgccagtgtgcagagcttaatccagaaccaaacgatgaggaaggagaaggacatggttgggtttttagtgctgatgagatgggagatgaagaagcagaggacgaaggttatatctttcacaatccagccaactctattggtcactcaaatggaaatcatgacctaactcgtacgacacttgagcttcaaatcaatgatcaaagatttgaggatgcagaagagatggaggacaatggagatggcaaccattattgagtgtctttgttttctccaaaatagcattttctagtctttaccaaaagtcatcaactgtatgttgtgtagtttggttctatatatgtaatcctattatgaaacatctgaccagaggcttagagtggtttatcttagacctttttttttctttcctgcagtagaaagcagctggatactgagcttaaagctgtattatgtagaacagtagaagaaatttgaacattgtttggataatttattgagaatgttcatgcaaataattagtgtgtttggttctc

SEQ ID NO: 52600 - protein, 207 aa, Glycine max
  peptide (1)..(207): Ceres Seq. ID no. 14309528
  misc_feature (80)..(184): Homolog of NCBI NO: 18873796 NR Description: swelling dependent chloride channel [Danio rerio]
  misc_feature (111)..(205): Homolog of NCBI NO: 19881624 NR Description: Hypothetical protein [Oryza sativa]
  misc_feature (80)..(205): Homolog of NCBI NO: 21671879 NR Description: Hypothetical protein [Oryza sativa (japonica
  misc_feature (68)..(205): Homolog of NCBI NO: 37531488 NR Description: hypothetical protein [Oryza sativa (japonica
  misc_feature (11)..(198): Homolog of NCBI NO: 15241766 NR Description: expressed protein [Arabidopsis thaliana]
MVLGVREISCSGEPVLDSDNGEELMQVQPGIDIVLGDLPRQSPGTLYITNKCALLSSHSQFLLYCCVFYSHFGLAYTQIDTGEADDDHSDSESNHIQQDLSHITEMRLIPSDPTQLDSLFAIFCQCAELNPEPNDEEGEGHGWVFSADEMGDEEAEDEGYIFHNPANSIGHSNGNHDLTRTTLELQINDQRFEDAEEMEDNGDGNHY

SEQ ID NO: 52601 - protein, 183 aa, Glycine max
  peptide (1)..(183): Ceres Seq. ID no. 14309529
  misc_feature (56)..(160): Homolog of NCBI NO: 18873796 NR Description: swelling dependent chloride channel [Danio rerio]
  misc_feature (87)..(181): Homolog of NCBI NO: 19881624 NR Description: Hypothetical protein [Oryza sativa]
  misc_feature (56)..(181): Homolog of NCBI NO: 21671879 NR Description: Hypothetical protein [Oryza sativa (japonica
  misc_feature (44)..(181): Homolog of NCBI NO: 37531488 NR Description: hypothetical protein [Oryza sativa (japonica
  misc_feature (1)..(174): Homolog of NCBI NO: 15241766 NR Description: expressed protein [Arabidopsis thaliana]
MQVQPGIDIVLGDLPRQSPGTLYITNKCALLSSHSQFLLYCCVFYSHFGLAYTQIDTGEADDDHSDSESNHIQQDLSHITEMRLIPSDPTQLDSLFAIFCQCAELNPEPNDEEGEGHGWVFSADEMGDEEAEDEGYIFHNPANSIGHSNGNHDLTRTTLELQINDQRFEDAEEMEDNGDGNHY

SEQ ID NO: 52602 - DNA, 2185 bp, Glycine max
  misc_feature (1)..(2185): Ceres Seq. ID no. 15170764
atacaactacaagggaaagaagcagttatacaccctcgagaatggtgaaattccaggcaaaattataaaaccatttttttctctccgtccaaacggcagatccgatccgccctacaatcccctctcagtttttctctcgaggatccggtgaaacgacatggcgatggtggaccagcctctgtatccgattgccgttttgatcgacgagttgaagaacgaggacattcagctgcgcctgaactcgatccggaggctctccacgatcgcgcgcgcgctcggcgaggaccgcacgcggaaggagctgattccgttcctcagcgagaacaacgacgatgacgacgaagtgcttctcgcaatggccgaggaattaggcgtcttcattccctacgtcggaggcgtcgaccacgccaacgtgcttcttcctcccttggagactctctgcaccgttgaggaaacctgcgtcagagacaaatcggtggagtcgctgtgcagaattggagcacagatgagggagcaagacttggttgagcacttcattcctttagttaagaggctggctgctggtgagtggttcacggcacgggtttcgtcgtgcggtttgttccatattgcttaccccagtgcaccagagtcggtgaagactgaactgagagccatatatggtcagctgtgtcaagatgatatgcccatggttaggagatccgctgccacaaacctgggaaagtttgccgcaactgttgaagctcctcacttgaaatctgacatcatgtctgtgtttgaggatctcacacaggatgatcaagattctgttcggctacttgctgttgagggttgtgcagctctgggaaaattgttggaacctcaagattgtgtggcacatattcttcctgtcatagtcaatttttctcaggataattcatggcgtgttcgttacatggttgctaatcaactatatgagctatgtgaagctgttggtcctgaccccaccaggtcagaattggtccctgcatatgttcgtctgctgcgtgataatgaggctgaagtacgtattgctgctgctgggaaagtaactaagttttcccgcattttaaatcctgaccttgccattcagcatattctaccatgtgtgaaggagttatcaacagattcatctcaacatgttcgctctgcactggcttctgttataatgggtatggcaccggtgttagggaaggatgctacaattgagcaacttctgcctattttcctttctcttttgaaagacgagtttcctgatgtcaggctaaatattatcagcaagcttgatcaagtgaaccaggttattggtattgatttgttatctcagtctctgttgccagccatagtagaattagctgaggatcggcactggagagttcgacttgcaatcatagaatacatacccttattggcaagccagttgggtgttggtttttttgatgataagcttggagctctttgcatgcaatggctaaaggacaaggtatactcaatccgtgatgcagccgctaataacatcaaacgcttggcagaagaatttggaccggattgggcaatgcagcacattattccccaggttttggacatggttactgatccacattatctgtatcggatgacaatcttacaagcaatttctctactagctcctgttctgggctcggagattacttcttcaaaactgctccctctggtcattaatgcatcaaaggatagggtacccaatatcaaattcaatgtagctaaagtgttgcagtctctcatcccaattgttgatcagtctgttgttgagagtaccatccgtccctgtctggttgagctcagtgaggatccagatgttgatgttaggtttttcgcctcacaagcactacaatctagtgatcaagtcaagatgtctagctagatcagtttgcatgtggtctttagttattttttttttcttataagatttccattttcttgtgtaattggcatgacgccaacttgccccatcctttgtatcacatataattgttgtgatcctgctttgctttcattttatccgtacctatgctaccgggttctttgtagtgatgaaacattgttcagaagtgagatgggttttgacgaccactaattatatggtttaccaatgtgaagattttgtatgaaattttgatttaccaat

SEQ ID NO: 52603 - protein, 587 aa, Glycine max
  peptide (1)..(587): Ceres Seq. ID no. 15170765
  misc_feature (429)..(467): Pfam Name: HEAT repeat Pfam Description: HEAT repeat
  misc_feature (1)..(581): Homolog of NCBI NO: 15222601 NR Description: serine/threonine protein phosphatase 2A, 65 KDa
  misc_feature (52)..(587): Homolog of NCBI NO: 3928142 NR Description: protein phosphatase [Cicer arietinum]
  misc_feature (1)..(587): Homolog of NCBI NO: 25313492 NR Description: probable protein phosphotase 2a 65K chain -
  misc_feature (1)..(586): Homolog of NCBI NO: 7447393 NR Description: phosphoprotein phosphatase (EC 3.1.3.16) 2A
  misc_feature (1)..(587): Homolog of NCBI NO: 22329534 NR Description: serine/threonine protein phosphatase 2A
  misc_feature (1)..(587): Homolog of NCBI NO: 5679684 NR Description: phosphatase 2A regulatory A subunit [Oryza
  misc_feature (1)..(587): Homolog of NCBI NO: 1076389 NR Description: phosphoprotein phosphatase 2A 65K regulatory
  misc_feature (3)..(587): Homolog of NCBI NO: 11094365 NR Description: Ser/Thr specific protein phosphatase 2A A
  misc_feature (1)..(587): Homolog of NCBI NO: 15230896 NR Description: serine/threonine protein phosphatase 2A, 65 KDa
  misc_feature (1)..(587): Homolog of NCBI NO: 11094367 NR Description: Ser/Thr specific protein phosphatase 2A A
MAMVDQPLYPIAVLIDELKNEDIQLRLNSIRRLSTIARALGEDRTRKELIPFLSENNDDDDEVLLAMAEELGVFIPYVGGVDHANVLLPPLETLCTVEETCVRDKSVESLCRIGAQMREQDLVEHFIPLVKRLAAGEWFTARVSSCGLFHIAYPSAPESVKTELRAIYGQLCQDDMPMVRRSAATNLGKFAATVEAPHLKSDIMSVFEDLTQDDQDSVRLLAVEGCAALGKLLEPQDCVAHILPVIVNFSQDNSWRVRYMVANQLYELCEAVGPDPTRSELVPAYVRLLRDNEAEVRIAAAGKVTKFSRILNPDLAIQHILPCVKELSTDSSQHVRSALASVIMGMAPVLGKDATIEQLLPIFLSLLKDEFPDVRLNIISKLDQVNQVIGIDLLSQSLLPAIVELAEDRHWRVRLAIIEYIPLLASQLGVGFFDDKLGALCMQWLKDKVYSIRDAAANNIKRLAEEFGPDWAMQHIIPQVLDMVTDPHYLYRMTILQAISLLAPVLGSEITSSKLLPLVINASKDRVPNIKFNVAKVLQSLIPIVDQSVVESTIRPCLVELSEDPDVDVRFFASQALQSSDQVKMSS

SEQ ID NO: 52604 - protein, 585 aa, Glycine max
  peptide (1)..(585): Ceres Seq. ID no. 15170766
  misc_feature (427)..(465): Pfam Name: HEAT repeat Pfam Description: HEAT repeat
  misc_feature (1)..(579): Homolog of NCBI NO: 15222601 NR Description: serine/threonine protein phosphatase 2A, 65 KDa
  misc_feature (50)..(585): Homolog of NCBI NO: 3928142 NR Description: protein phosphatase [Cicer arietinum]
  misc_feature (1)..(585): Homolog of NCBI NO: 25313492 NR Description: probable protein phosphotase 2a 65K chain -
  misc_feature (1)..(584): Homolog of NCBI NO: 7447393 NR Description: phosphoprotein phosphatase (EC 3.1.3.16) 2A
  misc_feature (1)..(585): Homolog of NCBI NO: 22329534 NR Description: serine/threonine protein phosphatase 2A
  misc_feature (1)..(585): Homolog of NCBI NO: 5679684 NR Description: phosphatase 2A regulatory A subunit [Oryza
  misc_feature (1)..(585): Homolog of NCBI NO: 1076389 NR Description: phosphoprotein phosphatase 2A 65K regulatory
  misc_feature (1)..(585): Homolog of NCBI NO: 11094365 NR Description: Ser/Thr specific protein phosphatase 2A A
  misc_feature (1)..(585): Homolog of NCBI NO: 15230896 NR Description: serine/threonine protein phosphatase 2A, 65 KDa
  misc_feature (1)..(585): Homolog of NCBI NO: 11094367 NR Description: Ser/Thr specific protein phosphatase 2A A
MVDQPLYPIAVLIDELKNEDIQLRLNSIRRLSTIARALGEDRTRKELIPFLSENNDDDDEVLLAMAEELGVFIPYVGGVDHANVLLPPLETLCTVEETCVRDKSVESLCRIGAQMREQDLVEHFIPLVKRLAAGEWFTARVSSCGLFHIAYPSAPESVKTELRAIYGQLCQDDMPMVRRSAATNLGKFAATVEAPHLKSDIMSVFEDLTQDDQDSVRLLAVEGCAALGKLLEPQDCVAHILPVIVNFSQDNSWRVRYMVANQLYELCEAVGPDPTRSELVPAYVRLLRDNEAEVRIAAAGKVTKFSRILNPDLAIQHILPCVKELSTDSSQHVRSALASVIMGMAPVLGKDATIEQLLPIFLSLLKDEFPDVRLNIISKLDQVNQVIGIDLLSQSLLPAIVELAEDRHWRVRLAIIEYIPLLASQLGVGFFDDKLGALCMQWLKDKVYSIRDAAANNIKRLAEEFGPDWAMQHIIPQVLDMVTDPHYLYRMTILQAISLLAPVLGSEITSSKLLPLVINASKDRVPNIKFNVAKVLQSLIPIVDQSVVESTIRPCLVELSEDPDVDVRFFASQALQSSDQVKMSS

SEQ ID NO: 52605 - protein, 521 aa, Glycine max
  peptide (1)..(521): Ceres Seq. ID no. 15170767
  misc_feature (363)..(401): Pfam Name: HEAT repeat Pfam Description: HEAT repeat
  misc_feature (1)..(515): Homolog of NCBI NO: 15222601 NR Description: serine/threonine protein phosphatase 2A, 65 KDa
  misc_feature (1)..(521): Homolog of NCBI NO: 3928142 NR Description: protein phosphatase [Cicer arietinum]
  misc_feature (1)..(521): Homolog of NCBI NO: 25313492 NR Description: probable protein phosphotase 2a 65K chain -
  misc_feature (1)..(520): Homolog of NCBI NO: 7447393 NR Description: phosphoprotein phosphatase (EC 3.1.3.16) 2A
  misc_feature (1)..(521): Homolog of NCBI NO: 22329534 NR Description: serine/threonine protein phosphatase 2A
  misc_feature (1)..(521): Homolog of NCBI NO: 5679684 NR Description: phosphatase 2A regulatory A subunit [Oryza
  misc_feature (1)..(521): Homolog of NCBI NO: 1076389 NR Description: phosphoprotein phosphatase 2A 65K regulatory
  misc_feature (1)..(521): Homolog of NCBI NO: 11094365 NR Description: Ser/Thr specific protein phosphatase 2A A
  misc_feature (1)..(521): Homolog of NCBI NO: 15230896 NR Description: serine/threonine protein phosphatase 2A, 65 KDa
  misc_feature (1)..(521): Homolog of NCBI NO: 11094367 NR Description: Ser/Thr specific protein phosphatase 2A A
MAEELGVFIPYVGGVDHANVLLPPLETLCTVEETCVRDKSVESLCRIGAQMREQDLVEHFIPLVKRLAAGEWFTARVSSCGLFHIAYPSAPESVKTELRAIYGQLCQDDMPMVRRSAATNLGKFAATVEAPHLKSDIMSVFEDLTQDDQDSVRLLAVEGCAALGKLLEPQDCVAHILPVIVNFSQDNSWRVRYMVANQLYELCEAVGPDPTRSELVPAYVRLLRDNEAEVRIAAAGKVTKFSRILNPDLAIQHILPCVKELSTDSSQHVRSALASVIMGMAPVLGKDATIEQLLPIFLSLLKDEFPDVRLNIISKLDQVNQVIGIDLLSQSLLPAIVELAEDRHWRVRLAIIEYIPLLASQLGVGFFDDKLGALCMQWLKDKVYSIRDAAANNIKRLAEEFGPDWAMQHIIPQVLDMVTDPHYLYRMTILQAISLLAPVLGSEITSSKLLPLVINASKDRVPNIKFNVAKVLQSLIPIVDQSVVESTIRPCLVELSEDPDVDVRFFASQALQSSDQVKMSS

SEQ ID NO: 52606 - DNA, 1056 bp, Glycine max
  misc_feature (1)..(1056): Ceres Seq. ID no. 14309538
atcaatcaatttgcagcatcctaatctcgctcagattttctccagaaaagggaaaataaataaaaaaagagaataataataatatcttttgtaattcgcaaaacgtgatcgacgctggcgcaaattgaaattaggaattagggttagggttttcattatcttcgcccggaaaagaaaggggggaagaagaaagaaccgttcctttatgatcgaaaaggtgcctttggtcatcatcgcggtgttaatcttggtggtgcaatcctctgcagcgttccacggtataaacagaatcatgaaggtccaccctgttcctcgaaaacgcaacatctcaatccaatttggcggcgacgggggcaacccgatgtcggaggctcaggcgctgttggggatcgccgggaagaagctccggcgactaccgcacgtgttcagctgcgtgctggagctgcccttccgctccgacgccgacgttgcggtggaggaagcccccgactgcttccgctttgtggcggagaccgatggaatcggcgacgtgagggcgcacacggtggaaatccaccctggcgtgacgaagatcgtggtgagggacggcggctcggtggagctctcgctcgaccagctggagctcgatatgtggaggttccggttgccggaatcgactcggccggagctcgccagcgcggtgttcgtcgacggcgagctcatcgtcacggtgccgaaggggcacgaagaggagaatgatggggatggtgatagaggtatgggtggaggtagacttgtgcttgtacagtagtgatgaatgaatgaatgagtgggtgaggtaatgaatgattcttttgttaacgccttgtggcctttccaaacgtggccttgttagtatgtcggttagatttcaggttgttgttggaactagtttctctgtgaattttattgttgctattgttcagtcaggaacaaaaatgttttatctggattctggagaatggtttattcatcatggcaatggcaattatccaaaataggtgtaactgaggcgtgtttcgattttcatttcttctc

SEQ ID NO: 52607 - protein, 194 aa, Glycine max
  peptide (1)..(194): Ceres Seq. ID no. 14309539
  misc_feature (51)..(172): Homolog of NCBI NO: 22773244 NR Description: Hypothetical protein [Oryza sativa (japonica
  misc_feature (30)..(191): Homolog of NCBI NO: 34394452 NR Description: hypothetical protein [Oryza sativa (japonica
  misc_feature (30)..(178): Homolog of NCBI NO: 15233585 NR Description: expressed protein [Arabidopsis thaliana]
  misc_feature (30)..(194): Homolog of NCBI NO: 21553463 NR Description: unknown [Arabidopsis thaliana]
  misc_feature (30)..(194): Homolog of NCBI NO: 18403425 NR Description: expressed protein [Arabidopsis thaliana]
  misc_feature (30)..(194): Homolog of NCBI NO: 11994285 NR Description: emb|CAB10262.1~gene_id:F16J14.9~similar to
MIEKVPLVIIAVLILVVQSSAAFHGINRIMKVHPVPRKRNISIQFGGDGGNPMSEAQALLGIAGKKLRRLPHVFSCVLELPFRSDADVAVEEAPDCFRFVAETDGIGDVRAHTVEIHPGVTKIVVRDGGSVELSLDQLELDMWRFRLPESTRPELASAVFVDGELIVTVPKGHEEENDGDGDRGMGGGRLVLVQ

SEQ ID NO: 52608 - protein, 165 aa, Glycine max
  peptide (1)..(165): Ceres Seq. ID no. 14309540
  misc_feature (22)..(143): Homolog of NCBI NO: 22773244 NR Description: Hypothetical protein [Oryza sativa (japonica
  misc_feature (1)..(162): Homolog of NCBI NO: 34394452 NR Description: hypothetical protein [Oryza sativa (japonica
  misc_feature (1)..(149): Homolog of NCBI NO: 15233585 NR Description: expressed protein [Arabidopsis thaliana]
  misc_feature (1)..(165): Homolog of NCBI NO: 21553463 NR Description: unknown [Arabidopsis thaliana]
  misc_feature (1)..(165): Homolog of NCBI NO: 18403425 NR Description: expressed protein [Arabidopsis thaliana]
  misc_feature (1)..(165): Homolog of NCBI NO: 11994285 NR Description: emb|CAB10262.1~gene_id:F16J14.9~similar to
MKVHPVPRKRNISIQFGGDGGNPMSEAQALLGIAGKKLRRLPHVFSCVLELPFRSDADVAVEEAPDCFRFVAETDGIGDVRAHTVEIHPGVTKIVVRDGGSVELSLDQLELDMWRFRLPESTRPELASAVFVDGELIVTVPKGHEEENDGDGDRGMGGGRLVLVQ

SEQ ID NO: 52609 - protein, 142 aa, Glycine max
  peptide (1)..(142): Ceres Seq. ID no. 14309541
  misc_feature (1)..(120): Homolog of NCBI NO: 22773244 NR Description: Hypothetical protein [Oryza sativa (japonica
  misc_feature (1)..(139): Homolog of NCBI NO: 34394452 NR Description: hypothetical protein [Oryza sativa (japonica
  misc_feature (1)..(126): Homolog of NCBI NO: 15233585 NR Description: expressed protein [Arabidopsis thaliana]
  misc_feature (1)..(142): Homolog of NCBI NO: 21553463 NR Description: unknown [Arabidopsis thaliana]
  misc_feature (1)..(142): Homolog of NCBI NO: 18403425 NR Description: expressed protein [Arabidopsis thaliana]
  misc_feature (1)..(142): Homolog of NCBI NO: 11994285 NR Description: emb|CAB10262.1~gene_id:F16J14.9~similar to
MSEAQALLGIAGKKLRRLPHVFSCVLELPFRSDADVAVEEAPDCFRFVAETDGIGDVRAHTVEIHPGVTKIVVRDGGSVELSLDQLELDMWRFRLPESTRPELASAVFVDGELIVTVPKGHEEENDGDGDRGMGGGRLVLVQ

SEQ ID NO: 52610 - DNA, 1518 bp, Glycine max
  misc_feature (1)..(1518): Ceres Seq. ID no. 15176959
attcatttctctgcaatggatatggatctctagcattcgcattcatcccctccttttctccatgcctccgtcttcacccgttattttcttgtcctgaatgcattcccagaatgttgtagagatggaaggcaagacagaaattcgtatgacatcagctgctgcctttgttgaaggggggattcaagaatcctgtgatgatgcttgcagcatatgccttgaggagttttgtgcaagtgatccttcgacggtcactacctgcaagcatgagtttcacctgcagtgcattctcgaatggtgtcagagaagctcccagtgtcctatttgctggcaacctattagcttgaaggatcctactagtcaagaattgtttgaggcagtagagcaggagagaagctggagggctaccccttcaagaaatgctgctatttttcatcacccagcctttggtgattttgaattgcagcatttgcgcatgaatgcaaatgatgctgactttgaagagagaattattcaacatttagctgctgctgcaacgatgaggagagtgaaccagcttggtcggagggaagggcagcaaactcgttcatcacctcatgttcatccacacttcttagtgttctctaatcagcctattgcgccttcatcaggtcttgatccagtttccagaggggaaaatgacccaacagcaattcctaatagaagtccatctgccccaataacatctgatggaaatgaagcatcgcagcagatcctgcaccttcaaactcaaagctcttcttcagcttctggatctcctgtcatggctacaaatcgccaaggaatttactctaatgatagaggctctactgctcgttcttctccagtggtccaagatagagcagaatcatctgaattgcagtcattttctgattctctgcggtccagacttaatgcggtgtccatgagatacaaagagtcaatctcaaagggcactaggggatggaaggagaggctgttctcgcatagttcttccatgtcagaacttggttcagaaacaaggaggagagagatgaaagctggaattgctagtgtatcccgattgatggaatcccttgaaactagtgaaaataatagagctgtgggtacttctttgtcaaatcaaaatcatatagaggatagttccatgggaggggtgagcaaccagaacaatgttgaagctagtggagagaaatcttcacatgatgacaatactccagctgcatgttctgctagttcacatttaaattgagctcttttttgtttctgttaattcatctttcctcagcatctcatatttgaaggtaagctttgatctttgtctaaacattcagaacagaattaacagatctgccttccatttattaactaaatagctgctttggttcctattatagatgtcaccaatagctgttttgctttagtttgagagccctgtctctcctcaacacctccccaactgtcaaaattgatcccctctctacattacaacatggtttctct

SEQ ID NO: 52611 - protein, 389 aa, Glycine max
  peptide (1)..(389): Ceres Seq. ID no. 15176960
  misc_feature (36)..(76): Pfam Name: Zinc finger, C3HC4 type (RING finger) Pfam Description: Zinc finger, C3HC4 type (RING finger)
  misc_feature (33)..(349): Homolog of NCBI NO: 11358783 NR Description: RING-H2 finger protein RHF1a
  misc_feature (18)..(349): Homolog of NCBI NO: 26450997 NR Description: putative RING-H2 finger protein RHF1a
  misc_feature (18)..(349): Homolog of NCBI NO: 30682750 NR Description: zinc finger (C3HC4-type RING finger) protein
  misc_feature (18)..(349): Homolog of NCBI NO: 25360953 NR Description: RING-H2 finger protein RHF1a [imported] -
  misc_feature (17)..(117): Homolog of NCBI NO: 32400766 NR Description: RING-H2 finger protein [Triticum aestivum]
  misc_feature (12)..(279): Homolog of NCBI NO: 27819501 NR Description: putative zinc finger protein
  misc_feature (13)..(355): Homolog of NCBI NO: 26451710 NR Description: putative RING-H2 finger protein RHF2a
  misc_feature (13)..(386): Homolog of NCBI NO: 30688252 NR Description: zinc finger (C3HC4-type RING finger) protein
  misc_feature (13)..(386): Homolog of NCBI NO: 18420424 NR Description: zinc finger (C3HC4-type RING finger) protein
  misc_feature (17)..(389): Homolog of NCBI NO: 32493110 NR Description: putative RING-H2 zinc finger protein
MHSQNVVEMEGKTEIRMTSAAAFVEGGIQESCDDACSICLEEFCASDPSTVTTCKHEFHLQCILEWCQRSSQCPICWQPISLKDPTSQELFEAVEQERSWRATPSRNAAIFHHPAFGDFELQHLRMNANDADFEERIIQHLAAAATMRRVNQLGRREGQQTRSSPHVHPHFLVFSNQPIAPSSGLDPVSRGENDPTAIPNRSPSAPITSDGNEASQQILHLQTQSSSSASGSPVMATNRQGIYSNDRGSTARSSPVVQDRAESSELQSFSDSLRSRLNAVSMRYKESISKGTRGWKERLFSHSSSMSELGSETRRREMKAGIASVSRLMESLETSENNRAVGTSLSNQNHIEDSSMGGVSNQNNVEASGEKSSHDDNTPAACSASSHLN

SEQ ID NO: 52612 - protein, 381 aa, Glycine max
  peptide (1)..(381): Ceres Seq. ID no. 15176961
  misc_feature (28)..(68): Pfam Name: Zinc finger, C3HC4 type (RING finger) Pfam Description: Zinc finger, C3HC4 type (RING finger)
  misc_feature (25)..(341): Homolog of NCBI NO: 11358783 NR Description: RING-H2 finger protein RHF1a
  misc_feature (10)..(341): Homolog of NCBI NO: 26450997 NR Description: putative RING-H2 finger protein RHF1a
  misc_feature (10)..(341): Homolog of NCBI NO: 30682750 NR Description: zinc finger (C3HC4-type RING finger) protein
  misc_feature (10)..(341): Homolog of NCBI NO: 25360953 NR Description: RING-H2 finger protein RHF1a [imported] -
  misc_feature (9)..(109): Homolog of NCBI NO: 32400766 NR Description: RING-H2 finger protein [Triticum aestivum]
  misc_feature (4)..(271): Homolog of NCBI NO: 27819501 NR Description: putative zinc finger protein
  misc_feature (5)..(347): Homolog of NCBI NO: 26451710 NR Description: putative RING-H2 finger protein RHF2a
  misc_feature (5)..(378): Homolog of NCBI NO: 30688252 NR Description: zinc finger (C3HC4-type RING finger) protein
  misc_feature (5)..(378): Homolog of NCBI NO: 18420424 NR Description: zinc finger (C3HC4-type RING finger) protein
  misc_feature (9)..(381): Homolog of NCBI NO: 32493110 NR Description: putative RING-H2 zinc finger protein
MEGKTEIRMTSAAAFVEGGIQESCDDACSICLEEFCASDPSTVTTCKHEFHLQCILEWCQRSSQCPICWQPISLKDPTSQELFEAVEQERSWRATPSRNAAIFHHPAFGDFELQHLRMNANDADFEERIIQHLAAAATMRRVNQLGRREGQQTRSSPHVHPHFLVFSNQPIAPSSGLDPVSRGENDPTAIPNRSPSAPITSDGNEASQQILHLQTQSSSSASGSPVMATNRQGIYSNDRGSTARSSPVVQDRAESSELQSFSDSLRSRLNAVSMRYKESISKGTRGWKERLFSHSSSMSELGSETRRREMKAGIASVSRLMESLETSENNRAVGTSLSNQNHIEDSSMGGVSNQNNVEASGEKSSHDDNTPAACSASSHLN

SEQ ID NO: 52613 - protein, 373 aa, Glycine max
  peptide (1)..(373): Ceres Seq. ID no. 15176962
  misc_feature (20)..(60): Pfam Name: Zinc finger, C3HC4 type (RING finger) Pfam Description: Zinc finger, C3HC4 type (RING finger)
  misc_feature (17)..(333): Homolog of NCBI NO: 11358783 NR Description: RING-H2 finger protein RHF1a
  misc_feature (2)..(333): Homolog of NCBI NO: 26450997 NR Description: putative RING-H2 finger protein RHF1a
  misc_feature (2)..(333): Homolog of NCBI NO: 30682750 NR Description: zinc finger (C3HC4-type RING finger) protein
  misc_feature (2)..(333): Homolog of NCBI NO: 25360953 NR Description: RING-H2 finger protein RHF1a [imported] -
  misc_feature (1)..(101): Homolog of NCBI NO: 32400766 NR Description: RING-H2 finger protein [Triticum aestivum]
  misc_feature (1)..(263): Homolog of NCBI NO: 27819501 NR Description: putative zinc finger protein
  misc_feature (1)..(339): Homolog of NCBI NO: 26451710 NR Description: putative RING-H2 finger protein RHF2a
  misc_feature (1)..(370): Homolog of NCBI NO: 30688252 NR Description: zinc finger (C3HC4-type RING finger) protein
  misc_feature (1)..(370): Homolog of NCBI NO: 18420424 NR Description: zinc finger (C3HC4-type RING finger) protein
  misc_feature (1)..(373): Homolog of NCBI NO: 32493110 NR Description: putative RING-H2 zinc finger protein
MTSAAAFVEGGIQESCDDACSICLEEFCASDPSTVTTCKHEFHLQCILEWCQRSSQCPICWQPISLKDPTSQELFEAVEQERSWRATPSRNAAIFHHPAFGDFELQHLRMNANDADFEERIIQHLAAAATMRRVNQLGRREGQQTRSSPHVHPHFLVFSNQPIAPSSGLDPVSRGENDPTAIPNRSPSAPITSDGNEASQQILHLQTQSSSSASGSPVMATNRQGIYSNDRGSTARSSPVVQDRAESSELQSFSDSLRSRLNAVSMRYKESISKGTRGWKERLFSHSSSMSELGSETRRREMKAGIASVSRLMESLETSENNRAVGTSLSNQNHIEDSSMGGVSNQNNVEASGEKSSHDDNTPAACSASSHLN

SEQ ID NO: 52614 - DNA, 1248 bp, Glycine max
  misc_feature (1)..(1248): Ceres Seq. ID no. 15170617
cattctcaaatcatgcatcgtgttcaatttaaattgtaatatattaaagtttccatttctattttctataatttattaaaaaaaaaaacgtgtggaagaaatgaagtgatgtagattttcgagtgtggggtctgaatcacagtccacacaaacgaaccgaaccaagaacacctattttcccacaccactttactttctctgaggcttgagaagaagacaatggtggcttgcgaaacatgaagaggggcactgtgttatgcatgttcaatggcatgtcattgtgcttcttacaatgccttttcattttcaccaaccagagagttcttcgccaccaaccacatcatgtcaaaaccatcatccactactactagatgcagaccctttctcttgtccatcaccaatgccacaccatcctacaacacccttgtttctgaggctgttaggctcttggttccttcagcaagatttgaaccttcaaaactgaaggttgttctattggaagatcagataaacaaacatgcaagttttactcctagaacctacattctatcccattgtgactttacagctaatctgactttagctgtgtccaatgtgatcaacctagagcagttgagagggtggtacgagaaggatgatgttgtagctgaatggaagaaagtgcaaaatgatatgtgcctacatgttcattgctttgtcagtggtcccaattccttcctggatctggctgctgaattgagatatcacatattctccaaggaaatgcctttggtactcaaagcaattcattgtggagactctgcacttttccgtgagcatcctgaattgctggattctatagttagagtatattttcattctagctcagaaaaatataacagaatggaatgttggggacctctcaaggatgcaatggagggaaaacaagcagatcaattccaagggtcaataagaagagatagtcccgaaaagttgcggagcccaaagtccatcttccaagctctttttgcttttcttctttgaactatatcaataacttgaattatttgtttgtatcccaattccccccacagctcagaaattcaagtgggttagacaaagcaaaattcagcttgcaagaatgaaccaatcccacaaggaaactatgtatctttgggaagacccaaaaccaaaagcaaaaatgtgaagttgcacaaaagcagatttcctgtgccaccaaggcaatttgctttaatgatttctgtgact

SEQ ID NO: 52615 - protein, 251 aa, Glycine max
  peptide (1)..(251): Ceres Seq. ID no. 15170618
  misc_feature (69)..(214): Homolog of NCBI NO: 15896657 NR Description: Uncharacterized protein, homolog of YYBI fused to uncharacterized domain similar to A.thaliana (gi:3292817
  misc_feature (67)..(219): Homolog of NCBI NO: 18311568 NR Description: hypothetical protein [Clostridium perfringens]
  misc_feature (53)..(204): Homolog of NCBI NO: 38567838 NR Description: OSJNBb0020J19.16 [Oryza sativa (japonica
  misc_feature (58)..(215): Homolog of NCBI NO: 15234348 NR Description: expressed protein [Arabidopsis thaliana]
  misc_feature (51)..(216): Homolog of NCBI NO: 21592527 NR Description: unknown [Arabidopsis thaliana]
  misc_feature (51)..(216): Homolog of NCBI NO: 18416035 NR Description: expressed protein [Arabidopsis thaliana]
  misc_feature (44)..(222): Homolog of NCBI NO: 15234348 NR Description: expressed protein [Arabidopsis thaliana]
  misc_feature (1)..(236): Homolog of NCBI NO: 8778672 NR Description: F9C16.20 [Arabidopsis thaliana]
  misc_feature (1)..(251): Homolog of NCBI NO: 18401163 NR Description: expressed protein [Arabidopsis thaliana]
MACHCASYNAFSFSPTREFFATNHIMSKPSSTTTRCRPFLLSITNATPSYNTLVSEAVRLLVPSARFEPSKLKVVLLEDQINKHASFTPRTYILSHCDFTANLTLAVSNVINLEQLRGWYEKDDVVAEWKKVQNDMCLHVHCFVSGPNSFLDLAAELRYHIFSKEMPLVLKAIHCGDSALFREHPELLDSIVRVYFHSSSEKYNRMECWGPLKDAMEGKQADQFQGSIRRDSPEKLRSPKSIFQALFAFLL

SEQ ID NO: 52616 - protein, 226 aa, Glycine max
  peptide (1)..(226): Ceres Seq. ID no. 15170619
  misc_feature (44)..(189): Homolog of NCBI NO: 15896657 NR Description: Uncharacterized protein, homolog of YYBI fused to uncharacterized domain similar to A.thaliana (gi:3292817
  misc_feature (42)..(194): Homolog of NCBI NO: 18311568 NR Description: hypothetical protein [Clostridium perfringens]
  misc_feature (28)..(179): Homolog of NCBI NO: 38567838 NR Description: OSJNBb0020J19.16 [Oryza sativa (japonica
  misc_feature (33)..(190): Homolog of NCBI NO: 15234348 NR Description: expressed protein [Arabidopsis thaliana]
  misc_feature (26)..(191): Homolog of NCBI NO: 21592527 NR Description: unknown [Arabidopsis thaliana]
  misc_feature (26)..(191): Homolog of NCBI NO: 18416035 NR Description: expressed protein [Arabidopsis thaliana]
  misc_feature (19)..(197): Homolog of NCBI NO: 15234348 NR Description: expressed protein [Arabidopsis thaliana]
  misc_feature (1)..(211): Homolog of NCBI NO: 8778672 NR Description: F9C16.20 [Arabidopsis thaliana]
  misc_feature (1)..(226): Homolog of NCBI NO: 18401163 NR Description: expressed protein [Arabidopsis thaliana]
MSKPSSTTTRCRPFLLSITNATPSYNTLVSEAVRLLVPSARFEPSKLKVVLLEDQINKHASFTPRTYILSHCDFTANLTLAVSNVINLEQLRGWYEKDDVVAEWKKVQNDMCLHVHCFVSGPNSFLDLAAELRYHIFSKEMPLVLKAIHCGDSALFREHPELLDSIVRVYFHSSSEKYNRMECWGPLKDAMEGKQADQFQGSIRRDSPEKLRSPKSIFQALFAFLL

SEQ ID NO: 52617 - DNA, 1122 bp, Glycine max
  misc_feature (1)..(1122): Ceres Seq. ID no. 14309591
aaaaaggcaattattgcctctctttcttgctcgccacagcttcgtcaaagacacgcggaaaagaagaggaagggggaggcgactcgaccgaggcccggtttcgatctctggtcctccgattgcgtccagatctaccagcaatggcatcatcttcggacccatggatgaaggaatacaatgaagcatccagacttgctgatgacatcagttccatgattgccgacagagggtctcttccacaatcaggcccagaaattatgcggcatacttcagccattcggagaaaaataactattcttggtactagactggatagcttggagtcattgtttggcagaattcctccaaagtcaatcactgacaaggagatgcataaacgccaagacatgctttccagtttgaagtctaaagccaagcagatggcgacaagtttcaacatgtcaaacttcgctaacagggaggatctgcttggtcaaagtaaaatgccagatgacatgagcagagttgctgggttagataaccaaggaattgttggccttcagaggcaaattatgaaagagcaagatgagggtctcgagaagctggaagagacagtgctgagcacgaagcatattgcattagcagtcaatgaagaacttaccctgcacacaagattgatagatgaccttgaagatcatgttgatgttacaaattcacgtcttcagcgtgtgcaaaagaggcttgcaattctgaacaagcgcaccaaaggtggttgctcatgcacgtgtctgctcctatctgtcgttgccattgtgattcttgcagtcattgtttggcttctcgtcaagtatctgtaaagaaaagaaagaagcagccggctaccctgcggacctctctcgaaatgctcacctgcagccttcgcttgaaaagttccttctgtgttactccataaaatgtgcagccctttaaaattaatatgtatacacggtggtttcatcttcccttccatgagtggaatggttatggctatgtacattacatagaatttggtacgtacatgatcatcatctgcatgactgcattttgtgtatggcgtttgtcagtttgcaatgacagggtgttgatttattctgtggggtaagc

SEQ ID NO: 52618 - protein, 277 aa, Glycine max
  peptide (1)..(277): Ceres Seq. ID no. 14309592
  misc_feature (186)..(248): Pfam Name: SNARE domain Pfam Description: SNARE domain
  misc_feature (52)..(268): Homolog of NCBI NO: 9055356 NR Description: syntaxin 8; syntaxin-like protein 3I35 [Mus
  misc_feature (52)..(268): Homolog of NCBI NO: 13928908 NR Description: syntaxin 8; syntaxin-like protein 3I35 [Rattus
  misc_feature (47)..(240): Homolog of NCBI NO: 22329605 NR Description: hypothetical protein [Arabidopsis thaliana]
  misc_feature (47)..(219): Homolog of NCBI NO: 15219172 NR Description: hypothetical protein [Arabidopsis thaliana]
  misc_feature (28)..(276): Homolog of NCBI NO: 34902234 NR Description: Hypothetical protein [Oryza sativa (japonica
  misc_feature (204)..(277): Homolog of NCBI NO: 25372945 NR Description: protein F20B17.2 [imported] - Arabidopsis
  misc_feature (47)..(219): Homolog of NCBI NO: 25372945 NR Description: protein F20B17.2 [imported] - Arabidopsis
  misc_feature (47)..(277): Homolog of NCBI NO: 18394339 NR Description: syntaxin of plants 51 (SYP51) [Arabidopsis
  misc_feature (47)..(277): Homolog of NCBI NO: 21592406 NR Description: unknown [Arabidopsis thaliana]
  misc_feature (47)..(277): Homolog of NCBI NO: 18412435 NR Description: syntaxin of plants 52 (SYP52) [Arabidopsis
KGNYCLSFLLATASSKTRGKEEEGGGDSTEARFRSLVLRLRPDLPAMASSSDPWMKEYNEASRLADDISSMIADRGSLPQSGPEIMRHTSAIRRKITILGTRLDSLESLFGRIPPKSITDKEMHKRQDMLSSLKSKAKQMATSFNMSNFANREDLLGQSKMPDDMSRVAGLDNQGIVGLQRQIMKEQDEGLEKLEETVLSTKHIALAVNEELTLHTRLIDDLEDHVDVTNSRLQRVQKRLAILNKRTKGGCSCTCLLLSVVAIVILAVIVWLLVKYL

SEQ ID NO: 52619 - protein, 231 aa, Glycine max
  peptide (1)..(231): Ceres Seq. ID no. 14309593
  misc_feature (140)..(202): Pfam Name: SNARE domain Pfam Description: SNARE domain
  misc_feature (6)..(222): Homolog of NCBI NO: 9055356 NR Description: syntaxin 8; syntaxin-like protein 3I35 [Mus
  misc_feature (6)..(222): Homolog of NCBI NO: 13928908 NR Description: syntaxin 8; syntaxin-like protein 3I35 [Rattus
  misc_feature (1)..(194): Homolog of NCBI NO: 22329605 NR Description: hypothetical protein [Arabidopsis thaliana]
  misc_feature (1)..(173): Homolog of NCBI NO: 15219172 NR Description: hypothetical protein [Arabidopsis thaliana]
  misc_feature (1)..(230): Homolog of NCBI NO: 34902234 NR Description: Hypothetical protein [Oryza sativa (japonica
  misc_feature (158)..(231): Homolog of NCBI NO: 25372945 NR Description: protein F20B17.2 [imported] - Arabidopsis
  misc_feature (1)..(173): Homolog of NCBI NO: 25372945 NR Description: protein F20B17.2 [imported] - Arabidopsis
  misc_feature (1)..(231): Homolog of NCBI NO: 18394339 NR Description: syntaxin of plants 51 (SYP51) [Arabidopsis
  misc_feature (1)..(231): Homolog of NCBI NO: 21592406 NR Description: unknown [Arabidopsis thaliana]
  misc_feature (1)..(231): Homolog of NCBI NO: 18412435 NR Description: syntaxin of plants 52 (SYP52) [Arabidopsis
MASSSDPWMKEYNEASRLADDISSMIADRGSLPQSGPEIMRHTSAIRRKITILGTRLDSLESLFGRIPPKSITDKEMHKRQDMLSSLKSKAKQMATSFNMSNFANREDLLGQSKMPDDMSRVAGLDNQGIVGLQRQIMKEQDEGLEKLEETVLSTKHIALAVNEELTLHTRLIDDLEDHVDVTNSRLQRVQKRLAILNKRTKGGCSCTCLLLSVVAIVILAVIVWLLVKYL

SEQ ID NO: 52620 - protein, 223 aa, Glycine max
  peptide (1)..(223): Ceres Seq. ID no. 14309594
  misc_feature (132)..(194): Pfam Name: SNARE domain Pfam Description: SNARE domain
  misc_feature (1)..(214): Homolog of NCBI NO: 9055356 NR Description: syntaxin 8; syntaxin-like protein 3I35 [Mus
  misc_feature (1)..(214): Homolog of NCBI NO: 13928908 NR Description: syntaxin 8; syntaxin-like protein 3I35 [Rattus
  misc_feature (1)..(186): Homolog of NCBI NO: 22329605 NR Description: hypothetical protein [Arabidopsis thaliana]
  misc_feature (1)..(165): Homolog of NCBI NO: 15219172 NR Description: hypothetical protein [Arabidopsis thaliana]
  misc_feature (1)..(222): Homolog of NCBI NO: 34902234 NR Description: Hypothetical protein [Oryza sativa (japonica
  misc_feature (150)..(223): Homolog of NCBI NO: 25372945 NR Description: protein F20B17.2 [imported] - Arabidopsis
  misc_feature (1)..(165): Homolog of NCBI NO: 25372945 NR Description: protein F20B17.2 [imported] - Arabidopsis
  misc_feature (1)..(223): Homolog of NCBI NO: 18394339 NR Description: syntaxin of plants 51 (SYP51) [Arabidopsis
  misc_feature (1)..(223): Homolog of NCBI NO: 21592406 NR Description: unknown [Arabidopsis thaliana]
  misc_feature (1)..(223): Homolog of NCBI NO: 18412435 NR Description: syntaxin of plants 52 (SYP52) [Arabidopsis
MKEYNEASRLADDISSMIADRGSLPQSGPEIMRHTSAIRRKITILGTRLDSLESLFGRIPPKSITDKEMHKRQDMLSSLKSKAKQMATSFNMSNFANREDLLGQSKMPDDMSRVAGLDNQGIVGLQRQIMKEQDEGLEKLEETVLSTKHIALAVNEELTLHTRLIDDLEDHVDVTNSRLQRVQKRLAILNKRTKGGCSCTCLLLSVVAIVILAVIVWLLVKYL

SEQ ID NO: 52621 - DNA, 1582 bp, Glycine max
  misc_feature (1)..(1582): Ceres Seq. ID no. 15177324
gaatagtaaaactcccacttttaactccctttctccgccgtcgcatcgttgctgtcatacaccgctgcccccgcccatgttgcacctccttcctccatttttcagtttttctccactgtgcatcagaatccacttttcatgtattctagagcgttcaatttgaagagttgcatttgagaaatggcatcggctttgatctcgcgttcttcgcgtaggtttctcaaaccttgttcttcttcggtatctctttaccctgccatcttcaatcctgtgatttcttctcaacaatcggcaagccaaaacccctctcaaaatcccccattcaagctaccccagctccaaagtttcaattttgagttccgtaaaactactgggtctctctcaagtttccaccttgttgcgcacgtgtccacgtggccttccaaggagaacaagaaccaccaaagtggtggtaatgtgagtagtagttgggttgaattgtacttgcctaggaaggttcagccctatgctcgccttgctcgccttgataagccaattgggacatggttgcttctatggccttgtatgtggtcaattaccctggctactaccccaggtcaccttcctgattttaaaatgttggctctgtttggatgtggggctttgcttttaagaggtgccggatgtactattaatgatctccttgatcgtgatattgatacaatggtagaacggacaaagttgagacctgtggcaagtggtcttttgacaccatttcaaggactttgttttcttggttttcaattacttttgggtcttgggattcttctacaactgaataattatagccgtgttttgggtgcctcatccttgttgcttgtcttctcctatcccctcatgaagaggtttacattttggcctcaagcctttcttgggttgacctttaactggggggctttgttaggatgggcagcaattaaaggaagtctggatccatctattgtgctgccactctatgcctctggagtattttggactcttgtgtatgatactatctacgcacatcaggacaaagaagatgacctgaaagtgggagttaaatcaacagctttgcgctttggtgattcaacaaaggagtggattacggggtttgggattgcatgccttggtggtcttgctgttagtggatttaatgctgaaataggctggccatattatgcatctctagcagttgcgtctggacacttgggctggcaaatatggacagtcgacctttcttcacgcgctgactgcaataggaaatttgtttcaaataagtggtttggagctatcatatttggtggaattctggctggaagactttcatcctagcggtacattttcccttacagtatacacacacacacatgaacaatcaaacattgttcgcatatcaaaactctggaccttagaatgttgtatctgattacgttttctttttttccttctatagaacatgtttgcagagccaattaatttatggctgagctttattcattgcatgatgaagcttattctttttagttattttttgggaactaattgttgaaacatggttgctggc

SEQ ID NO: 52622 - protein, 389 aa, Glycine max
  peptide (1)..(389): Ceres Seq. ID no. 15177325
  misc_feature (103)..(387): Homolog of NCBI NO: 39593939 NR Description: Hypothetical protein CBG16481 [Caenorhabditis
  misc_feature (107)..(387): Homolog of NCBI NO: 21355567 NR Description: CG9613-PA [Drosophila melanogaster]
  misc_feature (68)..(387): Homolog of NCBI NO: 17553718 NR Description: UbiA prenyltransferase family member (3I27)
  misc_feature (103)..(387): Homolog of NCBI NO: 31377825 NR Description: hypothetical protein CL640 [Homo sapiens]
  misc_feature (80)..(335): Homolog of NCBI NO: 7486734 NR Description: hypothetical protein F9D16.130 - Arabidopsis
  misc_feature (96)..(387): Homolog of NCBI NO: 18389306 NR Description: PGT-1 [Lithospermum erythrorhizon]
  misc_feature (96)..(387): Homolog of NCBI NO: 18389308 NR Description: PGT-2 [Lithospermum erythrorhizon]
  misc_feature (134)..(389): Homolog of NCBI NO: 40253783 NR Description: putative PGT-2 [Oryza sativa (japonica
  misc_feature (95)..(389): Homolog of NCBI NO: 38637096 NR Description: putative PGT-2 [Oryza sativa (japonica
  misc_feature (80)..(386): Homolog of NCBI NO: 18416190 NR Description: UbiA prenyltransferase family [Arabidopsis
MASALISRSSRRFLKPCSSSVSLYPAIFNPVISSQQSASQNPSQNPPFKLPQLQSFNFEFRKTTGSLSSFHLVAHVSTWPSKENKNHQSGGNVSSSWVELYLPRKVQPYARLARLDKPIGTWLLLWPCMWSITLATTPGHLPDFKMLALFGCGALLLRGAGCTINDLLDRDIDTMVERTKLRPVASGLLTPFQGLCFLGFQLLLGLGILLQLNNYSRVLGASSLLLVFSYPLMKRFTFWPQAFLGLTFNWGALLGWAAIKGSLDPSIVLPLYASGVFWTLVYDTIYAHQDKEDDLKVGVKSTALRFGDSTKEWITGFGIACLGGLAVSGFNAEIGWPYYASLAVASGHLGWQIWTVDLSSRADCNRKFVSNKWFGAIIFGGILAGRLSS

SEQ ID NO: 52623 - protein, 261 aa, Glycine max
  peptide (1)..(261): Ceres Seq. ID no. 15177326
  misc_feature (1)..(259): Homolog of NCBI NO: 39593939 NR Description: Hypothetical protein CBG16481 [Caenorhabditis
  misc_feature (1)..(259): Homolog of NCBI NO: 21355567 NR Description: CG9613-PA [Drosophila melanogaster]
  misc_feature (1)..(259): Homolog of NCBI NO: 17553718 NR Description: UbiA prenyltransferase family member (3I27)
  misc_feature (1)..(259): Homolog of NCBI NO: 31377825 NR Description: hypothetical protein CL640 [Homo sapiens]
  misc_feature (1)..(207): Homolog of NCBI NO: 7486734 NR Description: hypothetical protein F9D16.130 - Arabidopsis
  misc_feature (1)..(259): Homolog of NCBI NO: 18389306 NR Description: PGT-1 [Lithospermum erythrorhizon]
  misc_feature (1)..(259): Homolog of NCBI NO: 18389308 NR Description: PGT-2 [Lithospermum erythrorhizon]
  misc_feature (6)..(261): Homolog of NCBI NO: 40253783 NR Description: putative PGT-2 [Oryza sativa (japonica
  misc_feature (1)..(261): Homolog of NCBI NO: 38637096 NR Description: putative PGT-2 [Oryza sativa (japonica
  misc_feature (1)..(258): Homolog of NCBI NO: 18416190 NR Description: UbiA prenyltransferase family [Arabidopsis
MWSITLATTPGHLPDFKMLALFGCGALLLRGAGCTINDLLDRDIDTMVERTKLRPVASGLLTPFQGLCFLGFQLLLGLGILLQLNNYSRVLGASSLLLVFSYPLMKRFTFWPQAFLGLTFNWGALLGWAAIKGSLDPSIVLPLYASGVFWTLVYDTIYAHQDKEDDLKVGVKSTALRFGDSTKEWITGFGIACLGGLAVSGFNAEIGWPYYASLAVASGHLGWQIWTVDLSSRADCNRKFVSNKWFGAIIFGGILAGRLSS

SEQ ID NO: 52624 - protein, 244 aa, Glycine max
  peptide (1)..(244): Ceres Seq. ID no. 15177327
  misc_feature (1)..(242): Homolog of NCBI NO: 39593939 NR Description: Hypothetical protein CBG16481 [Caenorhabditis
  misc_feature (1)..(242): Homolog of NCBI NO: 21355567 NR Description: CG9613-PA [Drosophila melanogaster]
  misc_feature (1)..(242): Homolog of NCBI NO: 17553718 NR Description: UbiA prenyltransferase family member (3I27)
  misc_feature (1)..(242): Homolog of NCBI NO: 31377825 NR Description: hypothetical protein CL640 [Homo sapiens]
  misc_feature (1)..(190): Homolog of NCBI NO: 7486734 NR Description: hypothetical protein F9D16.130 - Arabidopsis
  misc_feature (1)..(242): Homolog of NCBI NO: 18389306 NR Description: PGT-1 [Lithospermum erythrorhizon]
  misc_feature (1)..(242): Homolog of NCBI NO: 18389308 NR Description: PGT-2 [Lithospermum erythrorhizon]
  misc_feature (1)..(244): Homolog of NCBI NO: 40253783 NR Description: putative PGT-2 [Oryza sativa (japonica
  misc_feature (1)..(244): Homolog of NCBI NO: 38637096 NR Description: putative PGT-2 [Oryza sativa (japonica
  misc_feature (1)..(241): Homolog of NCBI NO: 18416190 NR Description: UbiA prenyltransferase family [Arabidopsis
MLALFGCGALLLRGAGCTINDLLDRDIDTMVERTKLRPVASGLLTPFQGLCFLGFQLLLGLGILLQLNNYSRVLGASSLLLVFSYPLMKRFTFWPQAFLGLTFNWGALLGWAAIKGSLDPSIVLPLYASGVFWTLVYDTIYAHQDKEDDLKVGVKSTALRFGDSTKEWITGFGIACLGGLAVSGFNAEIGWPYYASLAVASGHLGWQIWTVDLSSRADCNRKFVSNKWFGAIIFGGILAGRLSS

SEQ ID NO: 52625 - DNA, 1113 bp, Glycine max
  misc_feature (1)..(1113): Ceres Seq. ID no. 14309599
ccaattaccaagcacttaactcgcccgacctacccaccaaccaccccgcggcgagactgaccagactgaccagactgaattgatcggcaataaatcagcacgctgcacgcgctgggggtctgagtcggaggaggaagaagatcgaggagcagctgattcgctcgcacaaagcgccgggatcagatccatctctccgcgcgcgatgtctgaggtggcggcgatggcggggcaggcgtacatgagacagctctccaagcaccctctccgcaccaaggccatcacctccggggtgctggccggctgcagcgacgccgtcgcccagaagatctccggcgtcaagaagctccagctcaggaggctcctcctcataatgctctatggatttgcatacgcaggaccattcggtcattttttccacaagcttatggacaagattttcaagggacagaagaaaggaaaagaaactacagccaagaaggtcatagtggagcagctaactgtatcaccatggaacaatatgatgttcatgatgtactacggtctggtagttgaagggaggccattcgggcaagtaaagagcaaggtcaagaaggactttgcaaacatccaattgacagcttggaagttctggccaatagttagctggatcaactatgagtacatgccactccagctccgagttcttttcgccagctccattgcatcatgctgggcagtgtttctgaacctgaaagcagcaagatccattgccggcgctagtaagaatgcataaaagaaggatggaaggaaggggctagtgctacattgtatttctagctaattaagtatccactagtgattttctcagttcatttttatcactcagtttgtatttatgtttctatgtgaacccctcgagcatcgagaacctagagtgaatgtttcaactaagtatgtgagtatgtcaatgtgaagagtccctttcttgccactgggaaaaaaaccctacaaagcaaaaattatcctctagaaggtaccatgtttgttattcctttgggaggaaaatagggactgtactgggatctgacgcgtggaaataaatgaacatgctctgaggtttgtagaatctcaatg

SEQ ID NO: 52626 - protein, 189 aa, Glycine max
  peptide (1)..(189): Ceres Seq. ID no. 14309600
  misc_feature (112)..(182): Pfam Name: Mpv17 / PMP22 family Pfam Description: Mpv17 / PMP22 family
  misc_feature (1)..(174): Homolog of NCBI NO: 6679577 NR Description: peroxisomal membrane protein 2
  misc_feature (1)..(174): Homolog of NCBI NO: 13928796 NR Description: peroxisomal membrane protein 2
  misc_feature (9)..(188): Homolog of NCBI NO: 28828632 NR Description: hypothetical protein [Dictyostelium discoideum]
  misc_feature (1)..(174): Homolog of NCBI NO: 10954089 NR Description: 22 kDa peroxisomal membrane protein PMP22 [Mus
  misc_feature (12)..(183): Homolog of NCBI NO: 21553640 NR Description: contains similarity to 22 kDa peroxisomal
  misc_feature (1)..(183): Homolog of NCBI NO: 18422298 NR Description: peroxisomal membrane protein family (22 kDa)
  misc_feature (11)..(181): Homolog of NCBI NO: 31215743 NR Description: ENSANGP00000012562 [Anopheles gambiae]
  misc_feature (28)..(166): Homolog of NCBI NO: 7485192 NR Description: hypothetical protein d13195c - Arabidopsis
  misc_feature (10)..(189): Homolog of NCBI NO: 15233520 NR Description: peroxisomal membrane protein (22-kDa)(PMP22)
  misc_feature (28)..(189): Homolog of NCBI NO: 30682784 NR Description: expressed protein [Arabidopsis thaliana]
MSEVAAMAGQAYMRQLSKHPLRTKAITSGVLAGCSDAVAQKISGVKKLQLRRLLLIMLYGFAYAGPFGHFFHKLMDKIFKGQKKGKETTAKKVIVEQLTVSPWNNMMFMMYYGLVVEGRPFGQVKSKVKKDFANIQLTAWKFWPIVSWINYEYMPLQLRVLFASSIASCWAVFLNLKAARSIAGASKNA

SEQ ID NO: 52627 - protein, 183 aa, Glycine max
  peptide (1)..(183): Ceres Seq. ID no. 14309601
  misc_feature (106)..(176): Pfam Name: Mpv17 / PMP22 family Pfam Description: Mpv17 / PMP22 family
  misc_feature (1)..(168): Homolog of NCBI NO: 6679577 NR Description: peroxisomal membrane protein 2
  misc_feature (1)..(168): Homolog of NCBI NO: 13928796 NR Description: peroxisomal membrane protein 2
  misc_feature (3)..(182): Homolog of NCBI NO: 28828632 NR Description: hypothetical protein [Dictyostelium discoideum]
  misc_feature (1)..(168): Homolog of NCBI NO: 10954089 NR Description: 22 kDa peroxisomal membrane protein PMP22 [Mus
  misc_feature (6)..(177): Homolog of NCBI NO: 21553640 NR Description: contains similarity to 22 kDa peroxisomal
  misc_feature (1)..(177): Homolog of NCBI NO: 18422298 NR Description: peroxisomal membrane protein family (22 kDa)
  misc_feature (5)..(175): Homolog of NCBI NO: 31215743 NR Description: ENSANGP00000012562 [Anopheles gambiae]
  misc_feature (22)..(160): Homolog of NCBI NO: 7485192 NR Description: hypothetical protein d13195c - Arabidopsis
  misc_feature (4)..(183): Homolog of NCBI NO: 15233520 NR Description: peroxisomal membrane protein (22-kDa)(PMP22)
  misc_feature (22)..(183): Homolog of NCBI NO: 30682784 NR Description: expressed protein [Arabidopsis thaliana]
MAGQAYMRQLSKHPLRTKAITSGVLAGCSDAVAQKISGVKKLQLRRLLLIMLYGFAYAGPFGHFFHKLMDKIFKGQKKGKETTAKKVIVEQLTVSPWNNMMFMMYYGLVVEGRPFGQVKSKVKKDFANIQLTAWKFWPIVSWINYEYMPLQLRVLFASSIASCWAVFLNLKAARSIAGASKNA

SEQ ID NO: 52628 - protein, 177 aa, Glycine max
  peptide (1)..(177): Ceres Seq. ID no. 14309602
  misc_feature (100)..(170): Pfam Name: Mpv17 / PMP22 family Pfam Description: Mpv17 / PMP22 family
  misc_feature (1)..(162): Homolog of NCBI NO: 6679577 NR Description: peroxisomal membrane protein 2
  misc_feature (1)..(162): Homolog of NCBI NO: 13928796 NR Description: peroxisomal membrane protein 2
  misc_feature (1)..(176): Homolog of NCBI NO: 28828632 NR Description: hypothetical protein [Dictyostelium discoideum]
  misc_feature (1)..(162): Homolog of NCBI NO: 10954089 NR Description: 22 kDa peroxisomal membrane protein PMP22 [Mus
  misc_feature (1)..(171): Homolog of NCBI NO: 21553640 NR Description: contains similarity to 22 kDa peroxisomal
  misc_feature (1)..(171): Homolog of NCBI NO: 18422298 NR Description: peroxisomal membrane protein family (22 kDa)
  misc_feature (1)..(169): Homolog of NCBI NO: 31215743 NR Description: ENSANGP00000012562 [Anopheles gambiae]
  misc_feature (16)..(154): Homolog of NCBI NO: 7485192 NR Description: hypothetical protein d13195c - Arabidopsis
  misc_feature (1)..(177): Homolog of NCBI NO: 15233520 NR Description: peroxisomal membrane protein (22-kDa)(PMP22)
  misc_feature (16)..(177): Homolog of NCBI NO: 30682784 NR Description: expressed protein [Arabidopsis thaliana]
MRQLSKHPLRTKAITSGVLAGCSDAVAQKISGVKKLQLRRLLLIMLYGFAYAGPFGHFFHKLMDKIFKGQKKGKETTAKKVIVEQLTVSPWNNMMFMMYYGLVVEGRPFGQVKSKVKKDFANIQLTAWKFWPIVSWINYEYMPLQLRVLFASSIASCWAVFLNLKAARSIAGASKNA

SEQ ID NO: 52629 - DNA, 1457 bp, Glycine max
  misc_feature (1)..(1457): Ceres Seq. ID no. 15177674
aattaagaccggaatgaactaaaaaaaaagtcactcaatactcaatagccagcttcggtgtaagtgacacctcagatgactatgtctatgagagagagcagagatataaaacccaacccaacccacctggttacaacgctacgcctagttgggtgggacgacaaaaagcgaagaaaaacgcggtttttgttcccctgctctatctgactctgtctctctttctctctgcaaaaaccttcgttcatcgtcaacccacgaactcaaacaacaaatcattcattctttcaattgtaacatataaaaaaaaatgggttgtttcgccagcaaaaacgctgacaccaaggccagtagggccgcgcgctggcgatccacggggcatcgttgctttgcgcgattccaaattaaagacgtttccggatgaaattctcgagttagacagatctgttcgcactcttgacttgacgcataatcgaatagttgacattcctgtggaaattagcaagttaattaatgtacagcgcctgatattagcggagaacctcattgagagactgccagtaaatttggggaaactccaatctctgaaactgatgaacctggatggaaatcgaattacttccttgcctgatgaattgggccagttagtaaggcttgaacgcatatccatctcagggaatttgttaacatccttgccagcaactattggaagtttgagaaatctggtgcttttaaatgtgtcaaataacaagttacagtctcttccagagtctgttgggagttgcttctctttggaagaattacaagctaatgataatcttattgaagatcttccctcttctgtgtgcaatctctctcacttgaagtcactttgcttggataacaataatgtgaagcagatacccctgaatttattgaaagactgcaaagctcttcagaacatatcactgcatgctaatcctatatcaatggatcaatttcagctgatggaggggtttcaagagtttgaagcaaggaggaaaaagaagtttgacaaacaaattgattcaaatgtgatgatcggttccaaaggtcttgatgagggtgttgatctatgaggtggtcttaggcttgttgatggggttctttcagttgtacatttggatgagcttctggatgtagcgtggaatactgggtgttttgtccatgccttttatttcacaaatgaaataagtgtatggagatccttttgtcacgttgtatattattcttatttttattttttgttaccctatccagatttgcctataaatgtgctggcttgtagatgcaggcaatatccagcactagactaaatttcagaatatggtatttggggccattttgttgataatgaaatatgtatctcagcagctgtaaattacgaactttaaatatgatttgaaaggcagtgcattctatcccattaattatgtcaagtg

SEQ ID NO: 52630 - protein, 167 aa, Glycine max
  peptide (1)..(167): Ceres Seq. ID no. 15177675
  misc_feature (1)..(154): Homolog of NCBI NO: 24215147 NR Description: putative outermembrane protein
  misc_feature (1)..(150): Homolog of NCBI NO: 24215148 NR Description: putative outermembrane protein
  misc_feature (1)..(125): Homolog of NCBI NO: 24215148 NR Description: putative outermembrane protein
  misc_feature (1)..(125): Homolog of NCBI NO: 24216020 NR Description: Leucine-rich repeat containing protein
  misc_feature (1)..(148): Homolog of NCBI NO: 24216021 NR Description: Leucine-rich repeat containing protein
  misc_feature (1)..(166): Homolog of NCBI NO: 7445541 NR Description: hypothetical protein At2g30100 [imported] -
  misc_feature (1)..(166): Homolog of NCBI NO: 30684470 NR Description: unknown protein, leucine-rich repeat -related
  misc_feature (1)..(166): Homolog of NCBI NO: 37534990 NR Description: putative leucine-rich repeat protein
  misc_feature (1)..(164): Homolog of NCBI NO: 11357392 NR Description: hypothetical protein F13G24.110 - Arabidopsis
  misc_feature (1)..(166): Homolog of NCBI NO: 22326653 NR Description: leucine rich repeat protein family [Arabidopsis
MNLDGNRITSLPDELGQLVRLERISISGNLLTSLPATIGSLRNLVLLNVSNNKLQSLPESVGSCFSLEELQANDNLIEDLPSSVCNLSHLKSLCLDNNNVKQIPLNLLKDCKALQNISLHANPISMDQFQLMEGFQEFEARRKKKFDKQIDSNVMIGSKGLDEGVDL

SEQ ID NO: 52631 - DNA, 1566 bp, Glycine max
  misc_feature (1)..(1566): Ceres Seq. ID no. 15177676
aatagcatatgaagagagagaagaagtgaagataagcacagagagtgtcatctactcacctctactaccataaaaaaagaaaaacaaaaagccttcagagtcgactattcatcctttcttattcttaattaccgtgccttatccacccccaactatatttcagccagccgcggcgacacaacaacgccgacaccctcatttccactaccaactattctctctcgttctctgatttctgaaatccctcacccatggcttcctcttccctctctctctcactctctctcaccctttgccttgtttccactctctgctacgctcacacatcttccctaaccctacctgtgacaaaagaccattcaacacaccaatacctaacaatcctctcttatggcacccctgttgagtctgcaaaatttgtgcttgatctcggaggctcactcctctgggctgattgtgcatccagaaccaccccatcttccaccctcgcccccattttccaccgttcaattcgctgcctcacagcaaagggtcctgaaattgagacccacaggtggctctcgagtcttgcaaatcctatagatcaagatcagccatgtcaaattacagcagagaacagcatcacggggaaaagggtcaccgaaggagagcttgtggaagacctagtgattcatcgttctcacgagcttctcttcacgtgctcgcccacttttcttttgaatggtttagccactgatgctaaaggcattataggtcttgataaatctcgtatttctttctcatcacaagtttttcactcacttaaaatccagagaaaaatcactctgtgcctttctcccacttctggtgttattcaatttggaaaaatgacgcataaatcccaaactgaatctgaaattttcagatctcttactttcacaccccttgtcgcaaaccaagacccgacacagacccagtcttcaatcaacgttaattccgtcaaaatcaacggcaaaaaggttgcttttgacacccccttaggtgggggcgcgcagctgagcacggtcgtgccttacaccactctccaaacctcgatctatgataacttcgaaagcgcttatttgaaagccgcttcgtctatggacatgaaaagggtcgatccagtttccccctttgggctttgcttcgaatccaatggcgttggaagctcccaagtggggcccaacgtgccgatcattgatctggtgctgcagagcgagatggtgaagtggagcatatacggaagaaactctatggtgcaggtgagcgacgatgttatgtgcttagggtttgttgatggaggtgagaatcccagaaattcaattgtgattggagggtttcaattggaggatgtgttggtgcagattgattttgatacttccatggtgggatttagtccttcccttctcacgaagcaagctagttgctctgatttccaaccatagtttcaaaccatagttttctggtgaatggtgataatagctttttgttatctataccacataatttttcttagattaagatgagtttcgaagagttttaaagggt

SEQ ID NO: 52632 - protein, 403 aa, Glycine max
  peptide (1)..(403): Ceres Seq. ID no. 15177677
  misc_feature (91)..(388): Pfam Name: Eukaryotic aspartyl protease Pfam Description: Eukaryotic aspartyl protease
  misc_feature (5)..(400): Homolog of NCBI NO: 1401240 NR Description: 7S seed globulin precursor
  misc_feature (1)..(308): Homolog of NCBI NO: 15239656 NR Description: conglutin gamma - like protein [Arabidopsis
  misc_feature (146)..(401): Homolog of NCBI NO: 18379072 NR Description: expressed protein [Arabidopsis thaliana]
  misc_feature (4)..(399): Homolog of NCBI NO: 15239655 NR Description: dermal glyco protein - like [Arabidopsis thaliana]
  misc_feature (146)..(401): Homolog of NCBI NO: 21537233 NR Description: EDGP precursor [Arabidopsis thaliana]
  misc_feature (146)..(401): Homolog of NCBI NO: 15218740 NR Description: expressed protein [Arabidopsis thaliana]
  misc_feature (218)..(401): Homolog of NCBI NO: 7488910 NR Description: dermal glycoprotein precursor, extracellular -
  misc_feature (3)..(244): Homolog of NCBI NO: 7488910 NR Description: dermal glycoprotein precursor, extracellular -
MASSSLSLSLSLTLCLVSTLCYAHTSSLTLPVTKDHSTHQYLTILSYGTPVESAKFVLDLGGSLLWADCASRTTPSSTLAPIFHRSIRCLTAKGPEIETHRWLSSLANPIDQDQPCQITAENSITGKRVTEGELVEDLVIHRSHELLFTCSPTFLLNGLATDAKGIIGLDKSRISFSSQVFHSLKIQRKITLCLSPTSGVIQFGKMTHKSQTESEIFRSLTFTPLVANQDPTQTQSSINVNSVKINGKKVAFDTPLGGGAQLSTVVPYTTLQTSIYDNFESAYLKAASSMDMKRVDPVSPFGLCFESNGVGSSQVGPNVPIIDLVLQSEMVKWSIYGRNSMVQVSDDVMCLGFVDGGENPRNSIVIGGFQLEDVLVQIDFDTSMVGFSPSLLTKQASCSDFQP

SEQ ID NO: 52633 - DNA, 854 bp, Glycine max
  misc_feature (1)..(854): Ceres Seq. ID no. 14309614
aaaaaattgtgtcgtgtatatagtagtattttatttataagagctaccccttggaacattcaaaacagatcctacatttgggcaaaaaggaagctcaaccacatccaatacctcagaccacacaacagtgtagaagggagatttgaaagtgcatgtgaagaaacgcattagaagagaaaaaagatgagcaaaaaacagacggtgaaattagacgaggagcaaatcgcagaattgcgcgaaatctttcggtccttcgatcggaacaatgacgggagcctgacgcagttggagctgagttcgcttctgcgctcgcttggtctgaagcccagtgcagaccaactcgagggatttattcagagggcggacaccaacagcaatggcctggtggagttctcggagttcgttgctctggtcgcgccggagcttctgccggccaagtcgccctacacggaagagcagctgaagcagctgttccgaatgttcgatcgtgacgggaacggcctcatcactgcggcggagttggctcactccatggctaggcttggccatgccctcaccgccgaggagctgaccgggatgatcaaagaggccgacaccgacggcgatggcatgatcaactatcaggagttcgctcatgctattacttccgctgcttttgataattgctggccttaaccactctctttctaggtaataatgtaaattcaattttttcgggagaaattacgagattagcgatccatttaataagggagaaactttttattcttatttcaagaatttgagtttatattttgctatattttgatgtacaacgatgataataaagagcaaatctaagtgcttatacatct

SEQ ID NO: 52634 - protein, 163 aa, Glycine max
  peptide (1)..(163): Ceres Seq. ID no. 14309615
  misc_feature (16)..(44): Pfam Name: EF hand Pfam Description: EF hand
  misc_feature (6)..(160): Homolog of NCBI NO: 115506 NR Description: Calmodulin
  misc_feature (8)..(155): Homolog of NCBI NO: 13386230 NR Description: RIKEN cDNA 2310068O22 [Mus musculus]
  misc_feature (8)..(155): Homolog of NCBI NO: 4150908 NR Description: calmodulin [Suberites domuncula]
  misc_feature (1)..(159): Homolog of NCBI NO: 34912426 NR Description: P0681B11.17 [Oryza sativa (japonica
  misc_feature (11)..(159): Homolog of NCBI NO: 15221797 NR Description: calmodulin, putative [Arabidopsis thaliana]
  misc_feature (12)..(159): Homolog of NCBI NO: 28393082 NR Description: putative calmodulin [Arabidopsis thaliana]
  misc_feature (12)..(159): Homolog of NCBI NO: 15230858 NR Description: calmodulin, putative [Arabidopsis thaliana]
  misc_feature (3)..(162): Homolog of NCBI NO: 15228441 NR Description: calmodulin, putative [Arabidopsis thaliana]
  misc_feature (1)..(162): Homolog of NCBI NO: 15222618 NR Description: calmodulin, putative [Arabidopsis thaliana]
  misc_feature (1)..(160): Homolog of NCBI NO: 13359053 NR Description: P0436D06.14 [Oryza sativa (japonica
MSKKQTVKLDEEQIAELREIFRSFDRNNDGSLTQLELSSLLRSLGLKPSADQLEGFIQRADTNSNGLVEFSEFVALVAPELLPAKSPYTEEQLKQLFRMFDRDGNGLITAAELAHSMARLGHALTAEELTGMIKEADTDGDGMINYQEFAHAITSAAFDNCWP

SEQ ID NO: 52635 - DNA, 2138 bp, Glycine max
  misc_feature (1)..(2138): Ceres Seq. ID no. 15170788
attcaaaaccccaaataccattcaactcttgtcatttttttcactttctctttttcaaaatactcttagtctctctctaaccttcttccagttgtctctaaacctcttgaaatccgtgatggataccaggataggttcactcgacgcggccaagcccgcctgcaacgacgtcgtatcgtgcaaccacaccaccagcgccgccatccagccctgcgtgccggcgacggtgatcaacggcgccggcggagactccactttaggcggccacctggcacgccggctggtcgaaatcggcgtcaccgacgtgttctccgttcccggggacttcaacctgacgctgctggaccacctgatcgcagagccggcgctgaacctggtcgggtgctgcaatgagctcaacgccgggtacgccgccgatggctacgcgcgcgccaggggagtcggcgcgtgcgtggtgactttcaccgtcggcgggcttagcgtgctcaacgccatcgctggagcgtacagcgagaatttgccgctgatttgcatcgtcggtgggcccaactccaacgactacggcaccagtcggatcctccaccacaccatcgggttacccgatttcagccaggagttgaggtgcttccagaccattacttgcttccaggctgtggtgaataacttggaagatgctcatgagttgattgatacagcaatctcaactgcactgaaagaaagcaagccggtgtatataagcattagctgtaacttgcctgggattcctcaccccactttcagtcgtgatcctgttcctttttcgttatctccaagattgagtaacaagatggggttggaggctgcagtggaggcagcggcagaattccttaacaaggcagtgaaaccagtgctggtgggtggtcctaaactgagggtggcaacggcatctgatgcctttgttgaactggctgatgcgtgtggttatgcgcttgctgtgatgccatcggctaaagggcaggttccagagcaccatccccatttcatcggaacttattggggtgctgtgagcactgccttctgtgctgagattgtggagtctgcggatgcatacttgtttgctggtcccatttttaatgactacagctctgtggggtattcgctccttctcaagaaggagaaggcgatcattgtgcagcctgatcgggtggtgatcgcaaatggacctgcatttggttgtgtgctgatgaaggatttccttaaggcacttgcaaagcgcctcaagcacaacaatactgcatatgaaaattaccacaggatatttgtccctgaaggacatcctttgaaggctacacccagagagcctttgagggttaatgttcttttccaacatatacagaagatgctgtctggtgaaactgctgtaattgctgagacaggggattcctggtttaactgccaaaagctgaaattgccaaagggatgtgggtatgagttccaaatgcaatatggttcaattggatggtctgttggtgctactcttggttatgctcaggctgttcctgagaagcgagtgattgcctgcattggtgatggaagttttcaggtgactgcccaagatgtatcaacaatgttgcggtgtgggcaaaagaccattatctttctggtcaacaatggcggatacaccattgaggttgaaattcatgatgggccatacaatgtgattaagaactggaactacactgggttgattgatgcaatccacaatggtgaagggaaatgctggactgccaaggtgttctgtgaagaggagctagttgaagcaattgccacagccacaggacacaagagagactccttatgcttcattgaggtgattgttcacaaggatgacaccagcaaagaattgcttgaatggggctcacgagtctctgctgccaatagccgtccccccaatcctcagtaaacttcagatgtcggcctatgattaaattgctgcaattgccctttagctctatgaaattgagaatcatttgagatgttgtccttgtaggaaatttacctttgttaatggcttgaaatatttatgcaaaactgagtccccacttgtttgtgtaaattctttcacttgagataaaaatatatccatcacctttgttcct

SEQ ID NO: 52636 - protein, 646 aa, Glycine max
  peptide (1)..(646): Ceres Seq. ID no. 15170789
  misc_feature (281)..(430): Pfam Name: Thiamine pyrophosphate enzyme, central domain Pfam Description: Thiamine pyrophosphate enzyme, central domain
  misc_feature (65)..(489): Homolog of NCBI NO: 1706330 NR Description: Pyruvate decarboxylase isozyme 2 (PDC)
  misc_feature (40)..(646): Homolog of NCBI NO: 15240950 NR Description: pyruvate decarboxylase-related protein
  misc_feature (80)..(646): Homolog of NCBI NO: 10732644 NR Description: pyruvate decarboxylase 1 [Vitis vinifera]
  misc_feature (40)..(646): Homolog of NCBI NO: 1616787 NR Description: pyruvate decarboxylase [Arabidopsis thaliana]
  misc_feature (40)..(646): Homolog of NCBI NO: 15240423 NR Description: pyruvate decarboxylase (gb|AAB16855.1)
  misc_feature (40)..(646): Homolog of NCBI NO: 15234062 NR Description: pyruvate decarboxylase-1 (Pdc1) [Arabidopsis
  misc_feature (51)..(646): Homolog of NCBI NO: 24745919 NR Description: pyruvate decarboxylase [Solanum tuberosum]
  misc_feature (40)..(646): Homolog of NCBI NO: 10121330 NR Description: pyruvate decarboxylase [Fragaria x ananassa]
  misc_feature (40)..(646): Homolog of NCBI NO: 17225598 NR Description: pyruvate decarboxylase [Fragaria x ananassa]
  misc_feature (40)..(646): Homolog of NCBI NO: 29373077 NR Description: pyruvate decarboxylase 1 [Lotus corniculatus]
FKTPNTIQLLSFFSLSLFQNTLSLSLTFFQLSLNLLKSVMDTRIGSLDAAKPACNDVVSCNHTTSAAIQPCVPATVINGAGGDSTLGGHLARRLVEIGVTDVFSVPGDFNLTLLDHLIAEPALNLVGCCNELNAGYAADGYARARGVGACVVTFTVGGLSVLNAIAGAYSENLPLICIVGGPNSNDYGTSRILHHTIGLPDFSQELRCFQTITCFQAVVNNLEDAHELIDTAISTALKESKPVYISISCNLPGIPHPTFSRDPVPFSLSPRLSNKMGLEAAVEAAAEFLNKAVKPVLVGGPKLRVATASDAFVELADACGYALAVMPSAKGQVPEHHPHFIGTYWGAVSTAFCAEIVESADAYLFAGPIFNDYSSVGYSLLLKKEKAIIVQPDRVVIANGPAFGCVLMKDFLKALAKRLKHNNTAYENYHRIFVPEGHPLKATPREPLRVNVLFQHIQKMLSGETAVIAETGDSWFNCQKLKLPKGCGYEFQMQYGSIGWSVGATLGYAQAVPEKRVIACIGDGSFQVTAQDVSTMLRCGQKTIIFLVNNGGYTIEVEIHDGPYNVIKNWNYTGLIDAIHNGEGKCWTAKVFCEEELVEAIATATGHKRDSLCFIEVIVHKDDTSKELLEWGSRVSAANSRPPNPQ

SEQ ID NO: 52637 - protein, 607 aa, Glycine max
  peptide (1)..(607): Ceres Seq. ID no. 15170790
  misc_feature (242)..(391): Pfam Name: Thiamine pyrophosphate enzyme, central domain Pfam Description: Thiamine pyrophosphate enzyme, central domain
  misc_feature (26)..(450): Homolog of NCBI NO: 1706330 NR Description: Pyruvate decarboxylase isozyme 2 (PDC)
  misc_feature (1)..(607): Homolog of NCBI NO: 15240950 NR Description: pyruvate decarboxylase-related protein
  misc_feature (41)..(607): Homolog of NCBI NO: 10732644 NR Description: pyruvate decarboxylase 1 [Vitis vinifera]
  misc_feature (1)..(607): Homolog of NCBI NO: 1616787 NR Description: pyruvate decarboxylase [Arabidopsis thaliana]
  misc_feature (1)..(607): Homolog of NCBI NO: 15240423 NR Description: pyruvate decarboxylase (gb|AAB16855.1)
  misc_feature (1)..(607): Homolog of NCBI NO: 15234062 NR Description: pyruvate decarboxylase-1 (Pdc1) [Arabidopsis
  misc_feature (12)..(607): Homolog of NCBI NO: 24745919 NR Description: pyruvate decarboxylase [Solanum tuberosum]
  misc_feature (1)..(607): Homolog of NCBI NO: 10121330 NR Description: pyruvate decarboxylase [Fragaria x ananassa]
  misc_feature (1)..(607): Homolog of NCBI NO: 17225598 NR Description: pyruvate decarboxylase [Fragaria x ananassa]
  misc_feature (1)..(607): Homolog of NCBI NO: 29373077 NR Description: pyruvate decarboxylase 1 [Lotus corniculatus]
MDTRIGSLDAAKPACNDVVSCNHTTSAAIQPCVPATVINGAGGDSTLGGHLARRLVEIGVTDVFSVPGDFNLTLLDHLIAEPALNLVGCCNELNAGYAADGYARARGVGACVVTFTVGGLSVLNAIAGAYSENLPLICIVGGPNSNDYGTSRILHHTIGLPDFSQELRCFQTITCFQAVVNNLEDAHELIDTAISTALKESKPVYISISCNLPGIPHPTFSRDPVPFSLSPRLSNKMGLEAAVEAAAEFLNKAVKPVLVGGPKLRVATASDAFVELADACGYALAVMPSAKGQVPEHHPHFIGTYWGAVSTAFCAEIVESADAYLFAGPIFNDYSSVGYSLLLKKEKAIIVQPDRVVIANGPAFGCVLMKDFLKALAKRLKHNNTAYENYHRIFVPEGHPLKATPREPLRVNVLFQHIQKMLSGETAVIAETGDSWFNCQKLKLPKGCGYEFQMQYGSIGWSVGATLGYAQAVPEKRVIACIGDGSFQVTAQDVSTMLRCGQKTIIFLVNNGGYTIEVEIHDGPYNVIKNWNYTGLIDAIHNGEGKCWTAKVFCEEELVEAIATATGHKRDSLCFIEVIVHKDDTSKELLEWGSRVSAANSRPPNPQ

SEQ ID NO: 52638 - protein, 371 aa, Glycine max
  peptide (1)..(371): Ceres Seq. ID no. 15170791
  misc_feature (6)..(155): Pfam Name: Thiamine pyrophosphate enzyme, central domain Pfam Description: Thiamine pyrophosphate enzyme, central domain
  misc_feature (1)..(214): Homolog of NCBI NO: 1706330 NR Description: Pyruvate decarboxylase isozyme 2 (PDC)
  misc_feature (1)..(371): Homolog of NCBI NO: 15240950 NR Description: pyruvate decarboxylase-related protein
  misc_feature (1)..(371): Homolog of NCBI NO: 10732644 NR Description: pyruvate decarboxylase 1 [Vitis vinifera]
  misc_feature (1)..(371): Homolog of NCBI NO: 1616787 NR Description: pyruvate decarboxylase [Arabidopsis thaliana]
  misc_feature (1)..(371): Homolog of NCBI NO: 15240423 NR Description: pyruvate decarboxylase (gb|AAB16855.1)
  misc_feature (1)..(371): Homolog of NCBI NO: 15234062 NR Description: pyruvate decarboxylase-1 (Pdc1) [Arabidopsis
  misc_feature (1)..(371): Homolog of NCBI NO: 24745919 NR Description: pyruvate decarboxylase [Solanum tuberosum]
  misc_feature (1)..(371): Homolog of NCBI NO: 10121330 NR Description: pyruvate decarboxylase [Fragaria x ananassa]
  misc_feature (1)..(371): Homolog of NCBI NO: 17225598 NR Description: pyruvate decarboxylase [Fragaria x ananassa]
  misc_feature (1)..(371): Homolog of NCBI NO: 29373077 NR Description: pyruvate decarboxylase 1 [Lotus corniculatus]
MGLEAAVEAAAEFLNKAVKPVLVGGPKLRVATASDAFVELADACGYALAVMPSAKGQVPEHHPHFIGTYWGAVSTAFCAEIVESADAYLFAGPIFNDYSSVGYSLLLKKEKAIIVQPDRVVIANGPAFGCVLMKDFLKALAKRLKHNNTAYENYHRIFVPEGHPLKATPREPLRVNVLFQHIQKMLSGETAVIAETGDSWFNCQKLKLPKGCGYEFQMQYGSIGWSVGATLGYAQAVPEKRVIACIGDGSFQVTAQDVSTMLRCGQKTIIFLVNNGGYTIEVEIHDGPYNVIKNWNYTGLIDAIHNGEGKCWTAKVFCEEELVEAIATATGHKRDSLCFIEVIVHKDDTSKELLEWGSRVSAANSRPPNPQ

SEQ ID NO: 52639 - DNA, 1656 bp, Glycine max
  misc_feature (1)..(1656): Ceres Seq. ID no. 15178131
acctctcttcactctcagtctcagtctccactttctgagaagagcgccaaattagggttagattatcagggtttaaccgttcctcctcttcctctaccataatcaacaacctcttcccaatcccaatggatccaaccaagaagcgcaagctcgacgagaacggcttcaacaacaacgactcttccgaccccctcaagctctccccctccgaagtccgcaagctcatcgagcgcttcacctccgaccagctcctcgacatcctccaggacgcggtggcgcgccacctcgacgtccttgccgccgtgcgcgccgtcgcggaccctgacgtctcccagcgcaagctcttcatccgcggcctcggctgggacaccaccaccgacggcctccgctcgctcttctccaccttcggcgacctcgaggaggccgttgtcatcctcgacaaggccactggcaagtccaagggatacggcttcgtcaccttccgccacgtcgacggcgcgcttctcgccctccgcgagcccagcaagcgcatcgacggccgcgtgacggtcacgcagctcgccgccgccgggaactccgcgtcgaacgtcaaccccgctgacgtagctctccgtaagatctacgtcgccaacgtgccgccggacctgcccgcggacaagcttctcgcgcacttctccgtgtacggcgaaatcgaagaaggtccgttagggtttgataaacaaacaggaaagtcgaaagggtttgctttatttgtttataagtctcccgagggtgctcaggccgcattgatagatcctgtgaagactgtggaagggaggcagttgagttgtaagttggcgattactgatgggaagcagggaaagcgggtagggccggactcggcccaggcccatcacgggaatgttcagcacgggcatggagatggagtgggggcgggaatggggatgcctcctaatgcggggtccgggcctgggcagtatggtggacctggacagtatgggcccccggttgggatgggttcttatggtgggtttggcggacagcctccgatgggcaatcataaccatcctcttaattcgacgaatcctgtgccgggttctttggcaggtgctggtgggtatggtggtgggatgggtgggccatatggtgggtacggtggtggacctggaccggggtcgactggctttggcggtgctggtgggatgggaggaggtggtggaggtgttggtggtggcgctggtggcgggcttggtggtgctggtggtggtagttctatgtatagattgccgggttcgggcggaatgcctgctggtggtactggagggtatccggatagtggacactatggtttatcagcttcctctgggtaccagaatcagcatcaccctccttctggaacttcacctatgcctagggttccgcctggttcgatgtatcccaatatgcccccttactactgaagaggtgtatcatcgcttattgggcgcagatgctttgtgtgcctctggtgattgcgtgaattgcagactatgtgctctggtgtaatgaatttgttagactgtacttttacagcctcttgacttcatctgccccctttttaagcattgattcatatggatgttgctagttaaagccgttgagatagactagttttgt

SEQ ID NO: 52640 - protein, 444 aa, Glycine max
  peptide (1)..(444): Ceres Seq. ID no. 15178132
  misc_feature (73)..(143): Pfam Name: RNA recognition motif. (a.k.a. RRM, RBD, or RNP domain) Pfam Description: RNA recognition motif. (a.k.a. RRM, RBD, or RNP
  misc_feature (1)..(149): Homolog of NCBI NO: 21741248 NR Description: OSJNBb0034I13.9 [Oryza sativa (japonica
  misc_feature (147)..(418): Homolog of NCBI NO: 21741248 NR Description: OSJNBb0034I13.9 [Oryza sativa (japonica
  misc_feature (62)..(415): Homolog of NCBI NO: 28374304 NR Description: similar to heterogeneous ribonuclear particle
  misc_feature (30)..(406): Homolog of NCBI NO: 14596195 NR Description: putative protein [Arabidopsis thaliana]
  misc_feature (12)..(406): Homolog of NCBI NO: 18410591 NR Description: RNA recognition motif (RRM)-containing protein
  misc_feature (10)..(259): Homolog of NCBI NO: 21666573 NR Description: RNA-binding protein AKIP1 [Vicia faba]
  misc_feature (12)..(386): Homolog of NCBI NO: 15226817 NR Description: RNA recognition motif (RRM)-containing protein
  misc_feature (10)..(399): Homolog of NCBI NO: 34903096 NR Description: unnamed protein product [Oryza sativa (japonica
  misc_feature (1)..(346): Homolog of NCBI NO: 34912640 NR Description: P0410E01.24 [Oryza sativa (japonica
  misc_feature (1)..(403): Homolog of NCBI NO: 15232459 NR Description: RNA recognition motif (RRM)-containing protein
MDPTKKRKLDENGFNNNDSSDPLKLSPSEVRKLIERFTSDQLLDILQDAVARHLDVLAAVRAVADPDVSQRKLFIRGLGWDTTTDGLRSLFSTFGDLEEAVVILDKATGKSKGYGFVTFRHVDGALLALREPSKRIDGRVTVTQLAAAGNSASNVNPADVALRKIYVANVPPDLPADKLLAHFSVYGEIEEGPLGFDKQTGKSKGFALFVYKSPEGAQAALIDPVKTVEGRQLSCKLAITDGKQGKRVGPDSAQAHHGNVQHGHGDGVGAGMGMPPNAGSGPGQYGGPGQYGPPVGMGSYGGFGGQPPMGNHNHPLNSTNPVPGSLAGAGGYGGGMGGPYGGYGGGPGPGSTGFGGAGGMGGGGGGVGGGAGGGLGGAGGGSSMYRLPGSGGMPAGGTGGYPDSGHYGLSASSGYQNQHHPPSGTSPMPRVPPGSMYPNMPPYY

SEQ ID NO: 52641 - DNA, 1710 bp, Glycine max
  misc_feature (1)..(1710): Ceres Seq. ID no. 15170768
gtttggattttgggtgaaaatgagataataatcgtgttggatcgagtcctccgtcttaccggtgtcaacgaggtggcggagaatggaaaacgccgacgttttcttgggcttacacgacttcctcgagcgcatgcggcaaccctccgccgctgaattcgtcaaagcaatcaaaagttttattgtttcgttttcaaacaatgctcctgatcccgatagggacagtgctgcggttcaagcgttcctcgcgaaaatggaagcggatttcagggctcatccactttgggctggttgctccgaagaggaacttgaaagtgccggtgaaggacttgagaagtatgttatgacaaagttatttgctcgtgtatttgcttcacttccagatgatgtaaaatttgatgaccaactttctgagaagatggctttgattcaacaatttattcgacctgaaaatttggatatcaagccagtatttcagaatgaatcatcatggttgcttgcacagaaagaattacagaagatcaacatgtacaaggcacccagggataaacttgtctgtattctgaattgttgcagggttattagcaacttgctacttaatgcttcggttgcttcgagagagaatcctccaggagctgatgaatttcttcctgtgcttatttatgtaaccataaaggcaaaccctccacaactgcactcaaatctactgtacatacagaggtttagacatcaatctcgattggttgcagaagcagcatattattttacaaacatgctctctgctgagtcattcatctcaaacatcgatgcaaaagccatttcaatggaggaagctgagtttgatggaaacatggaatttgctcgtgctatgctttcgggtatttcagctgatacacaagatcctggttcaccttatcaaaatgatggacagcatccaagagcagaacccactaagcacaaagctttgaatgataataatgaccctgcactacgaactccatcatctgttgcaaaatcagaaagcaagaaagtgacttttgcaaatgaatcattgatcacaaaagttccatcgctctcggatttggagaataaaggggcaagtatgattttaaaggaggataagttgaatgaagttttcggggagtttccatatttgtttgctagtgtaggtgacctaatggttggtgatgttgaagacctgctaaataattacaaacaacttgttttcaagtatgtctctctttccaaagggttaggaatctctcctacatctcttccaccatcgaattcccaaaataattctgaagaccatgctgaaaccacaatagattcttcagacaatggacctctagatgacaacagtaaatcagaagaatctattgatacaacagatgatagttcagataaagttacacttgaggagcaaaaaattgaatccgatctgccgaaggatgaccttgttgctcctgagggtgatcccccctcttaactaatcggagctatcttcaaccattttctccccgttttgtaccccattttttccacccgtttttcctgtaaaattatttttatgttgtccgttgtctggtagctacactcgttccttatgtttatagggatggctgtaccatgaccactatgcctcggtaacattgttcttgaatagattttagacctgcaaaaaatagaattttacatttgcttttgcgatgg

SEQ ID NO: 52642 - protein, 467 aa, Glycine max
  peptide (1)..(467): Ceres Seq. ID no. 15170769
  misc_feature (135)..(242): Pfam Name: Vacuolar sorting protein 9 (VPS9) domain Pfam Description: Vacuolar sorting protein 9 (VPS9) domain
  misc_feature (27)..(241): Homolog of NCBI NO: 15489034 NR Description: Unknown (protein for IMAGE:3451647) [Homo sapiens]
  misc_feature (27)..(241): Homolog of NCBI NO: 26353966 NR Description: unnamed protein product [Mus musculus]
  misc_feature (27)..(241): Homolog of NCBI NO: 27882595 NR Description: 4432404J10Rik protein [Mus musculus]
  misc_feature (27)..(241): Homolog of NCBI NO: 21739944 NR Description: hypothetical protein [Homo sapiens]
  misc_feature (17)..(277): Homolog of NCBI NO: 26354574 NR Description: unnamed protein product [Mus musculus]
  misc_feature (3)..(257): Homolog of NCBI NO: 19112902 NR Description: putative vacuolar protein sorting-associated
  misc_feature (8)..(30): Homolog of NCBI NO: 34902128 NR Description: unknown protein [Oryza sativa (japonica
  misc_feature (32)..(446): Homolog of NCBI NO: 34902128 NR Description: unknown protein [Oryza sativa (japonica
  misc_feature (1)..(433): Homolog of NCBI NO: 15242388 NR Description: expressed protein [Arabidopsis thaliana]
  misc_feature (1)..(437): Homolog of NCBI NO: 18402362 NR Description: expressed protein [Arabidopsis thaliana]
MENADVFLGLHDFLERMRQPSAAEFVKAIKSFIVSFSNNAPDPDRDSAAVQAFLAKMEADFRAHPLWAGCSEEELESAGEGLEKYVMTKLFARVFASLPDDVKFDDQLSEKMALIQQFIRPENLDIKPVFQNESSWLLAQKELQKINMYKAPRDKLVCILNCCRVISNLLLNASVASRENPPGADEFLPVLIYVTIKANPPQLHSNLLYIQRFRHQSRLVAEAAYYFTNMLSAESFISNIDAKAISMEEAEFDGNMEFARAMLSGISADTQDPGSPYQNDGQHPRAEPTKHKALNDNNDPALRTPSSVAKSESKKVTFANESLITKVPSLSDLENKGASMILKEDKLNEVFGEFPYLFASVGDLMVGDVEDLLNNYKQLVFKYVSLSKGLGISPTSLPPSNSQNNSEDHAETTIDSSDNGPLDDNSKSEESIDTTDDSSDKVTLEEQKIESDLPKDDLVAPEGDPPS

SEQ ID NO: 52643 - protein, 451 aa, Glycine max
  peptide (1)..(451): Ceres Seq. ID no. 15170770
  misc_feature (119)..(226): Pfam Name: Vacuolar sorting protein 9 (VPS9) domain Pfam Description: Vacuolar sorting protein 9 (VPS9) domain
  misc_feature (11)..(225): Homolog of NCBI NO: 15489034 NR Description: Unknown (protein for IMAGE:3451647) [Homo sapiens]
  misc_feature (11)..(225): Homolog of NCBI NO: 26353966 NR Description: unnamed protein product [Mus musculus]
  misc_feature (11)..(225): Homolog of NCBI NO: 27882595 NR Description: 4432404J10Rik protein [Mus musculus]
  misc_feature (11)..(225): Homolog of NCBI NO: 21739944 NR Description: hypothetical protein [Homo sapiens]
  misc_feature (1)..(261): Homolog of NCBI NO: 26354574 NR Description: unnamed protein product [Mus musculus]
  misc_feature (1)..(241): Homolog of NCBI NO: 19112902 NR Description: putative vacuolar protein sorting-associated
  misc_feature (1)..(14): Homolog of NCBI NO: 34902128 NR Description: unknown protein [Oryza sativa (japonica
  misc_feature (16)..(430): Homolog of NCBI NO: 34902128 NR Description: unknown protein [Oryza sativa (japonica
  misc_feature (1)..(417): Homolog of NCBI NO: 15242388 NR Description: expressed protein [Arabidopsis thaliana]
  misc_feature (1)..(421): Homolog of NCBI NO: 18402362 NR Description: expressed protein [Arabidopsis thaliana]
MRQPSAAEFVKAIKSFIVSFSNNAPDPDRDSAAVQAFLAKMEADFRAHPLWAGCSEEELESAGEGLEKYVMTKLFARVFASLPDDVKFDDQLSEKMALIQQFIRPENLDIKPVFQNESSWLLAQKELQKINMYKAPRDKLVCILNCCRVISNLLLNASVASRENPPGADEFLPVLIYVTIKANPPQLHSNLLYIQRFRHQSRLVAEAAYYFTNMLSAESFISNIDAKAISMEEAEFDGNMEFARAMLSGISADTQDPGSPYQNDGQHPRAEPTKHKALNDNNDPALRTPSSVAKSESKKVTFANESLITKVPSLSDLENKGASMILKEDKLNEVFGEFPYLFASVGDLMVGDVEDLLNNYKQLVFKYVSLSKGLGISPTSLPPSNSQNNSEDHAETTIDSSDNGPLDDNSKSEESIDTTDDSSDKVTLEEQKIESDLPKDDLVAPEGDPPS

SEQ ID NO: 52644 - protein, 411 aa, Glycine max
  peptide (1)..(411): Ceres Seq. ID no. 15170771
  misc_feature (79)..(186): Pfam Name: Vacuolar sorting protein 9 (VPS9) domain Pfam Description: Vacuolar sorting protein 9 (VPS9) domain
  misc_feature (1)..(185): Homolog of NCBI NO: 26380470 NR Description: unnamed protein product [Mus musculus]
  misc_feature (1)..(185): Homolog of NCBI NO: 15489034 NR Description: Unknown (protein for IMAGE:3451647) [Homo sapiens]
  misc_feature (1)..(185): Homolog of NCBI NO: 26353966 NR Description: unnamed protein product [Mus musculus]
  misc_feature (1)..(185): Homolog of NCBI NO: 27882595 NR Description: 4432404J10Rik protein [Mus musculus]
  misc_feature (1)..(185): Homolog of NCBI NO: 21739944 NR Description: hypothetical protein [Homo sapiens]
  misc_feature (1)..(221): Homolog of NCBI NO: 26354574 NR Description: unnamed protein product [Mus musculus]
  misc_feature (1)..(201): Homolog of NCBI NO: 19112902 NR Description: putative vacuolar protein sorting-associated
  misc_feature (1)..(390): Homolog of NCBI NO: 34902128 NR Description: unknown protein [Oryza sativa (japonica
  misc_feature (1)..(377): Homolog of NCBI NO: 15242388 NR Description: expressed protein [Arabidopsis thaliana]
  misc_feature (1)..(381): Homolog of NCBI NO: 18402362 NR Description: expressed protein [Arabidopsis thaliana]
MEADFRAHPLWAGCSEEELESAGEGLEKYVMTKLFARVFASLPDDVKFDDQLSEKMALIQQFIRPENLDIKPVFQNESSWLLAQKELQKINMYKAPRDKLVCILNCCRVISNLLLNASVASRENPPGADEFLPVLIYVTIKANPPQLHSNLLYIQRFRHQSRLVAEAAYYFTNMLSAESFISNIDAKAISMEEAEFDGNMEFARAMLSGISADTQDPGSPYQNDGQHPRAEPTKHKALNDNNDPALRTPSSVAKSESKKVTFANESLITKVPSLSDLENKGASMILKEDKLNEVFGEFPYLFASVGDLMVGDVEDLLNNYKQLVFKYVSLSKGLGISPTSLPPSNSQNNSEDHAETTIDSSDNGPLDDNSKSEESIDTTDDSSDKVTLEEQKIESDLPKDDLVAPEGDPPS

SEQ ID NO: 52645 - DNA, 1687 bp, Glycine max
  misc_feature (1)..(1687): Ceres Seq. ID no. 15177320
atcatctatatacttgtacccgatcaatgaattagcctataaagaccaagtattccttggagttgttgtataaccaggcttatatattagctattaatcttcagttgacatgcacatccaaatgtcttctttcctcttagcttcgcttgcacttttgttttgcatctcctccttggagaagagctttgcctttcaagcaacaaaggaaagcaacaatcttcgtcaatatcattttgttcacctcaactctctttttccatcatcttcttgcagctcttctgccaaaggtcctaaaaggaaagcatcattagaagtggtgcacaaacatggcccatgctcccaactaaatcatagtggcaaagcagaggctacaatatcacacaatgatattatgaacctagacaatgaaagggtaaagtatattcagtccaggctctctaagaatttgggtggagaaaatagagtgaaggaattggattcaactaccctacccgccaagtctggtagacttattgggtctgcagactattatgttgttgttggtcttggtacacccaagagggacttgtcactcatttttgacacaggtagttatcttacatggactcagtgtgaaccctgtgctggttcttgctacaagcagcaagatccaatctttgatccatcaaagtcttcatcgtataccaatatcaaatgcacatcttcgctctgcactcaattccgttctgcgggatgctcctcatccacagatgcatcatgcatatatgacgtcaaatacggtgacaattccatctcccgcggcttcttgagtcaggagcgccttaccatcaccgccaccgacatcgtccacgacttcctctttggctgtggccaagacaacgagggcctcttcaggggcaccgccggcctcatgggcctcagccgccaccccatttcctttgtccaacaaacctcctcaatttacaacaaaattttctcctactgtctcccctccacccccagctcccttggccacctcaccttcggcgcttccgccgccaccaatgctaacctcaaatacactcccttttccacaatctccggcgaaaactccttctacggtctcgacatcgtcggcatctccgttggcggcaccaaactccctgctgtctcctcctccaccttctccgccggtggctccatcatcgactccggcaccgtgatcacgcggttgcctccgaccgcgtacgccgcgctccggtcggcatttcggcagtttatgatgaagtaccccgttgcctatgggacccgcctacttgacacgtgttatgatttcagtgggtataaggagatttcagttccgaggatagattttgaatttgccggtggcgtcaaggtggagttgccattggtggggatactctatggggaaagtgcgcaacaactgtgtttggcttttgctgcaaatgggaatggcaatgatattacgatatttgggaatgtgcaacaaaagacactagaggtcgtgtatgatgttgagggtgggaggatagggtttggtgctgctgggtgcaactgaagttagtttgattaatagtggtgttaattaaacatgctttgggcttgttagggaggaagaaatcttaattggctctggcatttttaattactattgttgttgttactggaaagtactctaaaacatatg

SEQ ID NO: 52646 - protein, 482 aa, Glycine max
  peptide (1)..(482): Ceres Seq. ID no. 15177321
  misc_feature (94)..(476): Pfam Name: Eukaryotic aspartyl protease Pfam Description: Eukaryotic aspartyl protease
  misc_feature (93)..(481): Homolog of NCBI NO: 15228618 NR Description: expressed protein [Arabidopsis thaliana]
  misc_feature (52)..(481): Homolog of NCBI NO: 25406599 NR Description: probable aspartyl proteinase, 105611-106921
  misc_feature (1)..(481): Homolog of NCBI NO: 21595063 NR Description: putative aspartyl protease [Arabidopsis thaliana]
  misc_feature (1)..(481): Homolog of NCBI NO: 18412482 NR Description: aspartyl protease -related [Arabidopsis thaliana]
  misc_feature (5)..(481): Homolog of NCBI NO: 15238250 NR Description: nucleoid DNA-binding protein cnd41 - like protein
  misc_feature (5)..(481): Homolog of NCBI NO: 24417232 NR Description: unknown [Arabidopsis thaliana]
  misc_feature (6)..(482): Homolog of NCBI NO: 24430421 NR Description: 41 kD chloroplast nucleoid DNA binding protein
  misc_feature (64)..(482): Homolog of NCBI NO: 11358588 NR Description: nucleoid DNA-binding protein cnd41-like protein -
  misc_feature (6)..(482): Homolog of NCBI NO: 7489168 NR Description: nucleoid DNA-binding protein cnd41, chloroplast -
  misc_feature (41)..(482): Homolog of NCBI NO: 22326716 NR Description: nucleoid DNA-binding protein cnd41 - like protein
MHIQMSSFLLASLALLFCISSLEKSFAFQATKESNNLRQYHFVHLNSLFPSSSCSSSAKGPKRKASLEVVHKHGPCSQLNHSGKAEATISHNDIMNLDNERVKYIQSRLSKNLGGENRVKELDSTTLPAKSGRLIGSADYYVVVGLGTPKRDLSLIFDTGSYLTWTQCEPCAGSCYKQQDPIFDPSKSSSYTNIKCTSSLCTQFRSAGCSSSTDASCIYDVKYGDNSISRGFLSQERLTITATDIVHDFLFGCGQDNEGLFRGTAGLMGLSRHPISFVQQTSSIYNKIFSYCLPSTPSSLGHLTFGASAATNANLKYTPFSTISGENSFYGLDIVGISVGGTKLPAVSSSTFSAGGSIIDSGTVITRLPPTAYAALRSAFRQFMMKYPVAYGTRLLDTCYDFSGYKEISVPRIDFEFAGGVKVELPLVGILYGESAQQLCLAFAANGNGNDITIFGNVQQKTLEVVYDVEGGRIGFGAAGCN

SEQ ID NO: 52647 - protein, 478 aa, Glycine max
  peptide (1)..(478): Ceres Seq. ID no. 15177322
  misc_feature (90)..(472): Pfam Name: Eukaryotic aspartyl protease Pfam Description: Eukaryotic aspartyl protease
  misc_feature (89)..(477): Homolog of NCBI NO: 15228618 NR Description: expressed protein [Arabidopsis thaliana]
  misc_feature (48)..(477): Homolog of NCBI NO: 25406599 NR Description: probable aspartyl proteinase, 105611-106921
  misc_feature (1)..(477): Homolog of NCBI NO: 21595063 NR Description: putative aspartyl protease [Arabidopsis thaliana]
  misc_feature (1)..(477): Homolog of NCBI NO: 18412482 NR Description: aspartyl protease -related [Arabidopsis thaliana]
  misc_feature (1)..(477): Homolog of NCBI NO: 15238250 NR Description: nucleoid DNA-binding protein cnd41 - like protein
  misc_feature (1)..(477): Homolog of NCBI NO: 24417232 NR Description: unknown [Arabidopsis thaliana]
  misc_feature (2)..(478): Homolog of NCBI NO: 24430421 NR Description: 41 kD chloroplast nucleoid DNA binding protein
  misc_feature (60)..(478): Homolog of NCBI NO: 11358588 NR Description: nucleoid DNA-binding protein cnd41-like protein -
  misc_feature (2)..(478): Homolog of NCBI NO: 7489168 NR Description: nucleoid DNA-binding protein cnd41, chloroplast -
  misc_feature (37)..(478): Homolog of NCBI NO: 22326716 NR Description: nucleoid DNA-binding protein cnd41 - like protein
MSSFLLASLALLFCISSLEKSFAFQATKESNNLRQYHFVHLNSLFPSSSCSSSAKGPKRKASLEVVHKHGPCSQLNHSGKAEATISHNDIMNLDNERVKYIQSRLSKNLGGENRVKELDSTTLPAKSGRLIGSADYYVVVGLGTPKRDLSLIFDTGSYLTWTQCEPCAGSCYKQQDPIFDPSKSSSYTNIKCTSSLCTQFRSAGCSSSTDASCIYDVKYGDNSISRGFLSQERLTITATDIVHDFLFGCGQDNEGLFRGTAGLMGLSRHPISFVQQTSSIYNKIFSYCLPSTPSSLGHLTFGASAATNANLKYTPFSTISGENSFYGLDIVGISVGGTKLPAVSSSTFSAGGSIIDSGTVITRLPPTAYAALRSAFRQFMMKYPVAYGTRLLDTCYDFSGYKEISVPRIDFEFAGGVKVELPLVGILYGESAQQLCLAFAANGNGNDITIFGNVQQKTLEVVYDVEGGRIGFGAAGCN

SEQ ID NO: 52648 - protein, 388 aa, Glycine max
  peptide (1)..(388): Ceres Seq. ID no. 15177323
  misc_feature (1)..(382): Pfam Name: Eukaryotic aspartyl protease Pfam Description: Eukaryotic aspartyl protease
  misc_feature (1)..(387): Homolog of NCBI NO: 15228618 NR Description: expressed protein [Arabidopsis thaliana]
  misc_feature (1)..(387): Homolog of NCBI NO: 25406599 NR Description: probable aspartyl proteinase, 105611-106921
  misc_feature (1)..(387): Homolog of NCBI NO: 21595063 NR Description: putative aspartyl protease [Arabidopsis thaliana]
  misc_feature (1)..(387): Homolog of NCBI NO: 18412482 NR Description: aspartyl protease -related [Arabidopsis thaliana]
  misc_feature (1)..(387): Homolog of NCBI NO: 15238250 NR Description: nucleoid DNA-binding protein cnd41 - like protein
  misc_feature (1)..(387): Homolog of NCBI NO: 24417232 NR Description: unknown [Arabidopsis thaliana]
  misc_feature (1)..(388): Homolog of NCBI NO: 24430421 NR Description: 41 kD chloroplast nucleoid DNA binding protein
  misc_feature (1)..(388): Homolog of NCBI NO: 11358588 NR Description: nucleoid DNA-binding protein cnd41-like protein -
  misc_feature (1)..(388): Homolog of NCBI NO: 7489168 NR Description: nucleoid DNA-binding protein cnd41, chloroplast -
  misc_feature (1)..(388): Homolog of NCBI NO: 22326716 NR Description: nucleoid DNA-binding protein cnd41 - like protein
MNLDNERVKYIQSRLSKNLGGENRVKELDSTTLPAKSGRLIGSADYYVVVGLGTPKRDLSLIFDTGSYLTWTQCEPCAGSCYKQQDPIFDPSKSSSYTNIKCTSSLCTQFRSAGCSSSTDASCIYDVKYGDNSISRGFLSQERLTITATDIVHDFLFGCGQDNEGLFRGTAGLMGLSRHPISFVQQTSSIYNKIFSYCLPSTPSSLGHLTFGASAATNANLKYTPFSTISGENSFYGLDIVGISVGGTKLPAVSSSTFSAGGSIIDSGTVITRLPPTAYAALRSAFRQFMMKYPVAYGTRLLDTCYDFSGYKEISVPRIDFEFAGGVKVELPLVGILYGESAQQLCLAFAANGNGNDITIFGNVQQKTLEVVYDVEGGRIGFGAAGCN

SEQ ID NO: 52649 - DNA, 1720 bp, Glycine max
  misc_feature (1)..(1720): Ceres Seq. ID no. 15170811
ataaaatggaactgagttagggaagagagagaagaggaacactgacatggcttcttcactcagaatttcaagactcatctctcgctccttttcttctacctccttcttttcacgaggtgggaatggtttccttggttcaagacactgcaaatacagcacttcttctgccattgaagaagaacccgttaaaccatcagtgcaagtagaacacacccaactcttaattgatggaaaatttgtagatgctgcttctggtaaaacttttccaactttagatcctaggacaggtgaagtaattgctcatgttgctgagggtcactctgaggatgttgatcgagcagttgcagctgcacgaaaagcatttgatcatggaccatggcctaagatgacggcttatgaacggcaaaggatcttgttgcgcgcagctgatctgcttgagaagcataatgatgagcttgcagcacttgagacttgggataatggaaagccttatgaacaagctgctaagattgaagttccaatgcttgttcgcctgattcgatactatgctggttgggcagataagatccatggtctaacagttccagctgatggaccatatcatgtgcaaacattgcatgaaccaattggtgttgccggtcagatcattccttggaacttccctcttctcatgtttgcctggaaggttggaccggcattggcctgtggcaacaccattgttctcaaaacagctgagcagacaccgttatctgctttatatgcagcaaaactatttcatgaggctggacttcctgctggtgttttaaatgtagtatctggctttggtccaactgctggtgctgctcttgctagccacatggaagttgacaagcttgcttttactggttccactgatactgggaaagttgtccttgaactggcggctaaaagcaatcttaagcctgttactttggagcttggtgggaaatccccctttattgtgtgtgaagatgctgatgtagatcaggctgttgagctagcccattttgctttattctttaatcagggacaatgttgctgtgctgggtctcgaacatttgtacatgaaagtgtatacgatgagtttgttgagaaagcaaaggctcgtgctttgaagcgtgttgttggtgatccattcaaggggggaatagagcaaggtcctcagattgattcagatcaatttgagaaaatactgaggtacatcagatctggtgttgaaagtggggcaacccttgaaaccggaggagacaagcttggcaacaagggcttctacattcaacctacagtcttctcaaatgttaaggatggcatgctgattgcaagggatgagatctttggtccagtccaatccatattaaaattcaaggatcttggtgaggtagttcaaagagcaaataacacacgttacgggcttgcggccggagtgttcacaacgaacatggacactgcctacactttgacgcgggcactgagagttggaacagtgtggataaactgctttgacacatttgatgctgcaattccctttggagggtacaagatgagtggtcaaggcagagaaaaaggagagtatagtctcaaaaactacttgcaagtgaaggctgttgttaatcccctgaaaaacccagcatggctttgagcaaacactagccttctttggataatcaataactatcagtgcctcaatgataatgatgataag

SEQ ID NO: 52650 - protein, 536 aa, Glycine max
  peptide (1)..(536): Ceres Seq. ID no. 15170812
  misc_feature (1)..(536): Homolog of NCBI NO: 11691926 NR Description: aldehyde dehydrogenase ALDH2b
  misc_feature (2)..(536): Homolog of NCBI NO: 15128580 NR Description: mitochondrial aldehyde dehydrogenase ALDH2
  misc_feature (1)..(536): Homolog of NCBI NO: 8163730 NR Description: aldehyde dehydrogenase [Oryza sativa]
  misc_feature (35)..(536): Homolog of NCBI NO: 14276718 NR Description: T-cytoplasm male sterility restorer factor 2 [Zea
  misc_feature (3)..(536): Homolog of NCBI NO: 18395300 NR Description: mitochondrial aldehyde dehydrogenase (ALDH3)
  misc_feature (35)..(536): Homolog of NCBI NO: 7431451 NR Description: rf2 nuclear restorer protein - maize
  misc_feature (8)..(536): Homolog of NCBI NO: 29373073 NR Description: aldehyde dehydrogenase 1 precursor [Lotus
  misc_feature (24)..(536): Homolog of NCBI NO: 20530131 NR Description: mitochondrial aldehyde dehydrogenase [Sorghum
  misc_feature (2)..(536): Homolog of NCBI NO: 20530127 NR Description: mitochondrial aldehyde dehydrogenase [Secale
  misc_feature (1)..(536): Homolog of NCBI NO: 7431444 NR Description: aldehyde dehydrogenase (NAD) (EC 1.2.1.3) 2A
MASSLRISRLISRSFSSTSFFSRGGNGFLGSRHCKYSTSSAIEEEPVKPSVQVEHTQLLIDGKFVDAASGKTFPTLDPRTGEVIAHVAEGHSEDVDRAVAAARKAFDHGPWPKMTAYERQRILLRAADLLEKHNDELAALETWDNGKPYEQAAKIEVPMLVRLIRYYAGWADKIHGLTVPADGPYHVQTLHEPIGVAGQIIPWNFPLLMFAWKVGPALACGNTIVLKTAEQTPLSALYAAKLFHEAGLPAGVLNVVSGFGPTAGAALASHMEVDKLAFTGSTDTGKVVLELAAKSNLKPVTLELGGKSPFIVCEDADVDQAVELAHFALFFNQGQCCCAGSRTFVHESVYDEFVEKAKARALKRVVGDPFKGGIEQGPQIDSDQFEKILRYIRSGVESGATLETGGDKLGNKGFYIQPTVFSNVKDGMLIARDEIFGPVQSILKFKDLGEVVQRANNTRYGLAAGVFTTNMDTAYTLTRALRVGTVWINCFDTFDAAIPFGGYKMSGQGREKGEYSLKNYLQVKAVVNPLKNPAWL

SEQ ID NO: 52651 - protein, 423 aa, Glycine max
  peptide (1)..(423): Ceres Seq. ID no. 15170813
  misc_feature (1)..(423): Homolog of NCBI NO: 11691926 NR Description: aldehyde dehydrogenase ALDH2b
  misc_feature (1)..(423): Homolog of NCBI NO: 15128580 NR Description: mitochondrial aldehyde dehydrogenase ALDH2
  misc_feature (1)..(423): Homolog of NCBI NO: 8163730 NR Description: aldehyde dehydrogenase [Oryza sativa]
  misc_feature (1)..(423): Homolog of NCBI NO: 14276718 NR Description: T-cytoplasm male sterility restorer factor 2 [Zea
  misc_feature (1)..(423): Homolog of NCBI NO: 18395300 NR Description: mitochondrial aldehyde dehydrogenase (ALDH3)
  misc_feature (1)..(423): Homolog of NCBI NO: 7431451 NR Description: rf2 nuclear restorer protein - maize
  misc_feature (1)..(423): Homolog of NCBI NO: 29373073 NR Description: aldehyde dehydrogenase 1 precursor [Lotus
  misc_feature (1)..(423): Homolog of NCBI NO: 20530131 NR Description: mitochondrial aldehyde dehydrogenase [Sorghum
  misc_feature (1)..(423): Homolog of NCBI NO: 20530127 NR Description: mitochondrial aldehyde dehydrogenase [Secale
  misc_feature (1)..(423): Homolog of NCBI NO: 7431444 NR Description: aldehyde dehydrogenase (NAD) (EC 1.2.1.3) 2A
MTAYERQRILLRAADLLEKHNDELAALETWDNGKPYEQAAKIEVPMLVRLIRYYAGWADKIHGLTVPADGPYHVQTLHEPIGVAGQIIPWNFPLLMFAWKVGPALACGNTIVLKTAEQTPLSALYAAKLFHEAGLPAGVLNVVSGFGPTAGAALASHMEVDKLAFTGSTDTGKVVLELAAKSNLKPVTLELGGKSPFIVCEDADVDQAVELAHFALFFNQGQCCCAGSRTFVHESVYDEFVEKAKARALKRVVGDPFKGGIEQGPQIDSDQFEKILRYIRSGVESGATLETGGDKLGNKGFYIQPTVFSNVKDGMLIARDEIFGPVQSILKFKDLGEVVQRANNTRYGLAAGVFTTNMDTAYTLTRALRVGTVWINCFDTFDAAIPFGGYKMSGQGREKGEYSLKNYLQVKAVVNPLKNPAWL

SEQ ID NO: 52652 - protein, 378 aa, Glycine max
  peptide (1)..(378): Ceres Seq. ID no. 15170814
  misc_feature (1)..(378): Homolog of NCBI NO: 11691926 NR Description: aldehyde dehydrogenase ALDH2b
  misc_feature (1)..(378): Homolog of NCBI NO: 15128580 NR Description: mitochondrial aldehyde dehydrogenase ALDH2
  misc_feature (1)..(378): Homolog of NCBI NO: 8163730 NR Description: aldehyde dehydrogenase [Oryza sativa]
  misc_feature (1)..(378): Homolog of NCBI NO: 14276718 NR Description: T-cytoplasm male sterility restorer factor 2 [Zea
  misc_feature (1)..(378): Homolog of NCBI NO: 18395300 NR Description: mitochondrial aldehyde dehydrogenase (ALDH3)
  misc_feature (1)..(378): Homolog of NCBI NO: 7431451 NR Description: rf2 nuclear restorer protein - maize
  misc_feature (1)..(378): Homolog of NCBI NO: 29373073 NR Description: aldehyde dehydrogenase 1 precursor [Lotus
  misc_feature (1)..(378): Homolog of NCBI NO: 20530131 NR Description: mitochondrial aldehyde dehydrogenase [Sorghum
  misc_feature (1)..(378): Homolog of NCBI NO: 20530127 NR Description: mitochondrial aldehyde dehydrogenase [Secale
  misc_feature (1)..(378): Homolog of NCBI NO: 7431444 NR Description: aldehyde dehydrogenase (NAD) (EC 1.2.1.3) 2A
MLVRLIRYYAGWADKIHGLTVPADGPYHVQTLHEPIGVAGQIIPWNFPLLMFAWKVGPALACGNTIVLKTAEQTPLSALYAAKLFHEAGLPAGVLNVVSGFGPTAGAALASHMEVDKLAFTGSTDTGKVVLELAAKSNLKPVTLELGGKSPFIVCEDADVDQAVELAHFALFFNQGQCCCAGSRTFVHESVYDEFVEKAKARALKRVVGDPFKGGIEQGPQIDSDQFEKILRYIRSGVESGATLETGGDKLGNKGFYIQPTVFSNVKDGMLIARDEIFGPVQSILKFKDLGEVVQRANNTRYGLAAGVFTTNMDTAYTLTRALRVGTVWINCFDTFDAAIPFGGYKMSGQGREKGEYSLKNYLQVKAVVNPLKNPAWL

SEQ ID NO: 52653 - DNA, 1526 bp, Glycine max
  misc_feature (1)..(1526): Ceres Seq. ID no. 15170804
acaaacaagagccaaaagccaacacacaacaaaactcaaacaaaaatgggacttcttcaacgtcccttgtgttgccacacacaacaaccacaatcccatcatcaccttcattccgagtcatcaacttcatcctccctctcttcacaaccaagcctcccttctgtcccctccctcaccccacaaaaaccgcatttcctcgaagaacaaccccaaaccacccaccacagactcatcaccgccgtcaagggccacacctcaccaatcttctccctcgccctccacggcaagtccctctatagcgcctcctccggcggcgaaataagagcatgcaatagaaatcccacatcggctaatgatataatcacattaaaatatataagtaatgtcaacaccaacactgttgtcgcgaccagcaacgcgccaatcaagtccctcatcgtatcccacgacaagttattcactgctcaccaagaccacaaaatccgtgtctggaaaacaacaaccgaccaacccggtaacaacaacaacaacaacccgaactactacaaatgcgtcgccacgcttcccaccctccacgaccgtatctccaaactcttctcctccaagaactacgtcgagattcgccgccacaagaagcgcacgtgggtgcatcacgtggacaccgtctccgccctcgcgctttcccgagacgggtccctcctctactccgcttcatgggaccgaacattcaagatctggcgaacctcggatttcaagtgtctggagtcagttaaaaacgcgcacgaggacgcaattaattccttagttttgtcgaataacggttttgtctacacaggttccgcggacactagaataaagatgtggaagaagttagagggagagaaaaagcattctctaataggaaccttggagaagcataaatccgctgttaacgctcttgctcttaactccgatggatcagtgttatattcaggtgcgtgtgataggtcaattttagtgtgggagagtgatcaaaatgaaaataataacaccatggtgttggtgggtgctttgagggggcacacaaaagcgatactgtgtttggtggtggtggcggatttggtgtgtagtggatctgctgataacagtgttagggtatggaggagaggtgctgagaagagttattcgtgtttggcggtgtttgaaggtcatcgacgacccgtgaagtgtttggctatggctgttgactccaacagtggtggtcctcgtgaggatgatcataatagtagctcttatctggtttacagtgcaggtttagattgtgagattaaagtgtggcaaatacgcgttccttcgctgtcgttgtgattctttttttgttactacaattttttgctcccttcattggatttgtaaataggatcagaattttttttgttattttgatgtgtaacttggcttctttttttcggtgtagtggtatttttactactaatttgactgaaaaaataaagaagatttggagatggattcataccaccaagttt

SEQ ID NO: 52654 - protein, 448 aa, Glycine max
  peptide (1)..(448): Ceres Seq. ID no. 15170805
  misc_feature (210)..(247): Pfam Name: WD domain, G-beta repeat Pfam Description: WD domain, G-beta repeat
  misc_feature (142)..(441): Homolog of NCBI NO: 17979259 NR Description: At1g49450/F13F21_11 [Arabidopsis thaliana]
  misc_feature (98)..(441): Homolog of NCBI NO: 15235354 NR Description: transducin / WD-40 repeat protein family
  misc_feature (36)..(441): Homolog of NCBI NO: 15231088 NR Description: transducin / WD-40 repeat protein family
  misc_feature (142)..(441): Homolog of NCBI NO: 15222143 NR Description: transducin / WD-40 repeat protein family
  misc_feature (137)..(441): Homolog of NCBI NO: 31126785 NR Description: putative WD repeat-protein
  misc_feature (116)..(441): Homolog of NCBI NO: 15230244 NR Description: transducin / WD-40 repeat protein family
  misc_feature (116)..(441): Homolog of NCBI NO: 15225317 NR Description: transducin / WD-40 repeat protein family
  misc_feature (30)..(443): Homolog of NCBI NO: 18395507 NR Description: transducin / WD-40 repeat protein family
  misc_feature (61)..(445): Homolog of NCBI NO: 15240616 NR Description: transducin / WD-40 repeat protein family
  misc_feature (16)..(446): Homolog of NCBI NO: 15221675 NR Description: transducin / WD-40 repeat protein family
TNKSQKPTHNKTQTKMGLLQRPLCCHTQQPQSHHHLHSESSTSSSLSSQPSLPSVPSLTPQKPHFLEEQPQTTHHRLITAVKGHTSPIFSLALHGKSLYSASSGGEIRACNRNPTSANDIITLKYISNVNTNTVVATSNAPIKSLIVSHDKLFTAHQDHKIRVWKTTTDQPGNNNNNNPNYYKCVATLPTLHDRISKLFSSKNYVEIRRHKKRTWVHHVDTVSALALSRDGSLLYSASWDRTFKIWRTSDFKCLESVKNAHEDAINSLVLSNNGFVYTGSADTRIKMWKKLEGEKKHSLIGTLEKHKSAVNALALNSDGSVLYSGACDRSILVWESDQNENNNTMVLVGALRGHTKAILCLVVVADLVCSGSADNSVRVWRRGAEKSYSCLAVFEGHRRPVKCLAMAVDSNSGGPREDDHNSSSYLVYSAGLDCEIKVWQIRVPSLSL

SEQ ID NO: 52655 - protein, 433 aa, Glycine max
  peptide (1)..(433): Ceres Seq. ID no. 15170806
  misc_feature (195)..(232): Pfam Name: WD domain, G-beta repeat Pfam Description: WD domain, G-beta repeat
  misc_feature (127)..(426): Homolog of NCBI NO: 17979259 NR Description: At1g49450/F13F21_11 [Arabidopsis thaliana]
  misc_feature (83)..(426): Homolog of NCBI NO: 15235354 NR Description: transducin / WD-40 repeat protein family
  misc_feature (21)..(426): Homolog of NCBI NO: 15231088 NR Description: transducin / WD-40 repeat protein family
  misc_feature (127)..(426): Homolog of NCBI NO: 15222143 NR Description: transducin / WD-40 repeat protein family
  misc_feature (122)..(426): Homolog of NCBI NO: 31126785 NR Description: putative WD repeat-protein
  misc_feature (101)..(426): Homolog of NCBI NO: 15230244 NR Description: transducin / WD-40 repeat protein family
  misc_feature (101)..(426): Homolog of NCBI NO: 15225317 NR Description: transducin / WD-40 repeat protein family
  misc_feature (15)..(428): Homolog of NCBI NO: 18395507 NR Description: transducin / WD-40 repeat protein family
  misc_feature (46)..(430): Homolog of NCBI NO: 15240616 NR Description: transducin / WD-40 repeat protein family
  misc_feature (1)..(431): Homolog of NCBI NO: 15221675 NR Description: transducin / WD-40 repeat protein family
MGLLQRPLCCHTQQPQSHHHLHSESSTSSSLSSQPSLPSVPSLTPQKPHFLEEQPQTTHHRLITAVKGHTSPIFSLALHGKSLYSASSGGEIRACNRNPTSANDIITLKYISNVNTNTVVATSNAPIKSLIVSHDKLFTAHQDHKIRVWKTTTDQPGNNNNNNPNYYKCVATLPTLHDRISKLFSSKNYVEIRRHKKRTWVHHVDTVSALALSRDGSLLYSASWDRTFKIWRTSDFKCLESVKNAHEDAINSLVLSNNGFVYTGSADTRIKMWKKLEGEKKHSLIGTLEKHKSAVNALALNSDGSVLYSGACDRSILVWESDQNENNNTMVLVGALRGHTKAILCLVVVADLVCSGSADNSVRVWRRGAEKSYSCLAVFEGHRRPVKCLAMAVDSNSGGPREDDHNSSSYLVYSAGLDCEIKVWQIRVPSLSL

SEQ ID NO: 52656 - DNA, 1560 bp, Glycine max
  misc_feature (1)..(1560): Ceres Seq. ID no. 15178279
taaattttgattctgctttgtttacttgcttttaattttaccgaatgatttcttgcatttttcaggtgcatgctaaacctttttctcccgtcaacaaatttctgatgcagtcctattatgacagatacatcaatttacacgatttggattttgaaaaatttatgtctcaagaagtcccttatggttcgtgtgataaccttaattttgtgttgagattgtcagatctaaagcgcactcttattggtgaaggttcacatcgtactgtgtctacattaatccaattgaaaacccaaccgtcaaagtctttttctgaactgttaagcaactcatgtaaattcatgattattgagagattgccttctggagtttttgctgatccatttgagttacaacatctcgttcagcgaggcaagttcagtgatatagctgtctttggtgacacaaatctggagctgccttcattcttgtccaatcgttctgctgttgaaattcacttgcttgttgatccaaatatattgcaagagccaactgatattaacatggagcttccattgcatgctcgatatcaacctctgaatggaagtgggtactcggcaattgaatttggtgcaccggatatggtagtgcgctgcagcacaaaagaaaagatggaaaatcacaattgcttctttaaattggaaaaagatgatgctaatctgtatggtgctcatattgtttggagaataccttctggaataaaggcacatgctggtcttgtttctgccgttacatttattgcagctttgttatcaactattgcaattgttgttgcatcattatatcaaccctggtgtttttgaatatacctaaggaggtagacggaattgttgaggtgattaaattctattattggcattggaataatggtcaaggtgtgttctctgtgaatccaagagggtgtctttgtagttgaaagaaggttgtgattttatatgtggggatggagttatatggaggtcggatgaagacccagtttgggatgaggctatattacaagcaggtggcgggcaatggatatgctgtggataaatcggaattttgggaagtggttaccgacagcaataacgacgtgcagaaacagattgtgcatttaggatccggatccgtgcagttatcagacttttcagagtctaaataattctattaagcttttctttttggtgaataaataattctattaagctggttgtagagaactaatgcgttcttatgtgttggattgggtgaaggaatgcttacgcagtgatgaagtactagtgtttgattatttcagatcataatgcagcaaaagcattagtaatacgcaaggtgtgggcgtcgttaaaacagctgttgctagaggattttagatggctttttgacagtaggcttttttcttagattttggaatgttttgagtaccgatcttatttgtataagaaacatatccttgtactcttctaaatcattttattgcacaccttgtgttttaaactgggttattaataatatgcaaatgctaaccatgacttttattatagg

SEQ ID NO: 52657 - protein, 264 aa, Glycine max
  peptide (1)..(264): Ceres Seq. ID no. 15178280
  misc_feature (61)..(196): Homolog of NCBI NO: 7020686 NR Description: unnamed protein product [Homo sapiens]
  misc_feature (61)..(256): Homolog of NCBI NO: 34869402 NR Description: similar to hypothetical protein FLJ20522 [Rattus
  misc_feature (61)..(256): Homolog of NCBI NO: 23680885 NR Description: hypothetical protein FLJ20522 [Homo sapiens]
  misc_feature (17)..(258): Homolog of NCBI NO: 15237961 NR Description: hypothetical protein [Arabidopsis thaliana]
MISCIFQVHAKPFSPVNKFLMQSYYDRYINLHDLDFEKFMSQEVPYGSCDNLNFVLRLSDLKRTLIGEGSHRTVSTLIQLKTQPSKSFSELLSNSCKFMIIERLPSGVFADPFELQHLVQRGKFSDIAVFGDTNLELPSFLSNRSAVEIHLLVDPNILQEPTDINMELPLHARYQPLNGSGYSAIEFGAPDMVVRCSTKEKMENHNCFFKLEKDDANLYGAHIVWRIPSGIKAHAGLVSAVTFIAALLSTIAIVVASLYQPWCF

SEQ ID NO: 52658 - protein, 244 aa, Glycine max
  peptide (1)..(244): Ceres Seq. ID no. 15178281
  misc_feature (41)..(176): Homolog of NCBI NO: 7020686 NR Description: unnamed protein product [Homo sapiens]
  misc_feature (41)..(236): Homolog of NCBI NO: 34869402 NR Description: similar to hypothetical protein FLJ20522 [Rattus
  misc_feature (41)..(236): Homolog of NCBI NO: 23680885 NR Description: hypothetical protein FLJ20522 [Homo sapiens]
  misc_feature (1)..(238): Homolog of NCBI NO: 15237961 NR Description: hypothetical protein [Arabidopsis thaliana]
MQSYYDRYINLHDLDFEKFMSQEVPYGSCDNLNFVLRLSDLKRTLIGEGSHRTVSTLIQLKTQPSKSFSELLSNSCKFMIIERLPSGVFADPFELQHLVQRGKFSDIAVFGDTNLELPSFLSNRSAVEIHLLVDPNILQEPTDINMELPLHARYQPLNGSGYSAIEFGAPDMVVRCSTKEKMENHNCFFKLEKDDANLYGAHIVWRIPSGIKAHAGLVSAVTFIAALLSTIAIVVASLYQPWCF

SEQ ID NO: 52659 - protein, 225 aa, Glycine max
  peptide (1)..(225): Ceres Seq. ID no. 15178282
  misc_feature (22)..(157): Homolog of NCBI NO: 7020686 NR Description: unnamed protein product [Homo sapiens]
  misc_feature (22)..(217): Homolog of NCBI NO: 34869402 NR Description: similar to hypothetical protein FLJ20522 [Rattus
  misc_feature (22)..(217): Homolog of NCBI NO: 23680885 NR Description: hypothetical protein FLJ20522 [Homo sapiens]
  misc_feature (1)..(219): Homolog of NCBI NO: 15237961 NR Description: hypothetical protein [Arabidopsis thaliana]
MSQEVPYGSCDNLNFVLRLSDLKRTLIGEGSHRTVSTLIQLKTQPSKSFSELLSNSCKFMIIERLPSGVFADPFELQHLVQRGKFSDIAVFGDTNLELPSFLSNRSAVEIHLLVDPNILQEPTDINMELPLHARYQPLNGSGYSAIEFGAPDMVVRCSTKEKMENHNCFFKLEKDDANLYGAHIVWRIPSGIKAHAGLVSAVTFIAALLSTIAIVVASLYQPWCF

SEQ ID NO: 52660 - DNA, 733 bp, Glycine max
  misc_feature (1)..(733): Ceres Seq. ID no. 14309585
ccttttcatagtatatgatctcatctcaaagtccattctacacaattctctctcatcatctttgctattacctctttttccaaactctaaaaatttttagttccacaaaaccaaaccaaaatggcagcagcctcggcctcatccaccatgatatcaacaccagccttatctccaagcacaagcatccaaaagcaccatcatttgaagccatccaacgtgtgctttcaaggccttagacccctcacaaggttcacaaccaaagtgagcagcaccaccaaaagggttattccaaagggtggtgtcggtgttagagctgaactcaactcagcacttgtcataagcctcagcactgggctctccctcttcttggggaggtttgtgttcttcaacttccaaagggagaacgtggcaaagcaagtgcctgagcagaacggactcacacactttgaggctggtgacacacgtgccaaggagtatgtcagcctcctcaaatccaatgaccctgttggattcaacattgttgatgtcttggcttggggctccattggccatgttgttgcttactatatcttggccaccactagcaatggctatgaccctgcattctttggctgattttcatcatgttccattgtctttctttgcttgctttttactatgttataatgtaatcaatgtcatcatgtataggttctctctaagatccaacaagttcagcatatgctaatttgtc

SEQ ID NO: 52661 - protein, 164 aa, Glycine max
  peptide (1)..(164): Ceres Seq. ID no. 14309586
  misc_feature (66)..(160): Pfam Name: Photosystem I psaG / psaK Pfam Description: Photosystem I psaG / psaK
  misc_feature (66)..(103): Homolog of NCBI NO: 131193 NR Description: Photosystem I reaction center subunit V (PSI-G)
  misc_feature (39)..(155): Homolog of NCBI NO: 131191 NR Description: Photosystem I reaction center subunit V, precursor (PSI-G) (Light-harvesting complex I 10 kDa protein)
  misc_feature (56)..(159): Homolog of NCBI NO: 17369611 NR Description: Photosystem I reaction center subunit V,
  misc_feature (47)..(164): Homolog of NCBI NO: 131192 NR Description: Photosystem I reaction center subunit V,
  misc_feature (16)..(164): Homolog of NCBI NO: 15222757 NR Description: photosystem I subunit V precursor -related
  misc_feature (2)..(163): Homolog of NCBI NO: 131194 NR Description: Photosystem I reaction center subunit V,
MAAASASSTMISTPALSPSTSIQKHHHLKPSNVCFQGLRPLTRFTTKVSSTTKRVIPKGGVGVRAELNSALVISLSTGLSLFLGRFVFFNFQRENVAKQVPEQNGLTHFEAGDTRAKEYVSLLKSNDPVGFNIVDVLAWGSIGHVVAYYILATTSNGYDPAFFG

SEQ ID NO: 52662 - protein, 155 aa, Glycine max
  peptide (1)..(155): Ceres Seq. ID no. 14309587
  misc_feature (57)..(151): Pfam Name: Photosystem I psaG / psaK Pfam Description: Photosystem I psaG / psaK
  misc_feature (57)..(94): Homolog of NCBI NO: 131193 NR Description: Photosystem I reaction center subunit V (PSI-G)
  misc_feature (30)..(146): Homolog of NCBI NO: 131191 NR Description: Photosystem I reaction center subunit V, precursor (PSI-G) (Light-harvesting complex I 10 kDa protein)
  misc_feature (47)..(150): Homolog of NCBI NO: 17369611 NR Description: Photosystem I reaction center subunit V,
  misc_feature (38)..(155): Homolog of NCBI NO: 131192 NR Description: Photosystem I reaction center subunit V,
  misc_feature (7)..(155): Homolog of NCBI NO: 15222757 NR Description: photosystem I subunit V precursor -related
  misc_feature (1)..(154): Homolog of NCBI NO: 131194 NR Description: Photosystem I reaction center subunit V,
MISTPALSPSTSIQKHHHLKPSNVCFQGLRPLTRFTTKVSSTTKRVIPKGGVGVRAELNSALVISLSTGLSLFLGRFVFFNFQRENVAKQVPEQNGLTHFEAGDTRAKEYVSLLKSNDPVGFNIVDVLAWGSIGHVVAYYILATTSNGYDPAFFG

SEQ ID NO: 52663 - protein, 83 aa, Glycine max
  peptide (1)..(83): Ceres Seq. ID no. 14309588
MSASSNPMTLLDSTLLMSWLGAPLAMLLLTISWPPLAMAMTLHSLADFHHVPLSFFACFLLCYNVINVIMYRFSLRSNKFSIC

SEQ ID NO: 52664 - DNA, 1657 bp, Glycine max
  misc_feature (1)..(1657): Ceres Seq. ID no. 15177692
gcttcctttcttttaacactcctctatctattactgctccatctcttttattgctctgaaacgcctcctaccatccaacttttattgttctttcaatattgctgcctaaaccctatgcacttacagactctttcccactttctttctctctttttcgtcttgtactaccatgttagacactgctgaacgtgattctgaggtgagtttggagaccgtctattcttccacacttggaagctcaatgagcagcgagagcatttgtagcaccagtttcagccgtctttccttcgatctcctccctccctctccggagactctctccatcaagcctcaccgctcctccgacttcgcctactccgccgccttccgccgcaaagccgcacttaccttccgcgacttccacctcctccgccgcatcggcgccggcgacatcggcaccgtctacctatgccgcctccacaacagcaaccaattgaagaatcaggatgaagacgaagaagatgtttcttgtttatacgccatgaaagtggtggacaaagacgcagtggcattgaagaagaagtcgcagagagcggaaatggagaaaaaaatcctcaagatgctcgaccacccgttcctccctacgctctacgccgagttcgaagcttctcatttctcttgcatcgtcatggagttttgttccggtggagacttgcactccctgcgcttcaagcaccctcacaaccgtttccctctctcctccgcaagattttatgcggcggaggtgctggtggcgttggaatacctccacatgctgggaatcatctacagagatttaaagcctgagaacgtgttggttagatcagacggtcacatcatgctttctgatttcgatctttctctttactcagaggcaatcccagccgttgaatcctccccagattccttaccatcttcaaatgcattaccattaccttacgcttacactcgctcgcattcttttatgagtccattctcctgcttctcaaaccggtcgcgcgaggttcgaactattgaaccgaatcggctttttgttgccgaaccggtttcggctcggtcctgttcctttgttgggacccacgagtacgtctcgccgaaggtcgcttctggccggtcgcacgggaacgccgtggactggtggtcgtttggagtatttatctacgagctcatctacggtcgcacgccgtatgcgggtccatcgaaagaggctacgctgcggaacatcgtaaagaaaccactggcgttccccacggccacaccaacgagcaatcttgaactgcacgcgcgggatttgatatccggcttgctgaacaaggatccggcgcgccggctcggctcgaagcgcggcgccgctgacgtcaaaaagcaccccttctttaaagggctcaacttggcgctgattcgcatgcagacgccgcccgaagtgcctggctccagaagaaggaccaaaacgacgtcgctgtaccccgtgaagggtaacggcaacaacaaccataaacaacaacagacggcgtcgtttgatttttacttctaaaaaaatactacgatgaaagttttgtgccacgtctccagtgacctattgtatattggagctgtcctttttttttatatatatatatggaataaaaatatttatagt

SEQ ID NO: 52665 - protein, 460 aa, Glycine max
  peptide (1)..(460): Ceres Seq. ID no. 15177693
  misc_feature (77)..(409): Pfam Name: Protein kinase domain Pfam Description: Protein kinase domain
  misc_feature (295)..(426): Homolog of NCBI NO: 37536874 NR Description: putative protein kinase [Oryza sativa (japonica
  misc_feature (53)..(255): Homolog of NCBI NO: 37536874 NR Description: putative protein kinase [Oryza sativa (japonica
  misc_feature (275)..(426): Homolog of NCBI NO: 15236802 NR Description: protein kinase, putative [Arabidopsis thaliana]
  misc_feature (1)..(281): Homolog of NCBI NO: 15236802 NR Description: protein kinase, putative [Arabidopsis thaliana]
  misc_feature (296)..(434): Homolog of NCBI NO: 15225776 NR Description: second messenger-dependent protein kinase
  misc_feature (1)..(251): Homolog of NCBI NO: 15225776 NR Description: second messenger-dependent protein kinase
  misc_feature (279)..(426): Homolog of NCBI NO: 34910268 NR Description: putative protein kinase [Oryza sativa (japonica
  misc_feature (6)..(262): Homolog of NCBI NO: 34910268 NR Description: putative protein kinase [Oryza sativa (japonica
  misc_feature (6)..(459): Homolog of NCBI NO: 15226800 NR Description: protein kinase (PINOID/PID) [Arabidopsis
  misc_feature (6)..(459): Homolog of NCBI NO: 1935918 NR Description: putative serine/threonine protein kinase
MLDTAERDSEVSLETVYSSTLGSSMSSESICSTSFSRLSFDLLPPSPETLSIKPHRSSDFAYSAAFRRKAALTFRDFHLLRRIGAGDIGTVYLCRLHNSNQLKNQDEDEEDVSCLYAMKVVDKDAVALKKKSQRAEMEKKILKMLDHPFLPTLYAEFEASHFSCIVMEFCSGGDLHSLRFKHPHNRFPLSSARFYAAEVLVALEYLHMLGIIYRDLKPENVLVRSDGHIMLSDFDLSLYSEAIPAVESSPDSLPSSNALPLPYAYTRSHSFMSPFSCFSNRSREVRTIEPNRLFVAEPVSARSCSFVGTHEYVSPKVASGRSHGNAVDWWSFGVFIYELIYGRTPYAGPSKEATLRNIVKKPLAFPTATPTSNLELHARDLISGLLNKDPARRLGSKRGAADVKKHPFFKGLNLALIRMQTPPEVPGSRRRTKTTSLYPVKGNGNNNHKQQQTASFDFYF

SEQ ID NO: 52666 - protein, 436 aa, Glycine max
  peptide (1)..(436): Ceres Seq. ID no. 15177694
  misc_feature (53)..(385): Pfam Name: Protein kinase domain Pfam Description: Protein kinase domain
  misc_feature (271)..(402): Homolog of NCBI NO: 37536874 NR Description: putative protein kinase [Oryza sativa (japonica
  misc_feature (29)..(231): Homolog of NCBI NO: 37536874 NR Description: putative protein kinase [Oryza sativa (japonica
  misc_feature (251)..(402): Homolog of NCBI NO: 15236802 NR Description: protein kinase, putative [Arabidopsis thaliana]
  misc_feature (1)..(257): Homolog of NCBI NO: 15236802 NR Description: protein kinase, putative [Arabidopsis thaliana]
  misc_feature (272)..(410): Homolog of NCBI NO: 15225776 NR Description: second messenger-dependent protein kinase
  misc_feature (1)..(227): Homolog of NCBI NO: 15225776 NR Description: second messenger-dependent protein kinase
  misc_feature (255)..(402): Homolog of NCBI NO: 34910268 NR Description: putative protein kinase [Oryza sativa (japonica
  misc_feature (1)..(238): Homolog of NCBI NO: 34910268 NR Description: putative protein kinase [Oryza sativa (japonica
  misc_feature (1)..(435): Homolog of NCBI NO: 15226800 NR Description: protein kinase (PINOID/PID) [Arabidopsis
  misc_feature (1)..(435): Homolog of NCBI NO: 1935918 NR Description: putative serine/threonine protein kinase
MSSESICSTSFSRLSFDLLPPSPETLSIKPHRSSDFAYSAAFRRKAALTFRDFHLLRRIGAGDIGTVYLCRLHNSNQLKNQDEDEEDVSCLYAMKVVDKDAVALKKKSQRAEMEKKILKMLDHPFLPTLYAEFEASHFSCIVMEFCSGGDLHSLRFKHPHNRFPLSSARFYAAEVLVALEYLHMLGIIYRDLKPENVLVRSDGHIMLSDFDLSLYSEAIPAVESSPDSLPSSNALPLPYAYTRSHSFMSPFSCFSNRSREVRTIEPNRLFVAEPVSARSCSFVGTHEYVSPKVASGRSHGNAVDWWSFGVFIYELIYGRTPYAGPSKEATLRNIVKKPLAFPTATPTSNLELHARDLISGLLNKDPARRLGSKRGAADVKKHPFFKGLNLALIRMQTPPEVPGSRRRTKTTSLYPVKGNGNNNHKQQQTASFDFYF

SEQ ID NO: 52667 - protein, 343 aa, Glycine max
  peptide (1)..(343): Ceres Seq. ID no. 15177695
  misc_feature (1)..(292): Pfam Name: Protein kinase domain Pfam Description: Protein kinase domain
  misc_feature (178)..(309): Homolog of NCBI NO: 37536874 NR Description: putative protein kinase [Oryza sativa (japonica
  misc_feature (1)..(138): Homolog of NCBI NO: 37536874 NR Description: putative protein kinase [Oryza sativa (japonica
  misc_feature (158)..(309): Homolog of NCBI NO: 15236802 NR Description: protein kinase, putative [Arabidopsis thaliana]
  misc_feature (1)..(164): Homolog of NCBI NO: 15236802 NR Description: protein kinase, putative [Arabidopsis thaliana]
  misc_feature (179)..(317): Homolog of NCBI NO: 15225776 NR Description: second messenger-dependent protein kinase
  misc_feature (1)..(134): Homolog of NCBI NO: 15225776 NR Description: second messenger-dependent protein kinase
  misc_feature (162)..(309): Homolog of NCBI NO: 34910268 NR Description: putative protein kinase [Oryza sativa (japonica
  misc_feature (1)..(145): Homolog of NCBI NO: 34910268 NR Description: putative protein kinase [Oryza sativa (japonica
  misc_feature (1)..(342): Homolog of NCBI NO: 15226800 NR Description: protein kinase (PINOID/PID) [Arabidopsis
  misc_feature (1)..(342): Homolog of NCBI NO: 1935918 NR Description: putative serine/threonine protein kinase
MKVVDKDAVALKKKSQRAEMEKKILKMLDHPFLPTLYAEFEASHFSCIVMEFCSGGDLHSLRFKHPHNRFPLSSARFYAAEVLVALEYLHMLGIIYRDLKPENVLVRSDGHIMLSDFDLSLYSEAIPAVESSPDSLPSSNALPLPYAYTRSHSFMSPFSCFSNRSREVRTIEPNRLFVAEPVSARSCSFVGTHEYVSPKVASGRSHGNAVDWWSFGVFIYELIYGRTPYAGPSKEATLRNIVKKPLAFPTATPTSNLELHARDLISGLLNKDPARRLGSKRGAADVKKHPFFKGLNLALIRMQTPPEVPGSRRRTKTTSLYPVKGNGNNNHKQQQTASFDFYF

SEQ ID NO: 52668 - DNA, 1877 bp, Glycine max
  misc_feature (1)..(1877): Ceres Seq. ID no. 15177304
gcacacaaccactctttcttcttcttctcttaaaagagcctttgctttttctttaggcctttccgaattaagtacttgtttcattttctctcgaagcaagaaaaatgttcatcgagagtttcaaggttgagagtcctaacgtgaagtacacagagactgagattcagtccgtgtacaactatgaaaccactgaacttgttcacgagaacaagaatggcacttatcagtgggttgtcaagcccaaaactgtcaaatatgaatttaaaaccaacacccatgtccctaaactaggggtaatgcttgtggggtggggtggaaacaatggctcaaccctcaccggtggtgttattgctaaccgagagggtatttcatgggcaacaaaggacaagattcaacaagccaattactttgggtcgctgacccaggcatcagctattagagttgggtctttccaaggggaggaaatatatgccccattcaagagcctgcttccaatggtaaaccctgatgatgttgtgtttgggggatgggatatcagtaacttgaacctggcagatgccatggccagggccaaggtgtttgatatcgacctgcagaaacagttgaggccttacatggaatctatggttccactccccggaatctatgaccccgatttcattgctgccaaccaaggagaccgtgccaacaacgtgatcaagggcacaaagaaagaacaagttcaacaaatcatcaaagacattaaggagtttaaggaaagcactaaggttgacaaggtggttgtcctgtggacagccaacacagagaggtacagcaacctagttgtgggactaaacgacaccatggaaaacctctttgcttccttggacaggaacgaggctgagatttccccttccaccttgtatgccattgcttgtgttatggaaaatgttcctttcatcaatggaagccctcagaacacctttgtcccagggctgattgatctggccatcaagaggaacagtttgattggaggagatgactttaagagtggtcagaccaaaatgaaatctgtgttggtggatttccttgtgggggccggcatcaagccaacatctatagtgagttacaaccatctgggcaacaatgatggcatgaatctctcagcccctcaaaccttccgctctaaggaaatctccaagagcaatgttgttgacgatatggtcaacagcaacgccatcctctatgagcccggtgaacatccagaccatgtggttgtcattaagtacgtgccttatgtaggggacagcaagagggccatggatgagtacacttctgagatattcatgggtggaaagaacacaattgtgttgcacaacacatgtgaggattcactgttagctgctcctattatcttggacttggtccttcttgctgagctcagcactcgaatcgagtttaaagctgaaaatgagggaaaattccactcattccacccagttgcgaccatccttagttacctgaccaaggcccctctggttccaccgggtacaccagtggtgaatgcgttgtcaaagcagcgagctatgctggaaaacatcctgagggcttgtgttggattagctcctgagaacaacatgatcctagagtacaagtgaagttcaaagtcttaagagtaacggtttgggatagtgtagttgaatgtgatcaaaacttaactcatatcccatacccctcttttctgttatatagttctggcaaatgtgaaatttgaagatcgttgaatctctctatctttgttcctgccgacttatttgagagcaggctatctatgcatgtatgtaataaaataatatcaagttatccacgtcttttgtgcttaattcatgtttctcttc

SEQ ID NO: 52669 - protein, 510 aa, Glycine max
  peptide (1)..(510): Ceres Seq. ID no. 15177305
  misc_feature (61)..(495): Pfam Name: Myo-inositol-1-phosphate synthase Pfam Description: Myo-inositol-1-phosphate synthase
MFIESFKVESPNVKYTETEIQSVYNYETTELVHENKNGTYQWVVKPKTVKYEFKTNTHVPKLGVMLVGWGGNNGSTLTGGVIANREGISWATKDKIQQANYFGSLTQASAIRVGSFQGEEIYAPFKSLLPMVNPDDVVFGGWDISNLNLADAMARAKVFDIDLQKQLRPYMESMVPLPGIYDPDFIAANQGDRANNVIKGTKKEQVQQIIKDIKEFKESTKVDKVVVLWTANTERYSNLVVGLNDTMENLFASLDRNEAEISPSTLYAIACVMENVPFINGSPQNTFVPGLIDLAIKRNSLIGGDDFKSGQTKMKSVLVDFLVGAGIKPTSIVSYNHLGNNDGMNLSAPQTFRSKEISKSNVVDDMVNSNAILYEPGEHPDHVVVIKYVPYVGDSKRAMDEYTSEIFMGGKNTIVLHNTCEDSLLAAPIILDLVLLAELSTRIEFKAENEGKFHSFHPVATILSYLTKAPLVPPGTPVVNALSKQRAMLENILRACVGLAPENNMILEYK

SEQ ID NO: 52670 - protein, 446 aa, Glycine max
  peptide (1)..(446): Ceres Seq. ID no. 15177306
  misc_feature (1)..(431): Pfam Name: Myo-inositol-1-phosphate synthase Pfam Description: Myo-inositol-1-phosphate synthase
MLVGWGGNNGSTLTGGVIANREGISWATKDKIQQANYFGSLTQASAIRVGSFQGEEIYAPFKSLLPMVNPDDVVFGGWDISNLNLADAMARAKVFDIDLQKQLRPYMESMVPLPGIYDPDFIAANQGDRANNVIKGTKKEQVQQIIKDIKEFKESTKVDKVVVLWTANTERYSNLVVGLNDTMENLFASLDRNEAEISPSTLYAIACVMENVPFINGSPQNTFVPGLIDLAIKRNSLIGGDDFKSGQTKMKSVLVDFLVGAGIKPTSIVSYNHLGNNDGMNLSAPQTFRSKEISKSNVVDDMVNSNAILYEPGEHPDHVVVIKYVPYVGDSKRAMDEYTSEIFMGGKNTIVLHNTCEDSLLAAPIILDLVLLAELSTRIEFKAENEGKFHSFHPVATILSYLTKAPLVPPGTPVVNALSKQRAMLENILRACVGLAPENNMILEYK

SEQ ID NO: 52671 - protein, 380 aa, Glycine max
  peptide (1)..(380): Ceres Seq. ID no. 15177307
  misc_feature (1)..(365): Pfam Name: Myo-inositol-1-phosphate synthase Pfam Description: Myo-inositol-1-phosphate synthase
MVNPDDVVFGGWDISNLNLADAMARAKVFDIDLQKQLRPYMESMVPLPGIYDPDFIAANQGDRANNVIKGTKKEQVQQIIKDIKEFKESTKVDKVVVLWTANTERYSNLVVGLNDTMENLFASLDRNEAEISPSTLYAIACVMENVPFINGSPQNTFVPGLIDLAIKRNSLIGGDDFKSGQTKMKSVLVDFLVGAGIKPTSIVSYNHLGNNDGMNLSAPQTFRSKEISKSNVVDDMVNSNAILYEPGEHPDHVVVIKYVPYVGDSKRAMDEYTSEIFMGGKNTIVLHNTCEDSLLAAPIILDLVLLAELSTRIEFKAENEGKFHSFHPVATILSYLTKAPLVPPGTPVVNALSKQRAMLENILRACVGLAPENNMILEYK

SEQ ID NO: 52672 - DNA, 2180 bp, Glycine max
  misc_feature (1)..(2180): Ceres Seq. ID no. 15177300
attcacatctctatgcattctttatcagtctcattcatttcttctcaacacttcttctctccgtcgccgccgccggaatatcctttctccgatgagaaaatccaccagactctccgccatcggcctctcaaagcctccggaaggaccagaaccgccgaagccttttagcactcgattttcgctgcggtcgtacgcgaagcgcgtgcagctgctcacaccggagcagagatcggtggttttgagaacgggcttcgggaaccttctcctcgttccgaaccacacgctgaacaaggtgttcctcacggagctcatggacgcgtggagctgcgagcgccgcgcgttcgtgctacgctccggcgaagaaattccgatgactcttctcgacgccgctcttatactgggcctgccggttgccggtaaccccgtgaatctcaccgaagaggaaccgttctctgaattggaagaatcttacggagcaacggaaacaaaaaggaaggtggcgatgagttttctggaaaataggttagattcgataggggaagatgtgagtgaggattttgtgaggagcttcttgctctacacaattgggacgtttctcgcttcgaacgatgggaaggtggattcgcggttcttgcggtttcttgaggatttggatgaggtttcagggtttgcttggggaggtgttgttgttgatgatttgtgtcagtggctggataagaggaaagagaataatgtgcagtatgttggaggttgtcttatttttctccaaatatggtcctatgaacattttgatgtagcagcgcgaccacaagtgcaagatcatgatttgacctttcctcgtgtgtgtcgatgggataatactaaacctaagcggggtacttcatggtttaaagacctggatgatgaccaggtgatttggaaactccaacctacttctggagagttacaaatagaggtaatcaaagaagcactggagttgctaggtggcaacaaagagcttcaaagtccagaaagcagttcaacaagctcaacatctagtgttcctgatgtagattcagggttacagcttagtatcaacaaagaagtgcatggagtggacgaggatgatttggagaatcaggtagtggaggacactcccacaaagtcgagcacttgtgatgaagaatatagagagcaaatcaatcctgaaaatctgatagtgttggacactcccccagatttaaccatttgtgacaaagtaggtagggggcaaggaatgaatcttgaaaacctggtagtggtagttgaggatacccctacagctaccagtattgctgaggaagtaagtggagatgaagaggtcaacagtgaaaaactcatagtggaggatactcccccgaattccatttgtgacaaagtatgtagagagcaagaaatgaatcttgaaaacctggaagtgctagttgaggatgcttctcttgctgtcgaagtaggtggggatcaggagttcaatggtgaaaaactcatagtggaggatactccccctgtgctgagcttttatgatgatgatataagaaagaagaatgtcatgttagaagtgaaaaacactgaattgaagatgaaaatagacctagtaatggaggaaaatgaacttctccgtacacagattttatcaaatacccgatttgaagagcagaacgctgagttgaagaaagagctggacttgttgagagaagaaaacagaattttaagactgtcaataagtgattttgcagatcggattgatagacatgttttggatttcgaatctaatgcagctgagtaaacatgctatccttgaatttcaccataacttaactagctgcttatagagctagggctgtgacacccaaacaagccttcaaaccttgctgcagccgccacaacattgatcaatcccagttcttccgcaaagtataggattgtgggtaatcaagtgtgtgtatatatattgttaaggtaaacaaacatgattcattctaatttaggtgtgggtagtattaagaggtttctttttaagtgaaaccatgaaattcataccagggaaacagaactatttgtgttctttattgtatattatgtagcagataacacatctacttctccaaacacaagatgttggagttcaaatggtatatagttatccttttcttttcatgagc

SEQ ID NO: 52673 - protein, 600 aa, Glycine max
  peptide (1)..(600): Ceres Seq. ID no. 15177301
  misc_feature (47)..(303): Homolog of NCBI NO: 15221080 NR Description: calcineurin-like phosphoesterase family
  misc_feature (47)..(303): Homolog of NCBI NO: 25405918 NR Description: protein F21D18.16 [imported] - Arabidopsis
  misc_feature (68)..(285): Homolog of NCBI NO: 34895892 NR Description: P0009G03.26 [Oryza sativa (japonica
  misc_feature (83)..(295): Homolog of NCBI NO: 34896148 NR Description: P0701D05.29 [Oryza sativa (japonica
  misc_feature (71)..(337): Homolog of NCBI NO: 21553489 NR Description: unknown [Arabidopsis thaliana]
  misc_feature (71)..(337): Homolog of NCBI NO: 18394553 NR Description: expressed protein [Arabidopsis thaliana]
  misc_feature (71)..(333): Homolog of NCBI NO: 22325485 NR Description: serine/threonine phosphatase PP7 -related
  misc_feature (71)..(306): Homolog of NCBI NO: 18400697 NR Description: expressed protein [Arabidopsis thaliana]
  misc_feature (71)..(306): Homolog of NCBI NO: 21537057 NR Description: unknown [Arabidopsis thaliana]
FTSLCILYQSHSFLLNTSSLRRRRRNILSPMRKSTRLSAIGLSKPPEGPEPPKPFSTRFSLRSYAKRVQLLTPEQRSVVLRTGFGNLLLVPNHTLNKVFLTELMDAWSCERRAFVLRSGEEIPMTLLDAALILGLPVAGNPVNLTEEEPFSELEESYGATETKRKVAMSFLENRLDSIGEDVSEDFVRSFLLYTIGTFLASNDGKVDSRFLRFLEDLDEVSGFAWGGVVVDDLCQWLDKRKENNVQYVGGCLIFLQIWSYEHFDVAARPQVQDHDLTFPRVCRWDNTKPKRGTSWFKDLDDDQVIWKLQPTSGELQIEVIKEALELLGGNKELQSPESSSTSSTSSVPDVDSGLQLSINKEVHGVDEDDLENQVVEDTPTKSSTCDEEYREQINPENLIVLDTPPDLTICDKVGRGQGMNLENLVVVVEDTPTATSIAEEVSGDEEVNSEKLIVEDTPPNSICDKVCREQEMNLENLEVLVEDASLAVEVGGDQEFNGEKLIVEDTPPVLSFYDDDIRKKNVMLEVKNTELKMKIDLVMEENELLRTQILSNTRFEEQNAELKKELDLLREENRILRLSISDFADRIDRHVLDFESNAAE

SEQ ID NO: 52674 - protein, 570 aa, Glycine max
  peptide (1)..(570): Ceres Seq. ID no. 15177302
  misc_feature (17)..(273): Homolog of NCBI NO: 15221080 NR Description: calcineurin-like phosphoesterase family
  misc_feature (17)..(273): Homolog of NCBI NO: 25405918 NR Description: protein F21D18.16 [imported] - Arabidopsis
  misc_feature (38)..(255): Homolog of NCBI NO: 34895892 NR Description: P0009G03.26 [Oryza sativa (japonica
  misc_feature (53)..(265): Homolog of NCBI NO: 34896148 NR Description: P0701D05.29 [Oryza sativa (japonica
  misc_feature (41)..(307): Homolog of NCBI NO: 21553489 NR Description: unknown [Arabidopsis thaliana]
  misc_feature (41)..(307): Homolog of NCBI NO: 18394553 NR Description: expressed protein [Arabidopsis thaliana]
  misc_feature (41)..(303): Homolog of NCBI NO: 22325485 NR Description: serine/threonine phosphatase PP7 -related
  misc_feature (41)..(276): Homolog of NCBI NO: 18400697 NR Description: expressed protein [Arabidopsis thaliana]
  misc_feature (41)..(276): Homolog of NCBI NO: 21537057 NR Description: unknown [Arabidopsis thaliana]
MRKSTRLSAIGLSKPPEGPEPPKPFSTRFSLRSYAKRVQLLTPEQRSVVLRTGFGNLLLVPNHTLNKVFLTELMDAWSCERRAFVLRSGEEIPMTLLDAALILGLPVAGNPVNLTEEEPFSELEESYGATETKRKVAMSFLENRLDSIGEDVSEDFVRSFLLYTIGTFLASNDGKVDSRFLRFLEDLDEVSGFAWGGVVVDDLCQWLDKRKENNVQYVGGCLIFLQIWSYEHFDVAARPQVQDHDLTFPRVCRWDNTKPKRGTSWFKDLDDDQVIWKLQPTSGELQIEVIKEALELLGGNKELQSPESSSTSSTSSVPDVDSGLQLSINKEVHGVDEDDLENQVVEDTPTKSSTCDEEYREQINPENLIVLDTPPDLTICDKVGRGQGMNLENLVVVVEDTPTATSIAEEVSGDEEVNSEKLIVEDTPPNSICDKVCREQEMNLENLEVLVEDASLAVEVGGDQEFNGEKLIVEDTPPVLSFYDDDIRKKNVMLEVKNTELKMKIDLVMEENELLRTQILSNTRFEEQNAELKKELDLLREENRILRLSISDFADRIDRHVLDFESNAAE

SEQ ID NO: 52675 - protein, 497 aa, Glycine max
  peptide (1)..(497): Ceres Seq. ID no. 15177303
  misc_feature (1)..(200): Homolog of NCBI NO: 15221080 NR Description: calcineurin-like phosphoesterase family
  misc_feature (1)..(200): Homolog of NCBI NO: 25405918 NR Description: protein F21D18.16 [imported] - Arabidopsis
  misc_feature (1)..(182): Homolog of NCBI NO: 34895892 NR Description: P0009G03.26 [Oryza sativa (japonica
  misc_feature (1)..(192): Homolog of NCBI NO: 34896148 NR Description: P0701D05.29 [Oryza sativa (japonica
  misc_feature (1)..(234): Homolog of NCBI NO: 21553489 NR Description: unknown [Arabidopsis thaliana]
  misc_feature (1)..(234): Homolog of NCBI NO: 18394553 NR Description: expressed protein [Arabidopsis thaliana]
  misc_feature (1)..(230): Homolog of NCBI NO: 22325485 NR Description: serine/threonine phosphatase PP7 -related
  misc_feature (1)..(203): Homolog of NCBI NO: 18400697 NR Description: expressed protein [Arabidopsis thaliana]
  misc_feature (1)..(203): Homolog of NCBI NO: 21537057 NR Description: unknown [Arabidopsis thaliana]
MDAWSCERRAFVLRSGEEIPMTLLDAALILGLPVAGNPVNLTEEEPFSELEESYGATETKRKVAMSFLENRLDSIGEDVSEDFVRSFLLYTIGTFLASNDGKVDSRFLRFLEDLDEVSGFAWGGVVVDDLCQWLDKRKENNVQYVGGCLIFLQIWSYEHFDVAARPQVQDHDLTFPRVCRWDNTKPKRGTSWFKDLDDDQVIWKLQPTSGELQIEVIKEALELLGGNKELQSPESSSTSSTSSVPDVDSGLQLSINKEVHGVDEDDLENQVVEDTPTKSSTCDEEYREQINPENLIVLDTPPDLTICDKVGRGQGMNLENLVVVVEDTPTATSIAEEVSGDEEVNSEKLIVEDTPPNSICDKVCREQEMNLENLEVLVEDASLAVEVGGDQEFNGEKLIVEDTPPVLSFYDDDIRKKNVMLEVKNTELKMKIDLVMEENELLRTQILSNTRFEEQNAELKKELDLLREENRILRLSISDFADRIDRHVLDFESNAAE

SEQ ID NO: 52676 - DNA, 1827 bp, Glycine max
  misc_feature (1)..(1827): Ceres Seq. ID no. 15178100
agagtgcactcacctcacctagggttttgcatcagttttcaaccactatagcagaatggaacaaaatgcgtgcgaggaattgtcgaaaattgcttcggatttcaagtgcgagaagaaggttctcgaaacagttgatgaatcaatcgtatgccccactccacagaagaacgaggaacccttaatcgttaaattcagagagggacaaaccaaccttcctgaaaaatactctgcacttgtagatttgtttggtcacacaagctgttcactcaggttgctgcgtctgtgtaaaaagtctccaacttttcaaaatgtttgccgacaggttgaagttctttcgaagagggaattctcccatgcccatcttgcgcagatgaagtatatactccctaaaagtgtgtgtatagataaggtgcttgttcatgataagaaaagcttgtgtatggtgcctgatatgaagatcacgttgagatttgaggttgtgaaagattgctctggcgaatctgatgatctggctcttcgacgatattttaaatctaagctgattgatttctttgatatgcatcctgaggttgctgacattccagaggccccactgccagaaccctttggcaaaaaaacttgtagattgaattttgaagaatttactggccaatccccacatgtaaattcttcaacggaacttttgtcaatttccaatcaaactgaaatgttgccagagcaattgcaactgtatccatctttccgtagacacttttctaggaagaataataccgaccaggcagaaaaggctcaatgctttttacccacaaaaacttctccatcatctcatgcatctgattgtctggataatgaagaaagtgaaaaaacactgcagaaagaatgtgtaccattatttgatggggtggctaatcctattactgaaagagggcaccagaaggaatcattttctatgtctttgcagcctagctttattaatacaccagtacagatgatccgccctccatattctgttacgtgcagtaattctgaaagcccggatatgaaaaatatctcctgtgttgctgatagttttattgcagagacacctgcccagtcagcacctgcaagattattgcccatttccgatgttaagcttcaggacatgcctacccaaaagtcaacatcatctcataagccagcaaaaagagtgcttgacttttcattcatgggggacaatgatggcttgggcattggagtagacaagttagaatctagcagagctctgcatgaatttgatagcttccctgaatctagcagaggatgttatgaggattgcaattcttttgggtctgtttctgcacctcaggaggcagaagagagcctcaagcaagctgatttagatacacagcataaaaaatcttcaccattgctggatctggttaatgtgatacactctatatttcaatctgtccaaagaattccaatcaccaaagaggagctcctgcataagatacttgtgaacactttggattttgttgagattagagcagttgaagaacaaattgagtctctagaaaagttggtgccagattggatctgcaagaaattggttgctactggagatactatgtactgcatcaataaagtgtcggatttagactctgtacgatcacggctttccaccaacgtcgtttgagagaagggcgtttagttaatatttgctgcctttaatacctgtaattagagattggattttcttcataattgtttttgaatcacatttgaccgatgtctaaaactggtgttctacatattaaaaatgataaaattgaaaaggatacgatttac

SEQ ID NO: 52677 - protein, 539 aa, Glycine max
  peptide (1)..(539): Ceres Seq. ID no. 15178101
  misc_feature (340)..(534): Homolog of NCBI NO: 22530894 NR Description: hypothetical protein [Arabidopsis thaliana]
  misc_feature (340)..(534): Homolog of NCBI NO: 15224645 NR Description: expressed protein [Arabidopsis thaliana]
  misc_feature (281)..(534): Homolog of NCBI NO: 40539114 NR Description: expressed protein [Oryza sativa (japonica
  misc_feature (27)..(397): Homolog of NCBI NO: 22530894 NR Description: hypothetical protein [Arabidopsis thaliana]
  misc_feature (27)..(397): Homolog of NCBI NO: 38567811 NR Description: CDT1a protein [Arabidopsis thaliana]
  misc_feature (27)..(397): Homolog of NCBI NO: 15224645 NR Description: expressed protein [Arabidopsis thaliana]
  misc_feature (23)..(348): Homolog of NCBI NO: 38344618 NR Description: OSJNBb0003A12.4 [Oryza sativa (japonica
  misc_feature (47)..(362): Homolog of NCBI NO: 40539114 NR Description: expressed protein [Oryza sativa (japonica
  misc_feature (400)..(534): Homolog of NCBI NO: 15232570 NR Description: hypothetical protein [Arabidopsis thaliana]
  misc_feature (13)..(184): Homolog of NCBI NO: 15232570 NR Description: hypothetical protein [Arabidopsis thaliana]
MEQNACEELSKIASDFKCEKKVLETVDESIVCPTPQKNEEPLIVKFREGQTNLPEKYSALVDLFGHTSCSLRLLRLCKKSPTFQNVCRQVEVLSKREFSHAHLAQMKYILPKSVCIDKVLVHDKKSLCMVPDMKITLRFEVVKDCSGESDDLALRRYFKSKLIDFFDMHPEVADIPEAPLPEPFGKKTCRLNFEEFTGQSPHVNSSTELLSISNQTEMLPEQLQLYPSFRRHFSRKNNTDQAEKAQCFLPTKTSPSSHASDCLDNEESEKTLQKECVPLFDGVANPITERGHQKESFSMSLQPSFINTPVQMIRPPYSVTCSNSESPDMKNISCVADSFIAETPAQSAPARLLPISDVKLQDMPTQKSTSSHKPAKRVLDFSFMGDNDGLGIGVDKLESSRALHEFDSFPESSRGCYEDCNSFGSVSAPQEAEESLKQADLDTQHKKSSPLLDLVNVIHSIFQSVQRIPITKEELLHKILVNTLDFVEIRAVEEQIESLEKLVPDWICKKLVATGDTMYCINKVSDLDSVRSRLSTNVV

SEQ ID NO: 52678 - protein, 434 aa, Glycine max
  peptide (1)..(434): Ceres Seq. ID no. 15178102
  misc_feature (235)..(429): Homolog of NCBI NO: 38567811 NR Description: CDT1a protein [Arabidopsis thaliana]
  misc_feature (235)..(429): Homolog of NCBI NO: 15224645 NR Description: expressed protein [Arabidopsis thaliana]
  misc_feature (176)..(429): Homolog of NCBI NO: 40539114 NR Description: expressed protein [Oryza sativa (japonica
  misc_feature (1)..(292): Homolog of NCBI NO: 22530894 NR Description: hypothetical protein [Arabidopsis thaliana]
  misc_feature (1)..(292): Homolog of NCBI NO: 38567811 NR Description: CDT1a protein [Arabidopsis thaliana]
  misc_feature (1)..(292): Homolog of NCBI NO: 15224645 NR Description: expressed protein [Arabidopsis thaliana]
  misc_feature (1)..(243): Homolog of NCBI NO: 38344618 NR Description: OSJNBb0003A12.4 [Oryza sativa (japonica
  misc_feature (1)..(257): Homolog of NCBI NO: 40539114 NR Description: expressed protein [Oryza sativa (japonica
  misc_feature (295)..(429): Homolog of NCBI NO: 15232570 NR Description: hypothetical protein [Arabidopsis thaliana]
  misc_feature (1)..(79): Homolog of NCBI NO: 15232570 NR Description: hypothetical protein [Arabidopsis thaliana]
MKYILPKSVCIDKVLVHDKKSLCMVPDMKITLRFEVVKDCSGESDDLALRRYFKSKLIDFFDMHPEVADIPEAPLPEPFGKKTCRLNFEEFTGQSPHVNSSTELLSISNQTEMLPEQLQLYPSFRRHFSRKNNTDQAEKAQCFLPTKTSPSSHASDCLDNEESEKTLQKECVPLFDGVANPITERGHQKESFSMSLQPSFINTPVQMIRPPYSVTCSNSESPDMKNISCVADSFIAETPAQSAPARLLPISDVKLQDMPTQKSTSSHKPAKRVLDFSFMGDNDGLGIGVDKLESSRALHEFDSFPESSRGCYEDCNSFGSVSAPQEAEESLKQADLDTQHKKSSPLLDLVNVIHSIFQSVQRIPITKEELLHKILVNTLDFVEIRAVEEQIESLEKLVPDWICKKLVATGDTMYCINKVSDLDSVRSRLSTNVV

SEQ ID NO: 52679 - protein, 411 aa, Glycine max
  peptide (1)..(411): Ceres Seq. ID no. 15178103
  misc_feature (212)..(406): Homolog of NCBI NO: 38567811 NR Description: CDT1a protein [Arabidopsis thaliana]
  misc_feature (212)..(406): Homolog of NCBI NO: 15224645 NR Description: expressed protein [Arabidopsis thaliana]
  misc_feature (153)..(406): Homolog of NCBI NO: 40539114 NR Description: expressed protein [Oryza sativa (japonica
  misc_feature (1)..(269): Homolog of NCBI NO: 22530894 NR Description: hypothetical protein [Arabidopsis thaliana]
  misc_feature (1)..(269): Homolog of NCBI NO: 38567811 NR Description: CDT1a protein [Arabidopsis thaliana]
  misc_feature (1)..(269): Homolog of NCBI NO: 15224645 NR Description: expressed protein [Arabidopsis thaliana]
  misc_feature (1)..(220): Homolog of NCBI NO: 38344618 NR Description: OSJNBb0003A12.4 [Oryza sativa (japonica
  misc_feature (1)..(234): Homolog of NCBI NO: 40539114 NR Description: expressed protein [Oryza sativa (japonica
  misc_feature (272)..(406): Homolog of NCBI NO: 15232570 NR Description: hypothetical protein [Arabidopsis thaliana]
  misc_feature (1)..(56): Homolog of NCBI NO: 15232570 NR Description: hypothetical protein [Arabidopsis thaliana]
MVPDMKITLRFEVVKDCSGESDDLALRRYFKSKLIDFFDMHPEVADIPEAPLPEPFGKKTCRLNFEEFTGQSPHVNSSTELLSISNQTEMLPEQLQLYPSFRRHFSRKNNTDQAEKAQCFLPTKTSPSSHASDCLDNEESEKTLQKECVPLFDGVANPITERGHQKESFSMSLQPSFINTPVQMIRPPYSVTCSNSESPDMKNISCVADSFIAETPAQSAPARLLPISDVKLQDMPTQKSTSSHKPAKRVLDFSFMGDNDGLGIGVDKLESSRALHEFDSFPESSRGCYEDCNSFGSVSAPQEAEESLKQADLDTQHKKSSPLLDLVNVIHSIFQSVQRIPITKEELLHKILVNTLDFVEIRAVEEQIESLEKLVPDWICKKLVATGDTMYCINKVSDLDSVRSRLSTNVV

SEQ ID NO: 52680 - DNA, 1095 bp, Glycine max
  misc_feature (1)..(1095): Ceres Seq. ID no. 15170749
aaaattcccacacacaattgattgttgatttcattttcctctggcggaagccatttttcgatctgttggtgtgctttctggaaaggtggtggatggcaaaaaacaacaagtacgcctctattaacttcaaccacatctacgaaaaaaccaacaccaccaacccacacaacaagaatccttctctctcttcttcttccgcttcctattccgccgtctccgcccccaacaaaccccatggccgcatcctcgtcctaacccgacccactcccaaacccatcacgccctccaccccgcaaccgcaacagcaacaaccaccaccgccgaccccgatccagcacaaccacccccggtccgaaccaggatcggacgcgatctcgctccgacccctgggccgaaccggaaccggttcaccgctcttgtcgctccccgttgtttccagccccgacaaggacttgcccttgctctctcctcagccgcccaagacggacaagttcgtaccgccacaccttcggcccgggttcgttcccagggaggaggctcccccgcccgggcccgaacttcggcccaacggccggcccaagtcgggtggcggcccggacaggatgagaagggttgggccgggtggcgtctcggatgcgggggtcttgggccgcgggactcggcccagttccagtggatgaatggtggctatgaagttgaattcttttccgaggacgaagacaaacacattttgctacagagatgggttctctataccaattcagtgcatgtatcctttgtccctctggaactgacatcaattttcacatggcaaaagaaatcacagaagatgaaaactgaccaggtggcagattttcaccacctaacgtcccaatttatagcaaaatttgttgtgctcataggaggctttaacacccaagttcttctgttggtgtttggtcctcttcaaccacgtgccaatagagagtagaagaatctatatacatatttttaattcctagctaaactgttctgttgactgttctgaaagacataccctctgtactttgagcataagtttgagaggagatccaatcgtttttattgtcttattat

SEQ ID NO: 52681 - protein, 225 aa, Glycine max
  peptide (1)..(225): Ceres Seq. ID no. 15170750
  misc_feature (46)..(189): Pfam Name: Extensin-like region Pfam Description: Extensin-like region
  misc_feature (54)..(199): Homolog of NCBI NO: 20559682 NR Description: similar to proline rich antigen 2 [Homo sapiens]
  misc_feature (86)..(206): Homolog of NCBI NO: 91206 NR Description: proline-rich protein - mouse (fragment)
  misc_feature (86)..(206): Homolog of NCBI NO: 13928676 NR Description: proline rich protein 2 [Mus musculus]
  misc_feature (86)..(206): Homolog of NCBI NO: 131002 NR Description: PROLINE-RICH PROTEIN MP-3
  misc_feature (34)..(225): Homolog of NCBI NO: 21594448 NR Description: unknown [Arabidopsis thaliana]
  misc_feature (34)..(180): Homolog of NCBI NO: 18410112 NR Description: proteophosphoglycan-related [Arabidopsis
  misc_feature (34)..(180): Homolog of NCBI NO: 11358378 NR Description: hypothetical protein T5N23.40 - Arabidopsis
NSHTQLIVDFIFLWRKPFFDLLVCFLERWWMAKNNKYASINFNHIYEKTNTTNPHNKNPSLSSSSASYSAVSAPNKPHGRILVLTRPTPKPITPSTPQPQQQQPPPPTPIQHNHPRSEPGSDAISLRPLGRTGTGSPLLSLPVVSSPDKDLPLLSPQPPKTDKFVPPHLRPGFVPREEAPPPGPELRPNGRPKSGGGPDRMRRVGPGGVSDAGVLGRGTRPSSSG

SEQ ID NO: 52682 - protein, 195 aa, Glycine max
  peptide (1)..(195): Ceres Seq. ID no. 15170751
  misc_feature (16)..(159): Pfam Name: Extensin-like region Pfam Description: Extensin-like region
  misc_feature (24)..(169): Homolog of NCBI NO: 20559682 NR Description: similar to proline rich antigen 2 [Homo sapiens]
  misc_feature (56)..(176): Homolog of NCBI NO: 91206 NR Description: proline-rich protein - mouse (fragment)
  misc_feature (56)..(176): Homolog of NCBI NO: 13928676 NR Description: proline rich protein 2 [Mus musculus]
  misc_feature (56)..(176): Homolog of NCBI NO: 131002 NR Description: PROLINE-RICH PROTEIN MP-3
  misc_feature (4)..(195): Homolog of NCBI NO: 21594448 NR Description: unknown [Arabidopsis thaliana]
  misc_feature (4)..(150): Homolog of NCBI NO: 18410112 NR Description: proteophosphoglycan-related [Arabidopsis
  misc_feature (4)..(150): Homolog of NCBI NO: 11358378 NR Description: hypothetical protein T5N23.40 - Arabidopsis
MAKNNKYASINFNHIYEKTNTTNPHNKNPSLSSSSASYSAVSAPNKPHGRILVLTRPTPKPITPSTPQPQQQQPPPPTPIQHNHPRSEPGSDAISLRPLGRTGTGSPLLSLPVVSSPDKDLPLLSPQPPKTDKFVPPHLRPGFVPREEAPPPGPELRPNGRPKSGGGPDRMRRVGPGGVSDAGVLGRGTRPSSSG

SEQ ID NO: 52683 - DNA, 1308 bp, Glycine max
  misc_feature (1)..(1308): Ceres Seq. ID no. 15170609
aattccatccaacatttttcaagtacttagaagatttcaagtttaacacttcaaccgaagtgtagtgacgagccttatctcaaaagttcttcttttgcaaacactgtccaatttacaaactctccacctcacataatggtttcaaattcaatgttaatggcttcttctctgcattcaccttgcaccctcttcagttcccacaagctttgttcttcttcgatcaaaaccatctcaaaacaaagccacacatttctccatagaaatccctctctccatcgccctttgagtttgggttccaaaagggttcttccttcagtttgcttctttaatactggagacaaatctgactccaaggaatcgggatggcctattctcaggcgatgggaggtgccttggcaatggcaaacagtttcactgacctctcttgcctgtggattgggttttgtgttgacaggtttgactgaagcaattgccttaccatatctcgggatcaaacctgatgtgctaagtttagatgacaaggcagagatacttttattcgatcagagcatcacaactgctgttgtacttggaatcatatatagtgttgccaacactttccagccacttcctgaagacttcttcaaatacgatttgagggaacctttcaatcttcaaaagggttgtcttttgtgggctggaattggacttgctggtgccatacttgccatttcattgaccggagttgctgtgtctttcttcaatggagaaaccccacaaagagagactgatgctcttgttcgcttgcttccgttaattggatcttcaaatctcagcactgcctgcttggtgggcatcacaggtgttcttgctccactccttgaggagactgtttttcggggattttttatgacttccctcactaagtgggttcctacgccagttgctgttgtcattagtgctgctgtttttgcccttgcacatctcactcctggagaatttccccaattgtttgttctagggactgctttggggttttcatatgctcaaactcacaaccttctcactcccatcactatccattctttttggaactcaggagttatattatttcttacttttctgcagcttcaagggtacgatatcagagaattattgcaggcaacttgatggaaaaaatttctcctttgcatggatgtggagcatcatgtacagtatataatacaaatccatttctttgcttatctgcgctcctttccgtgctgtaaaacataatcagattgttctttggaacagtgaagtaggtaataataatttaccatgacagtt

SEQ ID NO: 52684 - protein, 337 aa, Glycine max
  peptide (1)..(337): Ceres Seq. ID no. 15170610
  misc_feature (231)..(320): Pfam Name: CAAX amino terminal protease family Pfam Description: CAAX amino terminal protease family
  misc_feature (83)..(323): Homolog of NCBI NO: 37522744 NR Description: hypothetical protein gll3175 [Gloeobacter
  misc_feature (60)..(320): Homolog of NCBI NO: 9759339 NR Description: gene_id:MUP24.17~pir||S76167~similar to unknown
  misc_feature (14)..(320): Homolog of NCBI NO: 18424393 NR Description: CAAX amino terminal protease family [Arabidopsis
  misc_feature (83)..(323): Homolog of NCBI NO: 23130090 NR Description: hypothetical protein [Nostoc punctiforme]
  misc_feature (83)..(323): Homolog of NCBI NO: 17231277 NR Description: hypothetical protein [Nostoc sp. PCC 7120]
  misc_feature (82)..(323): Homolog of NCBI NO: 16331018 NR Description: unknown protein [Synechocystis sp. PCC 6803]
  misc_feature (114)..(336): Homolog of NCBI NO: 20259411 NR Description: unknown protein [Arabidopsis thaliana]
  misc_feature (69)..(336): Homolog of NCBI NO: 25518680 NR Description: hypothetical protein F14L17.3 - Arabidopsis
  misc_feature (8)..(336): Homolog of NCBI NO: 21593106 NR Description: unknown [Arabidopsis thaliana]
  misc_feature (1)..(336): Homolog of NCBI NO: 30683693 NR Description: CAAX amino terminal protease family [Arabidopsis
MVSNSMLMASSLHSPCTLFSSHKLCSSSIKTISKQSHTFLHRNPSLHRPLSLGSKRVLPSVCFFNTGDKSDSKESGWPILRRWEVPWQWQTVSLTSLACGLGFVLTGLTEAIALPYLGIKPDVLSLDDKAEILLFDQSITTAVVLGIIYSVANTFQPLPEDFFKYDLREPFNLQKGCLLWAGIGLAGAILAISLTGVAVSFFNGETPQRETDALVRLLPLIGSSNLSTACLVGITGVLAPLLEETVFRGFFMTSLTKWVPTPVAVVISAAVFALAHLTPGEFPQLFVLGTALGFSYAQTHNLLTPITIHSFWNSGVILFLTFLQLQGYDIRELLQAT

SEQ ID NO: 52685 - protein, 332 aa, Glycine max
  peptide (1)..(332): Ceres Seq. ID no. 15170611
  misc_feature (226)..(315): Pfam Name: CAAX amino terminal protease family Pfam Description: CAAX amino terminal protease family
  misc_feature (78)..(318): Homolog of NCBI NO: 37522744 NR Description: hypothetical protein gll3175 [Gloeobacter
  misc_feature (55)..(315): Homolog of NCBI NO: 9759339 NR Description: gene_id:MUP24.17~pir||S76167~similar to unknown
  misc_feature (9)..(315): Homolog of NCBI NO: 18424393 NR Description: CAAX amino terminal protease family [Arabidopsis
  misc_feature (78)..(318): Homolog of NCBI NO: 23130090 NR Description: hypothetical protein [Nostoc punctiforme]
  misc_feature (78)..(318): Homolog of NCBI NO: 17231277 NR Description: hypothetical protein [Nostoc sp. PCC 7120]
  misc_feature (77)..(318): Homolog of NCBI NO: 16331018 NR Description: unknown protein [Synechocystis sp. PCC 6803]
  misc_feature (109)..(331): Homolog of NCBI NO: 20259411 NR Description: unknown protein [Arabidopsis thaliana]
  misc_feature (64)..(331): Homolog of NCBI NO: 25518680 NR Description: hypothetical protein F14L17.3 - Arabidopsis
  misc_feature (3)..(331): Homolog of NCBI NO: 21593106 NR Description: unknown [Arabidopsis thaliana]
  misc_feature (1)..(331): Homolog of NCBI NO: 30683693 NR Description: CAAX amino terminal protease family [Arabidopsis
MLMASSLHSPCTLFSSHKLCSSSIKTISKQSHTFLHRNPSLHRPLSLGSKRVLPSVCFFNTGDKSDSKESGWPILRRWEVPWQWQTVSLTSLACGLGFVLTGLTEAIALPYLGIKPDVLSLDDKAEILLFDQSITTAVVLGIIYSVANTFQPLPEDFFKYDLREPFNLQKGCLLWAGIGLAGAILAISLTGVAVSFFNGETPQRETDALVRLLPLIGSSNLSTACLVGITGVLAPLLEETVFRGFFMTSLTKWVPTPVAVVISAAVFALAHLTPGEFPQLFVLGTALGFSYAQTHNLLTPITIHSFWNSGVILFLTFLQLQGYDIRELLQAT

SEQ ID NO: 52686 - protein, 330 aa, Glycine max
  peptide (1)..(330): Ceres Seq. ID no. 15170612
  misc_feature (224)..(313): Pfam Name: CAAX amino terminal protease family Pfam Description: CAAX amino terminal protease family
  misc_feature (76)..(316): Homolog of NCBI NO: 37522744 NR Description: hypothetical protein gll3175 [Gloeobacter
  misc_feature (53)..(313): Homolog of NCBI NO: 9759339 NR Description: gene_id:MUP24.17~pir||S76167~similar to unknown
  misc_feature (7)..(313): Homolog of NCBI NO: 18424393 NR Description: CAAX amino terminal protease family [Arabidopsis
  misc_feature (76)..(316): Homolog of NCBI NO: 23130090 NR Description: hypothetical protein [Nostoc punctiforme]
  misc_feature (76)..(316): Homolog of NCBI NO: 17231277 NR Description: hypothetical protein [Nostoc sp. PCC 7120]
  misc_feature (75)..(316): Homolog of NCBI NO: 16331018 NR Description: unknown protein [Synechocystis sp. PCC 6803]
  misc_feature (107)..(329): Homolog of NCBI NO: 20259411 NR Description: unknown protein [Arabidopsis thaliana]
  misc_feature (62)..(329): Homolog of NCBI NO: 25518680 NR Description: hypothetical protein F14L17.3 - Arabidopsis
  misc_feature (1)..(329): Homolog of NCBI NO: 21593106 NR Description: unknown [Arabidopsis thaliana]
  misc_feature (1)..(329): Homolog of NCBI NO: 30683693 NR Description: CAAX amino terminal protease family [Arabidopsis
MASSLHSPCTLFSSHKLCSSSIKTISKQSHTFLHRNPSLHRPLSLGSKRVLPSVCFFNTGDKSDSKESGWPILRRWEVPWQWQTVSLTSLACGLGFVLTGLTEAIALPYLGIKPDVLSLDDKAEILLFDQSITTAVVLGIIYSVANTFQPLPEDFFKYDLREPFNLQKGCLLWAGIGLAGAILAISLTGVAVSFFNGETPQRETDALVRLLPLIGSSNLSTACLVGITGVLAPLLEETVFRGFFMTSLTKWVPTPVAVVISAAVFALAHLTPGEFPQLFVLGTALGFSYAQTHNLLTPITIHSFWNSGVILFLTFLQLQGYDIRELLQAT

SEQ ID NO: 52687 - DNA, 1227 bp, Glycine max
  misc_feature (1)..(1227): Ceres Seq. ID no. 15176329
attttcatcattaaactccaacaaacgcacggcagttgcattctgagttacgccattcttctctcgtcaatagccccatgaacaaattcctgcttcgaatcaaagccctagttgatttgctctactctgttggagatccagttttgccaaaggagaatttgggtgctactctctaaggtttacctcaagagtttgactctgtaattcctttgattgaaagtcacagtgatgaaattactatcgaagaggttgaaggcctcattgttgctcaggaactgcgattgcagaaatatttcaagaaaacctcatcagactctaccttctctggatctctatcaatttgacacaatctgtttctcagatccctaccacttcttttgatcaaaacagaacatcaattttcctctgatcagaatcaatcttcgccatttacttaatattgtggttctggttggaggctgttttggccatggtaggggccgtggcggttggggttctgttcactgacatgtgcacttcaagtttgggcacactgcttttgttacgtgctggaaactgaaagctgaacttcgagggtcagcacctccagaagaagaagaagaaaactaagggagaaaggaaattttgctattttcattcatgcctgatttggttatttacatagctataggagacaattccaaatcaagctagatacgatattggtgctgctgatgctgaagatgaaatcccgagctgtcctcatgcctaatccttcagatccaacatacatgattcgggctattgcaagtaatgcctcggacaacatttactgcactcttcttgctcatggtgctgttcatggagctatggctggatatactggcttcacagtcgggcctgtgaacagtaaacaggcttatatcccaattgcctgtgtgatggagaaacaaaataaggtcaagctgactgataggatgtgggctagacttcttgcatcgacgaatcaaccaagtttcgttgcctatgatcaagaaagagtcgagaaagatataaataacatgaatattacctctcaaactagatttaataggtattttgattgattgatgcgaattgattagtcagagaatggattatcatttagcatatgggggctgatagtacccattcatttatttgtattttattaattgggcagttgacatgttgaatgaaaatcagaatttaataaatttatataccagc

SEQ ID NO: 52688 - protein, 123 aa, Glycine max
  peptide (1)..(123): Ceres Seq. ID no. 15176330
  misc_feature (16)..(96): Homolog of NCBI NO: 15233495 NR Description: pyrophosphate-dependent
  misc_feature (16)..(96): Homolog of NCBI NO: 7488164 NR Description: probable diphosphate-fructose-6-phosphate
  misc_feature (16)..(96): Homolog of NCBI NO: 18416717 NR Description: pyrophosphate-dependent phosphofructo-1-kinase
  misc_feature (16)..(97): Homolog of NCBI NO: 34909350 NR Description: putative pyrophosphate--fructose-6-phosphate1
  misc_feature (16)..(96): Homolog of NCBI NO: 2688822 NR Description: pyrophosphate-dependent phosphofructo-1-kinase
  misc_feature (5)..(105): Homolog of NCBI NO: 10176767 NR Description: pyrophosphate-dependent
  misc_feature (5)..(105): Homolog of NCBI NO: 18423885 NR Description: pyrophosphate-dependent
  misc_feature (16)..(106): Homolog of NCBI NO: 34906422 NR Description: putative pyrophosphate-dependent
  misc_feature (16)..(106): Homolog of NCBI NO: 32400869 NR Description: pyrophosphate-dependent phosphofructo-1-kinase
  misc_feature (16)..(114): Homolog of NCBI NO: 22328001 NR Description: pyrophosphate-dependent phosphofructo-1-kinase -
MLKMKSRAVLMPNPSDPTYMIRAIASNASDNIYCTLLAHGAVHGAMAGYTGFTVGPVNSKQAYIPIACVMEKQNKVKLTDRMWARLLASTNQPSFVAYDQERVEKDINNMNITSQTRFNRYFD

SEQ ID NO: 52689 - protein, 120 aa, Glycine max
  peptide (1)..(120): Ceres Seq. ID no. 15176331
  misc_feature (13)..(93): Homolog of NCBI NO: 15233495 NR Description: pyrophosphate-dependent
  misc_feature (13)..(93): Homolog of NCBI NO: 7488164 NR Description: probable diphosphate-fructose-6-phosphate
  misc_feature (13)..(93): Homolog of NCBI NO: 18416717 NR Description: pyrophosphate-dependent phosphofructo-1-kinase
  misc_feature (13)..(94): Homolog of NCBI NO: 34909350 NR Description: putative pyrophosphate--fructose-6-phosphate1
  misc_feature (13)..(93): Homolog of NCBI NO: 2688822 NR Description: pyrophosphate-dependent phosphofructo-1-kinase
  misc_feature (2)..(102): Homolog of NCBI NO: 10176767 NR Description: pyrophosphate-dependent
  misc_feature (2)..(102): Homolog of NCBI NO: 18423885 NR Description: pyrophosphate-dependent
  misc_feature (13)..(103): Homolog of NCBI NO: 34906422 NR Description: putative pyrophosphate-dependent
  misc_feature (13)..(103): Homolog of NCBI NO: 32400869 NR Description: pyrophosphate-dependent phosphofructo-1-kinase
  misc_feature (13)..(111): Homolog of NCBI NO: 22328001 NR Description: pyrophosphate-dependent phosphofructo-1-kinase -
MKSRAVLMPNPSDPTYMIRAIASNASDNIYCTLLAHGAVHGAMAGYTGFTVGPVNSKQAYIPIACVMEKQNKVKLTDRMWARLLASTNQPSFVAYDQERVEKDINNMNITSQTRFNRYFD

SEQ ID NO: 52690 - protein, 113 aa, Glycine max
  peptide (1)..(113): Ceres Seq. ID no. 15176332
  misc_feature (6)..(86): Homolog of NCBI NO: 15233495 NR Description: pyrophosphate-dependent
  misc_feature (6)..(86): Homolog of NCBI NO: 7488164 NR Description: probable diphosphate-fructose-6-phosphate
  misc_feature (6)..(86): Homolog of NCBI NO: 18416717 NR Description: pyrophosphate-dependent phosphofructo-1-kinase
  misc_feature (6)..(87): Homolog of NCBI NO: 34909350 NR Description: putative pyrophosphate--fructose-6-phosphate1
  misc_feature (6)..(86): Homolog of NCBI NO: 2688822 NR Description: pyrophosphate-dependent phosphofructo-1-kinase
  misc_feature (1)..(95): Homolog of NCBI NO: 10176767 NR Description: pyrophosphate-dependent
  misc_feature (1)..(95): Homolog of NCBI NO: 18423885 NR Description: pyrophosphate-dependent
  misc_feature (6)..(96): Homolog of NCBI NO: 34906422 NR Description: putative pyrophosphate-dependent
  misc_feature (6)..(96): Homolog of NCBI NO: 32400869 NR Description: pyrophosphate-dependent phosphofructo-1-kinase
  misc_feature (6)..(104): Homolog of NCBI NO: 22328001 NR Description: pyrophosphate-dependent phosphofructo-1-kinase -
MPNPSDPTYMIRAIASNASDNIYCTLLAHGAVHGAMAGYTGFTVGPVNSKQAYIPIACVMEKQNKVKLTDRMWARLLASTNQPSFVAYDQERVEKDINNMNITSQTRFNRYFD

SEQ ID NO: 52691 - DNA, 1396 bp, Glycine max
  misc_feature (1)..(1396): Ceres Seq. ID no. 15170830
aactgaaaaatccaccccaccttgaggagctaggtcactgctgggctaagcaaccacaggcgaatcccccaaagaaaaaggcttcgtttcagaaatcaagaggttcacttgttgagttctcgctgtcggagttcggcggcggagggagacggagtcggatcccctgaaaagtctaggtggtagctgcggaggtgaggcccggaggaagcggctggctcagtaagcgcgtctagcacaggaaccaagaggaggaaggaagaggaacccaatcatggactcggagcactggatctcgcgcctcgccgccgccaagcgcttctacgccgcgcagctcggccacatcgacgatatggcggggatggggatggaggaagtggacatggacatggaagacgacggggagatggacatggagatggagatgcagctggaggaggccagatggccggaggtcgcctgcccctactgctacgaggactacgacctcggctccctctgcgtccacctcgaggaggaccacccctacgagccacaccccgcgccttgccccatctgctctgaaaagattacaagagatatgctaaatcatatcaccatgcatcatggttacttgttcaagaatggcagccggttgcgcagattcgttattcccgagcgccgtgcactttctttactgagccgagatctacgtgatgctcatttgcaggcgcttctaggaggcggtcatagtcataggtcaaggaacaccaccaccgccactacaaatatttatgctgatccactgctttcatcgtttggcctgngttttgcaacatcagatgccgaagaaccattgaaatcatctgttccggttctcgatgatacttcaattcttaaggaggcacctcctcaaccttgggaatcaagtattgactcgtccctcacaagtgaggaaagggaacaaaagcggaaacaagccacaagcagggcgacctttgtgcaagacctggtcctctccactttatttggagacgactgagtgctcgaatggccctgcattttccttgttagatgggtgcttccttcacactgattcggatagaactgcagcaactccgccctgagttggttaatcttaacttgggcgaagtcaagtgcgtctggtgcacccgcagtcaagtgcggattttatttgggcttgacacattacaccttaatttatggtagctgtcccatattgccgtttttttcaccgaattatcggccagcagttccttgccttggttgtaacttgttgtgccatcctcttcattgttaaggaacattggtctgtaccaacatcacacagctgttacatactatagaatgcaatgcaatgggaaattacagaagctccacctgtgtggaagcaataagc

SEQ ID NO: 52692 - protein, 248 aa, Glycine max
  peptide (1)..(248): Ceres Seq. ID no. 15170831
  misc_feature (43)..(244): Pfam Name: Drought induced 19 protein (Di19) Pfam Description: Drought induced 19 protein (Di19)
  misc_feature (43)..(240): Homolog of NCBI NO: 15230782 NR Description: drought-induced protein -related [Arabidopsis
  misc_feature (60)..(229): Homolog of NCBI NO: 15239827 NR Description: drought-induced protein -related [Arabidopsis
  misc_feature (60)..(229): Homolog of NCBI NO: 13937216 NR Description: AT5g49230/K21P3_11 [Arabidopsis thaliana]
  misc_feature (50)..(247): Homolog of NCBI NO: 25992529 NR Description: fiber protein Fb2 [Gossypium barbadense]
  misc_feature (50)..(247): Homolog of NCBI NO: 7485240 NR Description: hypothetical protein A_IG002P16.10 - Arabidopsis
  misc_feature (60)..(247): Homolog of NCBI NO: 1076316 NR Description: drought-induced protein Di19 - Arabidopsis
  misc_feature (60)..(247): Homolog of NCBI NO: 15028023 NR Description: unknown protein [Arabidopsis thaliana]
  misc_feature (34)..(247): Homolog of NCBI NO: 15240426 NR Description: drought-induced protein -related [Arabidopsis
  misc_feature (50)..(247): Homolog of NCBI NO: 28393233 NR Description: unknown protein [Arabidopsis thaliana]
  misc_feature (43)..(248): Homolog of NCBI NO: 18377875 NR Description: AT3g06760/F3E22_10 [Arabidopsis thaliana]
  misc_feature (178)..(178): Xaa is any aa, unknown or other
MDSEHWISRLAAAKRFYAAQLGHIDDMAGMGMEEVDMDMEDDGEMDMEMEMQLEEARWPEVACPYCYEDYDLGSLCVHLEEDHPYEPHPAPCPICSEKITRDMLNHITMHHGYLFKNGSRLRRFVIPERRALSLLSRDLRDAHLQALLGGGHSHRSRNTTTATTNIYADPLLSSFGLXFATSDAEEPLKSSVPVLDDTSILKEAPPQPWESSIDSSLTSEEREQKRKQATSRATFVQDLVLSTLFGDD

SEQ ID NO: 52693 - protein, 222 aa, Glycine max
  peptide (1)..(222): Ceres Seq. ID no. 15170832
  misc_feature (17)..(218): Pfam Name: Drought induced 19 protein (Di19) Pfam Description: Drought induced 19 protein (Di19)
  misc_feature (17)..(214): Homolog of NCBI NO: 15230782 NR Description: drought-induced protein -related [Arabidopsis
  misc_feature (34)..(203): Homolog of NCBI NO: 15239827 NR Description: drought-induced protein -related [Arabidopsis
  misc_feature (34)..(203): Homolog of NCBI NO: 13937216 NR Description: AT5g49230/K21P3_11 [Arabidopsis thaliana]
  misc_feature (24)..(221): Homolog of NCBI NO: 25992529 NR Description: fiber protein Fb2 [Gossypium barbadense]
  misc_feature (24)..(221): Homolog of NCBI NO: 7485240 NR Description: hypothetical protein A_IG002P16.10 - Arabidopsis
  misc_feature (34)..(221): Homolog of NCBI NO: 1076316 NR Description: drought-induced protein Di19 - Arabidopsis
  misc_feature (34)..(221): Homolog of NCBI NO: 15028023 NR Description: unknown protein [Arabidopsis thaliana]
  misc_feature (8)..(221): Homolog of NCBI NO: 15240426 NR Description: drought-induced protein -related [Arabidopsis
  misc_feature (24)..(221): Homolog of NCBI NO: 28393233 NR Description: unknown protein [Arabidopsis thaliana]
  misc_feature (17)..(222): Homolog of NCBI NO: 18377875 NR Description: AT3g06760/F3E22_10 [Arabidopsis thaliana]
  misc_feature (152)..(152): Xaa is any aa, unknown or other
MAGMGMEEVDMDMEDDGEMDMEMEMQLEEARWPEVACPYCYEDYDLGSLCVHLEEDHPYEPHPAPCPICSEKITRDMLNHITMHHGYLFKNGSRLRRFVIPERRALSLLSRDLRDAHLQALLGGGHSHRSRNTTTATTNIYADPLLSSFGLXFATSDAEEPLKSSVPVLDDTSILKEAPPQPWESSIDSSLTSEEREQKRKQATSRATFVQDLVLSTLFGDD

SEQ ID NO: 52694 - protein, 219 aa, Glycine max
  peptide (1)..(219): Ceres Seq. ID no. 15170833
  misc_feature (14)..(215): Pfam Name: Drought induced 19 protein (Di19) Pfam Description: Drought induced 19 protein (Di19)
  misc_feature (14)..(211): Homolog of NCBI NO: 15230782 NR Description: drought-induced protein -related [Arabidopsis
  misc_feature (31)..(200): Homolog of NCBI NO: 15239827 NR Description: drought-induced protein -related [Arabidopsis
  misc_feature (31)..(200): Homolog of NCBI NO: 13937216 NR Description: AT5g49230/K21P3_11 [Arabidopsis thaliana]
  misc_feature (21)..(218): Homolog of NCBI NO: 25992529 NR Description: fiber protein Fb2 [Gossypium barbadense]
  misc_feature (21)..(218): Homolog of NCBI NO: 7485240 NR Description: hypothetical protein A_IG002P16.10 - Arabidopsis
  misc_feature (31)..(218): Homolog of NCBI NO: 1076316 NR Description: drought-induced protein Di19 - Arabidopsis
  misc_feature (31)..(218): Homolog of NCBI NO: 15028023 NR Description: unknown protein [Arabidopsis thaliana]
  misc_feature (5)..(218): Homolog of NCBI NO: 15240426 NR Description: drought-induced protein -related [Arabidopsis
  misc_feature (21)..(218): Homolog of NCBI NO: 28393233 NR Description: unknown protein [Arabidopsis thaliana]
  misc_feature (14)..(219): Homolog of NCBI NO: 18377875 NR Description: AT3g06760/F3E22_10 [Arabidopsis thaliana]
  misc_feature (149)..(149): Xaa is any aa, unknown or other
MGMEEVDMDMEDDGEMDMEMEMQLEEARWPEVACPYCYEDYDLGSLCVHLEEDHPYEPHPAPCPICSEKITRDMLNHITMHHGYLFKNGSRLRRFVIPERRALSLLSRDLRDAHLQALLGGGHSHRSRNTTTATTNIYADPLLSSFGLXFATSDAEEPLKSSVPVLDDTSILKEAPPQPWESSIDSSLTSEEREQKRKQATSRATFVQDLVLSTLFGDD

SEQ ID NO: 52695 - DNA, 743 bp, Glycine max
  misc_feature (1)..(743): Ceres Seq. ID no. 14309616
agtctctatcatcatccaatccagatcagcaaagcggcagtgcgtagagaggatcgtcgaacagaacagcatgaagatggtcatcgttctcgtcgtgtgcctggctctgtcagctgccagcgcctctgcaatgcagatgccctgcccctgcgcggggctgcagggcttgtacggcgctggcgccggcctgacgacgatgatgggcgccggcgggctgtacccctacgcggagtacctgaggcagccgcagtgcagcccgctggcggcggcgccctactacgccgggtgtgggcagacgagcgccatgtaccagccgctccggcaacagtgctgccagcagcagatgaggatgatggacgtgcagtccgtcgcgcagcagctgcagatgatgatgcagcttgagcgtgccgctgccgccagcagcagcctgtacgagccagctctgatgcagcagcagcagcagctgctggcagcccagggtctcaaccccatggccatgatgatggcgcagaacatgccggccatgggtggactctaccagtaccagtaccagctgcccagctaccgcaccaacccctgtggcgtctccgctgccattccgccctactactgattcatgatatttgggaaatctcctctatccatccctctctatctatatatgtaataatgcagtaagacgacacacattatcatgtgtggtatgaccaataatatatgcatcataataaagttttggtttt

SEQ ID NO: 52696 - protein, 203 aa, Glycine max
  peptide (1)..(203): Ceres Seq. ID no. 14309617
  misc_feature (77)..(179): Pfam Name: Protease inhibitor/seed storage/LTP family Pfam Description: Protease inhibitor/seed storage/LTP family
  misc_feature (24)..(203): Homolog of NCBI NO: 100552 NR Description: beta-coixin, 17K, precursor - Job's tears
  misc_feature (24)..(203): Homolog of NCBI NO: 16305115 NR Description: 15kD beta zein [Zea mays]
  misc_feature (24)..(203): Homolog of NCBI NO: 141616 NR Description: ZEIN-BETA PRECURSOR (16 KD) (ZEIN 2) (CLONE 15A3)
  misc_feature (24)..(203): Homolog of NCBI NO: 168664 NR Description: zein protein precursor
  misc_feature (24)..(203): Homolog of NCBI NO: 419803 NR Description: zein protein - maize
VSIIIQSRSAKRQCVERIVEQNSMKMVIVLVVCLALSAASASAMQMPCPCAGLQGLYGAGAGLTTMMGAGGLYPYAEYLRQPQCSPLAAAPYYAGCGQTSAMYQPLRQQCCQQQMRMMDVQSVAQQLQMMMQLERAAAASSSLYEPALMQQQQQLLAAQGLNPMAMMMAQNMPAMGGLYQYQYQLPSYRTNPCGVSAAIPPYY

SEQ ID NO: 52697 - protein, 180 aa, Glycine max
  peptide (1)..(180): Ceres Seq. ID no. 14309618
  misc_feature (54)..(156): Pfam Name: Protease inhibitor/seed storage/LTP family Pfam Description: Protease inhibitor/seed storage/LTP family
  misc_feature (1)..(180): Homolog of NCBI NO: 100552 NR Description: beta-coixin, 17K, precursor - Job's tears
  misc_feature (1)..(180): Homolog of NCBI NO: 16305115 NR Description: 15kD beta zein [Zea mays]
  misc_feature (1)..(180): Homolog of NCBI NO: 141616 NR Description: ZEIN-BETA PRECURSOR (16 KD) (ZEIN 2) (CLONE 15A3)
  misc_feature (1)..(180): Homolog of NCBI NO: 168664 NR Description: zein protein precursor
  misc_feature (1)..(180): Homolog of NCBI NO: 419803 NR Description: zein protein - maize
MKMVIVLVVCLALSAASASAMQMPCPCAGLQGLYGAGAGLTTMMGAGGLYPYAEYLRQPQCSPLAAAPYYAGCGQTSAMYQPLRQQCCQQQMRMMDVQSVAQQLQMMMQLERAAAASSSLYEPALMQQQQQLLAAQGLNPMAMMMAQNMPAMGGLYQYQYQLPSYRTNPCGVSAAIPPYY

SEQ ID NO: 52698 - protein, 178 aa, Glycine max
  peptide (1)..(178): Ceres Seq. ID no. 14309619
  misc_feature (52)..(154): Pfam Name: Protease inhibitor/seed storage/LTP family Pfam Description: Protease inhibitor/seed storage/LTP family
  misc_feature (1)..(178): Homolog of NCBI NO: 100552 NR Description: beta-coixin, 17K, precursor - Job's tears
  misc_feature (1)..(178): Homolog of NCBI NO: 16305115 NR Description: 15kD beta zein [Zea mays]
  misc_feature (1)..(178): Homolog of NCBI NO: 141616 NR Description: ZEIN-BETA PRECURSOR (16 KD) (ZEIN 2) (CLONE 15A3)
  misc_feature (1)..(178): Homolog of NCBI NO: 168664 NR Description: zein protein precursor
  misc_feature (1)..(178): Homolog of NCBI NO: 419803 NR Description: zein protein - maize
MVIVLVVCLALSAASASAMQMPCPCAGLQGLYGAGAGLTTMMGAGGLYPYAEYLRQPQCSPLAAAPYYAGCGQTSAMYQPLRQQCCQQQMRMMDVQSVAQQLQMMMQLERAAAASSSLYEPALMQQQQQLLAAQGLNPMAMMMAQNMPAMGGLYQYQYQLPSYRTNPCGVSAAIPPYY

SEQ ID NO: 52699 - DNA, 1199 bp, Glycine max
  misc_feature (1)..(1199): Ceres Seq. ID no. 15178295
gtgcttgtgcgtcaccgctgaatcctagctttatcttcccttcccttcaaaataatatctctgttccaaacaagtccaacaacacactgcttctatctcaaacgcacatcgagaaatgagtttgagtaatgggaaaaccgaggcaccattgccaattagtaatggggatgagaagaagccgttcaagatcttcgtagggtatgaccctcgtgaagatcttgcctacgaggtatgtcggcactccatcttgaaaaggtcttcaatccctgttgagatcataccaattaaacagtcagatctgaggaaaagtggcttgtattggcgtgagaggggccagtttgagagcactgagttctccttttcaagattcttgacaccttgccttgccaattaccaaggttgggcaatgtttgtggattgtgatttcctctacttggctgacatcaaggaattgaaagacttgattgaggacaagtatgcaatcatgtgtgttcagcatgactatgctccaaaggagaccactaagatggatggggcagtgcaaactgtgtacccaagaaagaattggtcttcaatggttctctataactgtgctcatccaaagaaccgtgttctcactcctgacactgtcaacacacagaatggtgctttccttcacaggtttcaatggcttgaggatgatcaaattggatccatcccttttgtttggaactttcttgaggggcataacagaattgttggtaatgatcccactacttcgcctaaggccatccattatactcgtggagggccatggtttgaagcttggaaaaactgtgaatttgctgatctgtggcttaacgaaatggaagattacatgaagcaagctaaaaaagaacaatcagcttaggcttttgtcatccgtggccatgtattattattctttatgtcaaattcgttgtgaaaaatccgcatctgctgatgcatgttatgagagtaggagtatgaggcactgctagtctataacttatcttttagagtatttgtagtattctttaccatattacattacactacacttacgttggcatttcagagaaaatgctcttcacggtgtatttcattttttatttgtttaatgacctccctatgacctttaaggaggtacaagcaccactctgtattgaatatttaaatgaaatcttcattttaatgattgt

SEQ ID NO: 52700 - protein, 257 aa, Glycine max
  peptide (1)..(257): Ceres Seq. ID no. 15178296
  misc_feature (22)..(249): Homolog of NCBI NO: 33864719 NR Description: conserved hypothetical protein [Synechococcus sp.
  misc_feature (25)..(240): Homolog of NCBI NO: 16264294 NR Description: conserved hypothetical protein [Sinorhizobium
  misc_feature (12)..(255): Homolog of NCBI NO: 37536068 NR Description: unknown protein [Oryza sativa (japonica
  misc_feature (13)..(255): Homolog of NCBI NO: 34903402 NR Description: hypothetical protein~similar to Oryza sativa
  misc_feature (1)..(254): Homolog of NCBI NO: 15217806 NR Description: expressed protein [Arabidopsis thaliana]
MSLSNGKTEAPLPISNGDEKKPFKIFVGYDPREDLAYEVCRHSILKRSSIPVEIIPIKQSDLRKSGLYWRERGQFESTEFSFSRFLTPCLANYQGWAMFVDCDFLYLADIKELKDLIEDKYAIMCVQHDYAPKETTKMDGAVQTVYPRKNWSSMVLYNCAHPKNRVLTPDTVNTQNGAFLHRFQWLEDDQIGSIPFVWNFLEGHNRIVGNDPTTSPKAIHYTRGGPWFEAWKNCEFADLWLNEMEDYMKQAKKEQSA

SEQ ID NO: 52701 - protein, 160 aa, Glycine max
  peptide (1)..(160): Ceres Seq. ID no. 15178297
  misc_feature (1)..(152): Homolog of NCBI NO: 33864719 NR Description: conserved hypothetical protein [Synechococcus sp.
  misc_feature (1)..(143): Homolog of NCBI NO: 16264294 NR Description: conserved hypothetical protein [Sinorhizobium
  misc_feature (1)..(158): Homolog of NCBI NO: 37536068 NR Description: unknown protein [Oryza sativa (japonica
  misc_feature (1)..(158): Homolog of NCBI NO: 34903402 NR Description: hypothetical protein~similar to Oryza sativa
  misc_feature (1)..(157): Homolog of NCBI NO: 15217806 NR Description: expressed protein [Arabidopsis thaliana]
MFVDCDFLYLADIKELKDLIEDKYAIMCVQHDYAPKETTKMDGAVQTVYPRKNWSSMVLYNCAHPKNRVLTPDTVNTQNGAFLHRFQWLEDDQIGSIPFVWNFLEGHNRIVGNDPTTSPKAIHYTRGGPWFEAWKNCEFADLWLNEMEDYMKQAKKEQSA

SEQ ID NO: 52702 - protein, 134 aa, Glycine max
  peptide (1)..(134): Ceres Seq. ID no. 15178298
  misc_feature (1)..(126): Homolog of NCBI NO: 33864719 NR Description: conserved hypothetical protein [Synechococcus sp.
  misc_feature (1)..(117): Homolog of NCBI NO: 16264294 NR Description: conserved hypothetical protein [Sinorhizobium
  misc_feature (1)..(132): Homolog of NCBI NO: 37536068 NR Description: unknown protein [Oryza sativa (japonica
  misc_feature (1)..(132): Homolog of NCBI NO: 34903402 NR Description: hypothetical protein~similar to Oryza sativa
  misc_feature (1)..(131): Homolog of NCBI NO: 15217806 NR Description: expressed protein [Arabidopsis thaliana]
MCVQHDYAPKETTKMDGAVQTVYPRKNWSSMVLYNCAHPKNRVLTPDTVNTQNGAFLHRFQWLEDDQIGSIPFVWNFLEGHNRIVGNDPTTSPKAIHYTRGGPWFEAWKNCEFADLWLNEMEDYMKQAKKEQSA

SEQ ID NO: 52703 - DNA, 1294 bp, Glycine max
  misc_feature (1)..(1294): Ceres Seq. ID no. 15170627
cataaccataaccgtctcagatagctttaggattttggtgtcaagattgtaggagcggccgtccgacctctgccaccacacgtgctgttggagctcgtggtgcaccctcacctcatggaaggagccatcctccccagcctgccaaacacgaggttagccgcccgcccatacatgcttagctgctcttggcgtcgccatgtagccttgcaacttgcagaaatctcatcgactgcggttgctagggtcgccgtcgtcaccggagggaacaaggggatcggcttcgaggtgtgccggcagcttgccagcggcggaattgccgtcgtcctgacggcccgggatgagatgaggggcggggaggccgtcgagaggctcaatgcgctggggctctctcatgtcgtcttccatcagctggagatcacggacgcttcgagcgccgctgcgctagctggttttctcaaggcccgcttcggcaagcttgatattctggtgaataatgccgcagttggtggggttgagtacggccaagagttcgataccaacgaggaaaagttcggtggcatggatttccaccagagagttgagtggatgctgaagaatgcccgggagcccatcgacagcgcgaagaacagcgtgaagacgaactactacggcacgaagcatgtaatcgaagccctgctgcctctgcttcaagcttcgtccgagggaagaatagtgaacgtctcctccaattatggactcctaagacatatcggcaacgaggaggtgaggcaggagctcaacgacgtcgacaacctgacagaggagaggttggacgagctgctggacaaattcatgaaagacttcgaggccggcgcgctggagccgcacgggtggcccacgaagttctccgcgtacaaggtggccaagaccgccatgaacgcctactcgaggatcctggcgaggaggcaccctgagctgcgcgtcaactgcgcgcacccaggcttcgtcaagaccgacatgagcatggggtccggggtcctgacgccggaggagggcgcacgcaacttggtgaaggtggcgctgctgcctgacggcgggccgaccggcgcgtatttcgccatgggcgaggaggcgctgttcgtgtgagatactgggaaccggatcctctaacattgtgaaggaaagtcagtgtgctacagtgtttgcctagtgtaaaataaagaaggaaagttaaggactgttagtagataattaataggttgtttactgtttactgtaagtataaataatttaaaattaattttatttcaccaac

SEQ ID NO: 52704 - protein, 336 aa, Glycine max
  peptide (1)..(336): Ceres Seq. ID no. 15170628
  misc_feature (254)..(334): Homolog of NCBI NO: 40063368 NR Description: oxidoreductase, short chain
  misc_feature (43)..(153): Homolog of NCBI NO: 40063368 NR Description: oxidoreductase, short chain
  misc_feature (114)..(335): Homolog of NCBI NO: 10176876 NR Description: carbonyl reductase-like protein [Arabidopsis
  misc_feature (41)..(327): Homolog of NCBI NO: 34559416 NR Description: (-)-isopiperitenone reductase [Mentha x piperita]
  misc_feature (1)..(331): Homolog of NCBI NO: 33146492 NR Description: carbonyl reductase -like protein
  misc_feature (31)..(336): Homolog of NCBI NO: 38346767 NR Description: OSJNBa0081C01.18 [Oryza sativa (japonica
  misc_feature (36)..(336): Homolog of NCBI NO: 38346772 NR Description: OSJNBa0081C01.23 [Oryza sativa (japonica
  misc_feature (35)..(336): Homolog of NCBI NO: 38346768 NR Description: OSJNBa0081C01.19 [Oryza sativa (japonica
  misc_feature (42)..(336): Homolog of NCBI NO: 38346774 NR Description: OSJNBa0081C01.25 [Oryza sativa (japonica
  misc_feature (35)..(336): Homolog of NCBI NO: 38346769 NR Description: OSJNBa0081C01.20 [Oryza sativa (japonica
MEGAILPSLPNTRLAARPYMLSCSWRRHVALQLAEISSTAVARVAVVTGGNKGIGFEVCRQLASGGIAVVLTARDEMRGGEAVERLNALGLSHVVFHQLEITDASSAAALAGFLKARFGKLDILVNNAAVGGVEYGQEFDTNEEKFGGMDFHQRVEWMLKNAREPIDSAKNSVKTNYYGTKHVIEALLPLLQASSEGRIVNVSSNYGLLRHIGNEEVRQELNDVDNLTEERLDELLDKFMKDFEAGALEPHGWPTKFSAYKVAKTAMNAYSRILARRHPELRVNCAHPGFVKTDMSMGSGVLTPEEGARNLVKVALLPDGGPTGAYFAMGEEALFV

SEQ ID NO: 52705 - protein, 317 aa, Glycine max
  peptide (1)..(317): Ceres Seq. ID no. 15170629
  misc_feature (235)..(315): Homolog of NCBI NO: 40063368 NR Description: oxidoreductase, short chain
  misc_feature (24)..(134): Homolog of NCBI NO: 40063368 NR Description: oxidoreductase, short chain
  misc_feature (95)..(316): Homolog of NCBI NO: 10176876 NR Description: carbonyl reductase-like protein [Arabidopsis
  misc_feature (22)..(308): Homolog of NCBI NO: 34559416 NR Description: (-)-isopiperitenone reductase [Mentha x piperita]
  misc_feature (1)..(312): Homolog of NCBI NO: 33146492 NR Description: carbonyl reductase -like protein
  misc_feature (12)..(317): Homolog of NCBI NO: 38346767 NR Description: OSJNBa0081C01.18 [Oryza sativa (japonica
  misc_feature (17)..(317): Homolog of NCBI NO: 38346772 NR Description: OSJNBa0081C01.23 [Oryza sativa (japonica
  misc_feature (16)..(317): Homolog of NCBI NO: 38346768 NR Description: OSJNBa0081C01.19 [Oryza sativa (japonica
  misc_feature (23)..(317): Homolog of NCBI NO: 38346774 NR Description: OSJNBa0081C01.25 [Oryza sativa (japonica
  misc_feature (16)..(317): Homolog of NCBI NO: 38346769 NR Description: OSJNBa0081C01.20 [Oryza sativa (japonica
MLSCSWRRHVALQLAEISSTAVARVAVVTGGNKGIGFEVCRQLASGGIAVVLTARDEMRGGEAVERLNALGLSHVVFHQLEITDASSAAALAGFLKARFGKLDILVNNAAVGGVEYGQEFDTNEEKFGGMDFHQRVEWMLKNAREPIDSAKNSVKTNYYGTKHVIEALLPLLQASSEGRIVNVSSNYGLLRHIGNEEVRQELNDVDNLTEERLDELLDKFMKDFEAGALEPHGWPTKFSAYKVAKTAMNAYSRILARRHPELRVNCAHPGFVKTDMSMGSGVLTPEEGARNLVKVALLPDGGPTGAYFAMGEEALFV

SEQ ID NO: 52706 - protein, 260 aa, Glycine max
  peptide (1)..(260): Ceres Seq. ID no. 15170630
  misc_feature (178)..(258): Homolog of NCBI NO: 40063368 NR Description: oxidoreductase, short chain
  misc_feature (1)..(77): Homolog of NCBI NO: 40063368 NR Description: oxidoreductase, short chain
  misc_feature (38)..(259): Homolog of NCBI NO: 10176876 NR Description: carbonyl reductase-like protein [Arabidopsis
  misc_feature (1)..(251): Homolog of NCBI NO: 34559416 NR Description: (-)-isopiperitenone reductase [Mentha x piperita]
  misc_feature (1)..(255): Homolog of NCBI NO: 33146492 NR Description: carbonyl reductase -like protein
  misc_feature (1)..(260): Homolog of NCBI NO: 38346767 NR Description: OSJNBa0081C01.18 [Oryza sativa (japonica
  misc_feature (1)..(260): Homolog of NCBI NO: 38346772 NR Description: OSJNBa0081C01.23 [Oryza sativa (japonica
  misc_feature (1)..(260): Homolog of NCBI NO: 38346768 NR Description: OSJNBa0081C01.19 [Oryza sativa (japonica
  misc_feature (1)..(260): Homolog of NCBI NO: 38346774 NR Description: OSJNBa0081C01.25 [Oryza sativa (japonica
  misc_feature (1)..(260): Homolog of NCBI NO: 38346769 NR Description: OSJNBa0081C01.20 [Oryza sativa (japonica
MRGGEAVERLNALGLSHVVFHQLEITDASSAAALAGFLKARFGKLDILVNNAAVGGVEYGQEFDTNEEKFGGMDFHQRVEWMLKNAREPIDSAKNSVKTNYYGTKHVIEALLPLLQASSEGRIVNVSSNYGLLRHIGNEEVRQELNDVDNLTEERLDELLDKFMKDFEAGALEPHGWPTKFSAYKVAKTAMNAYSRILARRHPELRVNCAHPGFVKTDMSMGSGVLTPEEGARNLVKVALLPDGGPTGAYFAMGEEALFV

SEQ ID NO: 52707 - DNA, 1350 bp, Glycine max
  misc_feature (1)..(1350): Ceres Seq. ID no. 15170792
aatatctcaaaaaggaaaccgacaacacaaaggatttgcagaaagtgcagctacttagttccattttcatcctctctccattaactttcagtcaaaacaaaacaaaacctctttaggtgtgaaattccacgtgccaaaatcatctccgaggcaccaacatcggcagccacttatttctttatttattgaaggaatcagtatataaaacacctgctttctaacggtggcgcaccagaggggtttaggttcaggttcggggaagttcttcgcggcggagcaaggcggcgatgaggaagcggaagagagtactgaggtaggttctgttccgagccatgtggtgtcagcctctgcagcttcggcccaaaccaatcagtgggtgccgcggggaagtggttttcccatgatgtcacgttttatgcatgcgccttctcccgttctgtcttcttcgcatcctcatttgggagttggccacaagagagagcgtgaagatgacactggcgctggtgcgagtggaggtgttgctattgcagcagcttcttcacaaacgcaaacacaagagattgaaagtgctggcggcgacaggaggaggagatacaggggagtgaggcagaggccgtgggggaaatgggcggcagagattcgcgatcctcacaaagcggcgagagtgtggcttgggacattcgacactgccgaggctgcggccagagcctacgatgaagccgcattgaggttcagaggtaacagagcaaaacttaatttccccgaaaacgttgtaccggttccacctcctcctccggttcccgatttaccggcaagtgcggtagccggttccgattccatttccggttccggttcagtggtggcaggtttttcgccgacgctgatgcagggagcgccgtttcagggctcctctgcttttctgagagattattgggggtattctcagctgctgaggagtacaggggacttccatggactcgaccagtggttctttgattctcaaatggcagcgtttcaatcttcttcatcgtcgttgttgccatcgccgccgccgccgtcgttttcgccttcctctgcttcgtatcctctgttttcttccagccagcaaatggggattttccggccgccgggagagcagggtcatggcggagaagacggtggtagtgggtcagagttttcggagcttccaccttcgacgtggtcagataccagtggctatcctcctccaccacctggttgacatggaatacacatttttttctttattctattttttctctttctttggttaaagaaagaacaaggctttcttctgtttatttattttaatttatctgtttttgctttttt

SEQ ID NO: 52708 - protein, 279 aa, Glycine max
  peptide (1)..(279): Ceres Seq. ID no. 15170793
  misc_feature (62)..(124): Pfam Name: AP2 domain Pfam Description: AP2 domain
  misc_feature (43)..(140): Homolog of NCBI NO: 15226153 NR Description: AP2 domain transcription factor family
  misc_feature (1)..(124): Homolog of NCBI NO: 15240379 NR Description: AP2 domain transcription factor family
  misc_feature (62)..(218): Homolog of NCBI NO: 33519168 NR Description: AP2 domain-containing protein AP29
  misc_feature (51)..(124): Homolog of NCBI NO: 2281637 NR Description: AP2 domain containing protein RAP2.6 [Arabidopsis
  misc_feature (41)..(252): Homolog of NCBI NO: 38347164 NR Description: OSJNBa0039C07.10 [Oryza sativa (japonica
  misc_feature (22)..(124): Homolog of NCBI NO: 15218275 NR Description: AP2 domain transcription factor RAP2.6
  misc_feature (33)..(277): Homolog of NCBI NO: 34908616 NR Description: P0677H08.8 [Oryza sativa (japonica
  misc_feature (23)..(245): Homolog of NCBI NO: 15238232 NR Description: AP2 domain transcription factor, putative
  misc_feature (54)..(142): Homolog of NCBI NO: 15240610 NR Description: putative protein; protein id: At5g50080.1
  misc_feature (23)..(142): Homolog of NCBI NO: 34221731 NR Description: putative AP2 domain transcription factor
MMSRFMHAPSPVLSSSHPHLGVGHKREREDDTGAGASGGVAIAAASSQTQTQEIESAGGDRRRRYRGVRQRPWGKWAAEIRDPHKAARVWLGTFDTAEAAARAYDEAALRFRGNRAKLNFPENVVPVPPPPPVPDLPASAVAGSDSISGSGSVVAGFSPTLMQGAPFQGSSAFLRDYWGYSQLLRSTGDFHGLDQWFFDSQMAAFQSSSSSLLPSPPPPSFSPSSASYPLFSSSQQMGIFRPPGEQGHGGEDGGSGSEFSELPPSTWSDTSGYPPPPPG

SEQ ID NO: 52709 - protein, 278 aa, Glycine max
  peptide (1)..(278): Ceres Seq. ID no. 15170794
  misc_feature (61)..(123): Pfam Name: AP2 domain Pfam Description: AP2 domain
  misc_feature (42)..(139): Homolog of NCBI NO: 15226153 NR Description: AP2 domain transcription factor family
  misc_feature (1)..(123): Homolog of NCBI NO: 15240379 NR Description: AP2 domain transcription factor family
  misc_feature (61)..(217): Homolog of NCBI NO: 33519168 NR Description: AP2 domain-containing protein AP29
  misc_feature (50)..(123): Homolog of NCBI NO: 2281637 NR Description: AP2 domain containing protein RAP2.6 [Arabidopsis
  misc_feature (40)..(251): Homolog of NCBI NO: 38347164 NR Description: OSJNBa0039C07.10 [Oryza sativa (japonica
  misc_feature (21)..(123): Homolog of NCBI NO: 15218275 NR Description: AP2 domain transcription factor RAP2.6
  misc_feature (32)..(276): Homolog of NCBI NO: 34908616 NR Description: P0677H08.8 [Oryza sativa (japonica
  misc_feature (22)..(244): Homolog of NCBI NO: 15238232 NR Description: AP2 domain transcription factor, putative
  misc_feature (53)..(141): Homolog of NCBI NO: 15240610 NR Description: putative protein; protein id: At5g50080.1
  misc_feature (22)..(141): Homolog of NCBI NO: 34221731 NR Description: putative AP2 domain transcription factor
MSRFMHAPSPVLSSSHPHLGVGHKREREDDTGAGASGGVAIAAASSQTQTQEIESAGGDRRRRYRGVRQRPWGKWAAEIRDPHKAARVWLGTFDTAEAAARAYDEAALRFRGNRAKLNFPENVVPVPPPPPVPDLPASAVAGSDSISGSGSVVAGFSPTLMQGAPFQGSSAFLRDYWGYSQLLRSTGDFHGLDQWFFDSQMAAFQSSSSSLLPSPPPPSFSPSSASYPLFSSSQQMGIFRPPGEQGHGGEDGGSGSEFSELPPSTWSDTSGYPPPPPG

SEQ ID NO: 52710 - protein, 274 aa, Glycine max
  peptide (1)..(274): Ceres Seq. ID no. 15170795
  misc_feature (57)..(119): Pfam Name: AP2 domain Pfam Description: AP2 domain
  misc_feature (38)..(135): Homolog of NCBI NO: 15226153 NR Description: AP2 domain transcription factor family
  misc_feature (1)..(119): Homolog of NCBI NO: 15240379 NR Description: AP2 domain transcription factor family
  misc_feature (57)..(213): Homolog of NCBI NO: 33519168 NR Description: AP2 domain-containing protein AP29
  misc_feature (46)..(119): Homolog of NCBI NO: 2281637 NR Description: AP2 domain containing protein RAP2.6 [Arabidopsis
  misc_feature (36)..(247): Homolog of NCBI NO: 38347164 NR Description: OSJNBa0039C07.10 [Oryza sativa (japonica
  misc_feature (17)..(119): Homolog of NCBI NO: 15218275 NR Description: AP2 domain transcription factor RAP2.6
  misc_feature (28)..(272): Homolog of NCBI NO: 34908616 NR Description: P0677H08.8 [Oryza sativa (japonica
  misc_feature (18)..(240): Homolog of NCBI NO: 15238232 NR Description: AP2 domain transcription factor, putative
  misc_feature (49)..(137): Homolog of NCBI NO: 15240610 NR Description: putative protein; protein id: At5g50080.1
  misc_feature (18)..(137): Homolog of NCBI NO: 34221731 NR Description: putative AP2 domain transcription factor
MHAPSPVLSSSHPHLGVGHKREREDDTGAGASGGVAIAAASSQTQTQEIESAGGDRRRRYRGVRQRPWGKWAAEIRDPHKAARVWLGTFDTAEAAARAYDEAALRFRGNRAKLNFPENVVPVPPPPPVPDLPASAVAGSDSISGSGSVVAGFSPTLMQGAPFQGSSAFLRDYWGYSQLLRSTGDFHGLDQWFFDSQMAAFQSSSSSLLPSPPPPSFSPSSASYPLFSSSQQMGIFRPPGEQGHGGEDGGSGSEFSELPPSTWSDTSGYPPPPPG

SEQ ID NO: 52711 - DNA, 1517 bp, Glycine max
  misc_feature (1)..(1517): Ceres Seq. ID no. 15177298
ttttgcccccctctctctcaccctcctcttcacacattttctgtgcgctctaacaaacattctcgttcacactttcagattgtgtgaagatgggggcgggtggccgaactgatgttcctcctgccaacaggaagtcagaggttgaccctttgaagcgggtgccatttgaaaaacctccatttagtctcagccaaatcaagaaggtcattccacctcactgtttccagcgttctgttttccgctcattctcctatgttgtttacgacctcaccatagccttctgcctctattatgttgccacccattacttccacctccttcccagccctctctctttcttggcatggccaatctactgggctgtccaaggttgcatccttactggagtttgggtcattgcccatgagtgtggccaccatgcattcagtgactaccagttgcttgatgatattgttggccttgtcctccactccggtctcctagtcccatacttttcatggaaatacagccatcgccgtcaccactccaacactggttctcttgagcgggatgaagtatttgtgccaaagcagaagtcctgtatcaagtggtactctaaataccttaacaatcctccaggcagagtcctcactcttgctgtcaccctcacacttggttggcccttgtacttggctttaaatgtttctggaaggccttatgatagatttgcttgccactatgacccatatggtcccatttactctgatcgtgaacgacttcaaatatatatatcagatgcaggagtacttgcagtatgctatggccttttccgtcttgccatggcaaaaggacttgcctgggtggtgtgtgtttatggagttccattgctagtggtcaatggatttttggtgttgattacattcttgcagcatactcaccctgcattgccacattacacttcctctgagtgggactggttgagaggagctttagcaacagtggatagagattatggaatcctgaacaaggtcttccataatattacagacactcatgtagcacatcacttgttctccacaatgccacattatcatgcaatggaggctacaaaggcaataaaacccattttgggagagtattatcggtttgatgagactccatttgtcaaggcaatgtggagagaggcaagagagtgtatttatgtggagccagatcaaagtaccgagagcaaaggtgtattttggtacaacaataagttgtgatgattaatgtagccgaggcttctttgaactttcccttgtgactgtttagtatcatggttgcttattgggaataattttgttgaaccctgatgttggtagtaagtatctagacagttgcatagcggttttgtttacagaataagatatagcctctctgaacagtttgattattgcaccatggtttgcaatcggtgcatgtcgaccaagtttctcaagactgtggagaagcttattcttgttccagttcttgaatccaagttgttaccgtattctgtc

SEQ ID NO: 52712 - protein, 383 aa, Glycine max
  peptide (1)..(383): Ceres Seq. ID no. 15177299
  misc_feature (89)..(340): Pfam Name: Fatty acid desaturase Pfam Description: Fatty acid desaturase
  misc_feature (1)..(383): Homolog of NCBI NO: 28371827 NR Description: delta-12 oleate desaturase [Punica granatum]
  misc_feature (1)..(383): Homolog of NCBI NO: 24298827 NR Description: delta-12 desaturase [Spinacia oleracea]
  misc_feature (1)..(383): Homolog of NCBI NO: 4378875 NR Description: delta-12 desaturase [Brassica carinata]
  misc_feature (1)..(383): Homolog of NCBI NO: 7433289 NR Description: Delta12 fatty acid desaturase (EC 1.14.99.-)
  misc_feature (1)..(383): Homolog of NCBI NO: 20520624 NR Description: fatty acid desaturase 2 [Brassica rapa]
  misc_feature (1)..(383): Homolog of NCBI NO: 8705229 NR Description: delta-12 oleate desaturase [Brassica napus]
  misc_feature (1)..(383): Homolog of NCBI NO: 17225582 NR Description: delta-12 fatty acid desaturase [Gossypium
  misc_feature (1)..(382): Homolog of NCBI NO: 8886726 NR Description: omega-6 fatty acid desaturase [Sesamum indicum]
  misc_feature (1)..(382): Homolog of NCBI NO: 27261181 NR Description: delta 12 oleic acid desaturase FAD2 [Vernicia
  misc_feature (1)..(383): Homolog of NCBI NO: 1345977 NR Description: Omega-6 fatty acid desaturase, endoplasmic
MGAGGRTDVPPANRKSEVDPLKRVPFEKPPFSLSQIKKVIPPHCFQRSVFRSFSYVVYDLTIAFCLYYVATHYFHLLPSPLSFLAWPIYWAVQGCILTGVWVIAHECGHHAFSDYQLLDDIVGLVLHSGLLVPYFSWKYSHRRHHSNTGSLERDEVFVPKQKSCIKWYSKYLNNPPGRVLTLAVTLTLGWPLYLALNVSGRPYDRFACHYDPYGPIYSDRERLQIYISDAGVLAVCYGLFRLAMAKGLAWVVCVYGVPLLVVNGFLVLITFLQHTHPALPHYTSSEWDWLRGALATVDRDYGILNKVFHNITDTHVAHHLFSTMPHYHAMEATKAIKPILGEYYRFDETPFVKAMWREARECIYVEPDQSTESKGVFWYNNKL

SEQ ID NO: 52713 - DNA, 1616 bp, Glycine max
  misc_feature (1)..(1616): Ceres Seq. ID no. 15177308
gacagacttgaggtcaccgagtgttaggagcagcagccaccatgttccatgtttccaccgttgcgctgaatcctcaacctcacactttcctctttccactccccttttttacttcccgcaacctccaactttcacaaactctacaattccccagaaactggaacctccgctctatctcgccatcgctgcacccaacgccgcaatacgacgattccgaagaccacgtcatcggcgactgcgtcgtgttcgaggacggtgttttcgacgaaccgcttttccataaccaccaccacaatcccgacaatcttaccgtcgataagcccaagcccaagcccaggcccagttggaggaaaaaagtggaggagacattgggcgagaatttggtcccggacaagtggcgagaggttcaggcggagataaacattacgaagagggagatgcggaagattgcgcgggaagtggagttcaacagcaaggttgaaaagaagagaagaggcttgattccccttagggatatgaatttggatgactacaaggcttataaggaagccaaattggcgcagatgaagcttctcgattactcttctagttttccggtggacgaaaatgtccctgaacctcaattgaatcgcggagaaaagtttgaggctgaagctgaattggatggtggtgaacgtgttgcgcctaagaaccctaggtgggctgtttatgggaggggtttggaggatgtcactgagtttttcaatagtgacaactatgaccctactactaaaacccctggaggtcgccggaagttgtttaataaggaggagaaggttttgttgaataagaggataccagacttggcagctgctacttcggataaatggcttcccctgcacactctcgctgcttgtggagaattttaccttttagattctctgttgaagcataatgttgatatcaatgctgtggataaggatggtttgactgcccttcacagagcaacaattggaaaaaagcaggccataatcaattatctcctgagaaactcagctaatccctttgtacaggataatgagggagccacattgatgcactatgctgtactaacagcttctacccagacaattaaaatactcttattgtataatgtggatataaatctccaggacaatgtatgattaaattttctcttgtatggctggacaccattacatcttgctgttcaagctcagaggacagatttagtgaggcttttgctaatcaaaggtgctgataagacattaaaaaatgaggatggtttaactcctcttgacctttgcctttacaatggtcaaagtgccagaacatatgagctaatcaagttgtttaagcagcctcaaagacgtcttagtcatgtatcagtatgacagacggggctaagaaacaatacgacttctgaaagatttggaccaacaaatgaagattaaccgttgccaaattttgcatgacaattagcatcccttggtcacatggaaattttgggacaactacggtattgtactatattaaaattaaaatgtatattttaaatgtgataggaaggaaaataggaatattttcatgaaaagaaagaaaaatggtctgccattttt

SEQ ID NO: 52714 - protein, 373 aa, Glycine max
  peptide (1)..(373): Ceres Seq. ID no. 15177309
  misc_feature (275)..(305): Pfam Name: Ankyrin repeat Pfam Description: Ankyrin repeat
  misc_feature (276)..(373): Homolog of NCBI NO: 4506217 NR Description: proteasome 26S non-ATPase subunit 10 isoform 1
  misc_feature (276)..(373): Homolog of NCBI NO: 39654744 NR Description: Chain A, X-Ray Structure Of Human Gankyrin
  misc_feature (276)..(373): Homolog of NCBI NO: 16758980 NR Description: proteasome (prosome, macropain) 26S subunit,
  misc_feature (278)..(373): Homolog of NCBI NO: 28274852 NR Description: ankyrin repeat protein E4_2 [synthetic construct]
  misc_feature (276)..(373): Homolog of NCBI NO: 25990817 NR Description: gankyrin oncoprotein [Mesocricetus auratus]
  misc_feature (191)..(373): Homolog of NCBI NO: 15242597 NR Description: ankyrin repeat protein EMB506 [Arabidopsis
  misc_feature (8)..(373): Homolog of NCBI NO: 22758264 NR Description: Putative ankyrin-repeat protein
  misc_feature (13)..(373): Homolog of NCBI NO: 322461 NR Description: ankyrin-repeat protein - Arabidopsis thaliana
  misc_feature (13)..(373): Homolog of NCBI NO: 26450056 NR Description: unknown protein [Arabidopsis thaliana]
  misc_feature (13)..(373): Homolog of NCBI NO: 30698188 NR Description: expressed protein [Arabidopsis thaliana]
MFHVSTVALNPQPHTFLFPLPFFTSRNLQLSQTLQFPRNWNLRSISPSLHPTPQYDDSEDHVIGDCVVFEDGVFDEPLFHNHHHNPDNLTVDKPKPKPRPSWRKKVEETLGENLVPDKWREVQAEINITKREMRKIAREVEFNSKVEKKRRGLIPLRDMNLDDYKAYKEAKLAQMKLLDYSSSFPVDENVPEPQLNRGEKFEAEAELDGGERVAPKNPRWAVYGRGLEDVTEFFNSDNYDPTTKTPGGRRKLFNKEEKVLLNKRIPDLAAATSDKWLPLHTLAACGEFYLLDSLLKHNVDINAVDKDGLTALHRATIGKKQAIINYLLRNSANPFVQDNEGATLMHYAVLTASTQTIKILLLYNVDINLQDNV

SEQ ID NO: 52715 - protein, 241 aa, Glycine max
  peptide (1)..(241): Ceres Seq. ID no. 15177310
  misc_feature (143)..(173): Pfam Name: Ankyrin repeat Pfam Description: Ankyrin repeat
  misc_feature (144)..(241): Homolog of NCBI NO: 4506217 NR Description: proteasome 26S non-ATPase subunit 10 isoform 1
  misc_feature (144)..(241): Homolog of NCBI NO: 39654744 NR Description: Chain A, X-Ray Structure Of Human Gankyrin
  misc_feature (144)..(241): Homolog of NCBI NO: 16758980 NR Description: proteasome (prosome, macropain) 26S subunit,
  misc_feature (146)..(241): Homolog of NCBI NO: 28274852 NR Description: ankyrin repeat protein E4_2 [synthetic construct]
  misc_feature (144)..(241): Homolog of NCBI NO: 25990817 NR Description: gankyrin oncoprotein [Mesocricetus auratus]
  misc_feature (59)..(241): Homolog of NCBI NO: 15242597 NR Description: ankyrin repeat protein EMB506 [Arabidopsis
  misc_feature (1)..(241): Homolog of NCBI NO: 22758264 NR Description: Putative ankyrin-repeat protein
  misc_feature (1)..(241): Homolog of NCBI NO: 322461 NR Description: ankyrin-repeat protein - Arabidopsis thaliana
  misc_feature (1)..(241): Homolog of NCBI NO: 26450056 NR Description: unknown protein [Arabidopsis thaliana]
  misc_feature (1)..(241): Homolog of NCBI NO: 30698188 NR Description: expressed protein [Arabidopsis thaliana]
MRKIAREVEFNSKVEKKRRGLIPLRDMNLDDYKAYKEAKLAQMKLLDYSSSFPVDENVPEPQLNRGEKFEAEAELDGGERVAPKNPRWAVYGRGLEDVTEFFNSDNYDPTTKTPGGRRKLFNKEEKVLLNKRIPDLAAATSDKWLPLHTLAACGEFYLLDSLLKHNVDINAVDKDGLTALHRATIGKKQAIINYLLRNSANPFVQDNEGATLMHYAVLTASTQTIKILLLYNVDINLQDNV

SEQ ID NO: 52716 - protein, 215 aa, Glycine max
  peptide (1)..(215): Ceres Seq. ID no. 15177311
  misc_feature (117)..(147): Pfam Name: Ankyrin repeat Pfam Description: Ankyrin repeat
  misc_feature (118)..(215): Homolog of NCBI NO: 4506217 NR Description: proteasome 26S non-ATPase subunit 10 isoform 1
  misc_feature (118)..(215): Homolog of NCBI NO: 39654744 NR Description: Chain A, X-Ray Structure Of Human Gankyrin
  misc_feature (118)..(215): Homolog of NCBI NO: 16758980 NR Description: proteasome (prosome, macropain) 26S subunit,
  misc_feature (120)..(215): Homolog of NCBI NO: 28274852 NR Description: ankyrin repeat protein E4_2 [synthetic construct]
  misc_feature (118)..(215): Homolog of NCBI NO: 25990817 NR Description: gankyrin oncoprotein [Mesocricetus auratus]
  misc_feature (33)..(215): Homolog of NCBI NO: 15242597 NR Description: ankyrin repeat protein EMB506 [Arabidopsis
  misc_feature (1)..(215): Homolog of NCBI NO: 22758264 NR Description: Putative ankyrin-repeat protein
  misc_feature (1)..(215): Homolog of NCBI NO: 322461 NR Description: ankyrin-repeat protein - Arabidopsis thaliana
  misc_feature (1)..(215): Homolog of NCBI NO: 26450056 NR Description: unknown protein [Arabidopsis thaliana]
  misc_feature (1)..(215): Homolog of NCBI NO: 30698188 NR Description: expressed protein [Arabidopsis thaliana]
MNLDDYKAYKEAKLAQMKLLDYSSSFPVDENVPEPQLNRGEKFEAEAELDGGERVAPKNPRWAVYGRGLEDVTEFFNSDNYDPTTKTPGGRRKLFNKEEKVLLNKRIPDLAAATSDKWLPLHTLAACGEFYLLDSLLKHNVDINAVDKDGLTALHRATIGKKQAIINYLLRNSANPFVQDNEGATLMHYAVLTASTQTIKILLLYNVDINLQDNV

SEQ ID NO: 52717 - DNA, 831 bp, Glycine max
  misc_feature (1)..(831): Ceres Seq. ID no. 14309515
acgtttagctatctgagaatacaaaatggcggcggcgaaagcagcggtggtattgccacgtccggtgacgtttgtgacgggaaatgcgaagaagctcgaagaggtcaaagctatcatcgggagttccattcctttcaagtctctcaaactcgacctgcctgagcttcaaggagagcctgaggatatctccaaagagaaagctcgtttggctgctcttcaggtaaatgggccagtgctagtggaggatacatgcctctgtttcaatgctttgaagggtcttcctgggccttacattaagtggtttcttgagaagcttggccatgaaggtttgaacaacttactgatggcctatgaagataaatcagcttatgcattgtgtgcattctctttctcgcatggtccaggtgctgaacctcttacatttttggggaaaactccgggtaagatagttccagcaagaggaccaactgatttcgggtgggatccagtgtttcaacctgatggatatgaccaaacttatgcagaaatggcaaaggaagaaaagaacaagatatcccatcggtacaagtctttagcaatggtgaaatctcactttaaggaggctggctacgtgttccagacaacagatgatgataccaattaaagtgaaaacccattccccattttccttcagcttttaaagatttgagcactggttctcctttttttctgaattgcaattagaaacacttttgttcacaagtttctaaccaaaacataaaatggcaaaacatattcattggattttgctgtgttctcaagagacagtaatactaatcattgtcttgattc

SEQ ID NO: 52718 - protein, 205 aa, Glycine max
  peptide (1)..(205): Ceres Seq. ID no. 14309516
  misc_feature (14)..(190): Pfam Name: Ham1 family Pfam Description: Ham1 family
  misc_feature (6)..(190): Homolog of NCBI NO: 15626999 NR Description: inosine triphosphatase isoform a
  misc_feature (6)..(190): Homolog of NCBI NO: 13398328 NR Description: inosine triphosphate pyrophosphatase [Homo
  misc_feature (6)..(193): Homolog of NCBI NO: 12842364 NR Description: unnamed protein product [Mus musculus]
  misc_feature (6)..(190): Homolog of NCBI NO: 27732417 NR Description: similar to inosine triphosphatase; Inosine
  misc_feature (6)..(193): Homolog of NCBI NO: 31982664 NR Description: inosine triphosphatase; nucleoside triphosphate
  misc_feature (10)..(192): Homolog of NCBI NO: 19920712 NR Description: CG8891-PA [Drosophila melanogaster]
  misc_feature (10)..(192): Homolog of NCBI NO: 31221718 NR Description: ENSANGP00000019707 [Anopheles gambiae]
  misc_feature (2)..(198): Homolog of NCBI NO: 37535020 NR Description: putative HAM-1-like protein
  misc_feature (14)..(204): Homolog of NCBI NO: 7485688 NR Description: hypothetical protein F18A5.110 - Arabidopsis
  misc_feature (2)..(204): Homolog of NCBI NO: 18414065 NR Description: auxin-regulated protein [Arabidopsis thaliana]
MAAAKAAVVLPRPVTFVTGNAKKLEEVKAIIGSSIPFKSLKLDLPELQGEPEDISKEKARLAALQVNGPVLVEDTCLCFNALKGLPGPYIKWFLEKLGHEGLNNLLMAYEDKSAYALCAFSFSHGPGAEPLTFLGKTPGKIVPARGPTDFGWDPVFQPDGYDQTYAEMAKEEKNKISHRYKSLAMVKSHFKEAGYVFQTTDDDTN

SEQ ID NO: 52719 - DNA, 1507 bp, Glycine max
  misc_feature (1)..(1507): Ceres Seq. ID no. 15170752
aagcctattacgatgtcgtttttaagaaaaccggcagtattgccgttagcgacgcagccaaaaccctaatcagtgccaaacgatggaatcaccgtcaccaccttccccgttccgagaccttcttctccgtttatcgaccggaatcgcggagtctctggccaccgttccctacactccacaccaatcctccaacgtctccgtcaaagcctttctcgaacccctcctcgttcccaccgccaccgtcagagacttcgctctcgcgtgcgctctcatttcctcttccaccgccgtcgactcctccggcattctctcatggatccccagcaacctctcctctctcgcaacctcgtccttctccgacctctcccgcgcttacctcggaaatcgcgacctcgctgttccgccggagaagaggctcgtgctggaattgatgccagaggttttgccttttctgaaagagaggattaaggagagctcgattgatgtgtcggatgagaccgacgagttctccgcggcgacggcgagagtccccgttgggttcgccattctcgctgcttttcagtttagatggtttgttacgcaagttgattattctcatttgggcaagttgtgtggattggtgattccttgtgcactgactgctgttgatcattggtctccggtagttaagggacagggcatgattagccttatgcatgttggaaaaaatgtggatgctgctcagcttggtgggtatgtggatgtgattctggatgcctgctgccagaacacggcttctgatgatgagatatggcaccatgttgttgaggcatctgtactgcttgtgactcttactcagagaagtaatccacgtagtccatggtttgaaagaatgctaaatgagatgttaagtcacttggagcgccagcctagaaacaaagagcgccgcatcgcatggcttaaatctgctgattcactatttaatggagttggtatcatgcttttagctcacttcaggcgcattttcccattattttttcagtggatgcatgctgacgacaatgagactattattttggttctaaaatgtacatatgtaattttgagactgacgtggataaggaactcaccatttgttgcaaaattggtagataaacttgctcttgtgtataaggaggctgcattaagaacagctcgggaagagattagagcaaatatatgtcagatactgatcctacttcaagaaagcaaaggactgtattttaatgcagcctgggacaagcatcgatccgatccagacttgaccactcttgatttttcattaagtggaagaagtaatactaatactgtgccttcagaggattgtcctcagcagggtttagtacccgttcaatgataagttaattgcatttctgattatttcaatgtaccacaattttgagttgatataggttaatgtaattaaaaagtagaattgttggaacgagaataacaatatgcaaagtttgaatttgttttgtattctttg

SEQ ID NO: 52720 - protein, 430 aa, Glycine max
  peptide (1)..(430): Ceres Seq. ID no. 15170753
  misc_feature (81)..(260): Homolog of NCBI NO: 25370807 NR Description: hypothetical protein At2g39910 [imported] -
  misc_feature (5)..(403): Homolog of NCBI NO: 20198306 NR Description: expressed protein [Arabidopsis thaliana]
  misc_feature (1)..(403): Homolog of NCBI NO: 26451294 NR Description: unknown protein [Arabidopsis thaliana]
  misc_feature (1)..(403): Homolog of NCBI NO: 30688076 NR Description: expressed protein [Arabidopsis thaliana]
MESPSPPSPFRDLLLRLSTGIAESLATVPYTPHQSSNVSVKAFLEPLLVPTATVRDFALACALISSSTAVDSSGILSWIPSNLSSLATSSFSDLSRAYLGNRDLAVPPEKRLVLELMPEVLPFLKERIKESSIDVSDETDEFSAATARVPVGFAILAAFQFRWFVTQVDYSHLGKLCGLVIPCALTAVDHWSPVVKGQGMISLMHVGKNVDAAQLGGYVDVILDACCQNTASDDEIWHHVVEASVLLVTLTQRSNPRSPWFERMLNEMLSHLERQPRNKERRIAWLKSADSLFNGVGIMLLAHFRRIFPLFFQWMHADDNETIILVLKCTYVILRLTWIRNSPFVAKLVDKLALVYKEAALRTAREEIRANICQILILLQESKGLYFNAAWDKHRSDPDLTTLDFSLSGRSNTNTVPSEDCPQQGLVPVQ

SEQ ID NO: 52721 - protein, 314 aa, Glycine max
  peptide (1)..(314): Ceres Seq. ID no. 15170754
  misc_feature (1)..(144): Homolog of NCBI NO: 25370807 NR Description: hypothetical protein At2g39910 [imported] -
  misc_feature (1)..(287): Homolog of NCBI NO: 20198306 NR Description: expressed protein [Arabidopsis thaliana]
  misc_feature (1)..(287): Homolog of NCBI NO: 26451294 NR Description: unknown protein [Arabidopsis thaliana]
  misc_feature (1)..(287): Homolog of NCBI NO: 30688076 NR Description: expressed protein [Arabidopsis thaliana]
MPEVLPFLKERIKESSIDVSDETDEFSAATARVPVGFAILAAFQFRWFVTQVDYSHLGKLCGLVIPCALTAVDHWSPVVKGQGMISLMHVGKNVDAAQLGGYVDVILDACCQNTASDDEIWHHVVEASVLLVTLTQRSNPRSPWFERMLNEMLSHLERQPRNKERRIAWLKSADSLFNGVGIMLLAHFRRIFPLFFQWMHADDNETIILVLKCTYVILRLTWIRNSPFVAKLVDKLALVYKEAALRTAREEIRANICQILILLQESKGLYFNAAWDKHRSDPDLTTLDFSLSGRSNTNTVPSEDCPQQGLVPVQ

SEQ ID NO: 52722 - protein, 231 aa, Glycine max
  peptide (1)..(231): Ceres Seq. ID no. 15170755
  misc_feature (1)..(61): Homolog of NCBI NO: 25370807 NR Description: hypothetical protein At2g39910 [imported] -
  misc_feature (1)..(204): Homolog of NCBI NO: 20198306 NR Description: expressed protein [Arabidopsis thaliana]
  misc_feature (1)..(204): Homolog of NCBI NO: 26451294 NR Description: unknown protein [Arabidopsis thaliana]
  misc_feature (1)..(204): Homolog of NCBI NO: 30688076 NR Description: expressed protein [Arabidopsis thaliana]
MISLMHVGKNVDAAQLGGYVDVILDACCQNTASDDEIWHHVVEASVLLVTLTQRSNPRSPWFERMLNEMLSHLERQPRNKERRIAWLKSADSLFNGVGIMLLAHFRRIFPLFFQWMHADDNETIILVLKCTYVILRLTWIRNSPFVAKLVDKLALVYKEAALRTAREEIRANICQILILLQESKGLYFNAAWDKHRSDPDLTTLDFSLSGRSNTNTVPSEDCPQQGLVPVQ

SEQ ID NO: 52723 - DNA, 972 bp, Glycine max
  misc_feature (1)..(972): Ceres Seq. ID no. 15170807
atccacacccacactgtcacctttccgttcatttcctctgttttttcttcaaatccattgtttcgtggaaatcccgaaatttaaccatgcttctccgaaccgccgcctccgccgcttctgcttcgtccctctccctcttcagccctacctccgaacctctccgttcggttcccgctcgtggattggtggttcgcgccgcgaaaggatccacgaaccaccgcgccctaaccggcgtgatctttgaaccgttcgaagaggtgaagaaggagctcgatctcgttcccaccgttccacaagcttctctcgcccgccaaaaatacgttgacgaatccgaagccgccgttaacgaacaaatcaatgtggagtataacgtttcctacgtttaccatgctatgtttgcgtactttgatagggacaacgttgcgctgagaggtcttgctaagttttttaaggaatcgagtgaagaagaaagagagcatgctgagaaattgatggagtatcagaacaaacgtggtggaagagtgaagttgcagtcaattgtgatgccgctttctgagtttgatcatgcagataagggagatgcgctgcacgcaatggaactcgctctctcattagagaagctaacgaacgaaaagctccttaacttgcacagtgttgccacaaaaaatggtgacgtgcagttggctgactttgtggaaactgagtatctgggtgaacaggtggaagcaatcaaaagaatatccgagtatgttgctcagctcagaagagttggcaaaggacatggtgtttggcactttgatcagatactcctccacgagggaggagatgcagcctgatgattactatattacctccccccccccccccaccccacaagtattttgtatcttgctcatttaggtggctgcttgaaggtggatctgaactaaatgaatgaatgaaataaatgtggcctggtttcggtcctttcgc

SEQ ID NO: 52724 - protein, 277 aa, Glycine max
  peptide (1)..(277): Ceres Seq. ID no. 15170808
  misc_feature (111)..(255): Pfam Name: Ferritin-like domain Pfam Description: Ferritin-like domain
PHPHCHLSVHFLCFFFKSIVSWKSRNLTMLLRTAASAASASSLSLFSPTSEPLRSVPARGLVVRAAKGSTNHRALTGVIFEPFEEVKKELDLVPTVPQASLARQKYVDESEAAVNEQINVEYNVSYVYHAMFAYFDRDNVALRGLAKFFKESSEEEREHAEKLMEYQNKRGGRVKLQSIVMPLSEFDHADKGDALHAMELALSLEKLTNEKLLNLHSVATKNGDVQLADFVETEYLGEQVEAIKRISEYVAQLRRVGKGHGVWHFDQILLHEGGDAA

SEQ ID NO: 52725 - protein, 249 aa, Glycine max
  peptide (1)..(249): Ceres Seq. ID no. 15170809
  misc_feature (83)..(227): Pfam Name: Ferritin-like domain Pfam Description: Ferritin-like domain
MLLRTAASAASASSLSLFSPTSEPLRSVPARGLVVRAAKGSTNHRALTGVIFEPFEEVKKELDLVPTVPQASLARQKYVDESEAAVNEQINVEYNVSYVYHAMFAYFDRDNVALRGLAKFFKESSEEEREHAEKLMEYQNKRGGRVKLQSIVMPLSEFDHADKGDALHAMELALSLEKLTNEKLLNLHSVATKNGDVQLADFVETEYLGEQVEAIKRISEYVAQLRRVGKGHGVWHFDQILLHEGGDAA

SEQ ID NO: 52726 - protein, 147 aa, Glycine max
  peptide (1)..(147): Ceres Seq. ID no. 15170810
  misc_feature (1)..(125): Pfam Name: Ferritin-like domain Pfam Description: Ferritin-like domain
MFAYFDRDNVALRGLAKFFKESSEEEREHAEKLMEYQNKRGGRVKLQSIVMPLSEFDHADKGDALHAMELALSLEKLTNEKLLNLHSVATKNGDVQLADFVETEYLGEQVEAIKRISEYVAQLRRVGKGHGVWHFDQILLHEGGDAA

SEQ ID NO: 52727 - DNA, 918 bp, Glycine max
  misc_feature (1)..(918): Ceres Seq. ID no. 14309569
cattagagtataaggcagtgtttggtagcagagaattaaaaacatggaattctggaaccgcagattgctactacagaacgaggacgttcccctctcgatgccacctctctctcacactcacaccaaacacgccactaacgcatcatcatcctcgccgccgcaatcttcggctttccaattccaaagcccactgcaggtttcgattcctccagttttttcatcgagtgtggcctacgtcttcctcatcctcttcaccaccttcttcttcgtcggcttcgtcttcctctacttccgccagttcgcctccgacgccgccgccgccggatcctaccgccgccgctgggaggagggcgcggcagcggcggcggaggcaaagaagtgcctgccggtggtggcgcactgcggggaggggtgcgcggagtgcgcgatatgcctggaggagctgcgagagggggacgcggtgaagatgattccgtactgcaagcacgtgttccacccgcactgcattgacacgtggctcgataagcatgtcacgtgccccgtgtgccggtgcagtgagctgctatgtggagaagaggtggtggggtcggtgtcagcgagaagacaagaagaagtggttctaaatttggattagaagaactttgaagaagaagatgaaactgtagcgttgcgtgtttcattggacattgcttattatccatatttgctaggtttcaaccaccacttgagagtcttaaccaacgaacgtgttacatattacaagtttcttttgtggttttgttcattcccattattattgccacttgccagtgtcattatttagcagcatttaataattcaataacattctctttcagtttcttttttataaaaataaattgtagtagactcatagtactgctattttgcgttttctcc

SEQ ID NO: 52728 - protein, 196 aa, Glycine max
  peptide (1)..(196): Ceres Seq. ID no. 14309570
  misc_feature (127)..(168): Pfam Name: Zinc finger, C3HC4 type (RING finger) Pfam Description: Zinc finger, C3HC4 type (RING finger)
  misc_feature (40)..(196): Homolog of NCBI NO: 25407810 NR Description: hypothetical protein AT4g40070 [imported] -
  misc_feature (40)..(196): Homolog of NCBI NO: 7487705 NR Description: hypothetical protein T5J17.240 - Arabidopsis
  misc_feature (59)..(194): Homolog of NCBI NO: 4928403 NR Description: RING-H2 zinc finger protein ATL6 [Arabidopsis
  misc_feature (59)..(190): Homolog of NCBI NO: 21536625 NR Description: RING-H2 zinc finger protein-like [Arabidopsis
  misc_feature (59)..(190): Homolog of NCBI NO: 15240924 NR Description: RING-H2 zinc finger protein-related [Arabidopsis
  misc_feature (59)..(194): Homolog of NCBI NO: 18397153 NR Description: RING-H2 zinc finger protein ATL6 -related
  misc_feature (59)..(194): Homolog of NCBI NO: 6729030 NR Description: putative RING-H2 zinc finger protein ATL6
  misc_feature (59)..(194): Homolog of NCBI NO: 19347753 NR Description: putative RING-H2 zinc finger protein ATL6
  misc_feature (48)..(92): Homolog of NCBI NO: 15226289 NR Description: zinc finger (C3HC4-type RING finger) protein
  misc_feature (108)..(179): Homolog of NCBI NO: 15226289 NR Description: zinc finger (C3HC4-type RING finger) protein
MEFWNRRLLLQNEDVPLSMPPLSHTHTKHATNASSSSPPQSSAFQFQSPLQVSIPPVFSSSVAYVFLILFTTFFFVGFVFLYFRQFASDAAAAGSYRRRWEEGAAAAAEAKKCLPVVAHCGEGCAECAICLEELREGDAVKMIPYCKHVFHPHCIDTWLDKHVTCPVCRCSELLCGEEVVGSVSARRQEEVVLNLD

SEQ ID NO: 52729 - protein, 178 aa, Glycine max
  peptide (1)..(178): Ceres Seq. ID no. 14309571
  misc_feature (109)..(150): Pfam Name: Zinc finger, C3HC4 type (RING finger) Pfam Description: Zinc finger, C3HC4 type (RING finger)
  misc_feature (22)..(178): Homolog of NCBI NO: 25407810 NR Description: hypothetical protein AT4g40070 [imported] -
  misc_feature (22)..(178): Homolog of NCBI NO: 7487705 NR Description: hypothetical protein T5J17.240 - Arabidopsis
  misc_feature (41)..(176): Homolog of NCBI NO: 4928403 NR Description: RING-H2 zinc finger protein ATL6 [Arabidopsis
  misc_feature (41)..(172): Homolog of NCBI NO: 21536625 NR Description: RING-H2 zinc finger protein-like [Arabidopsis
  misc_feature (41)..(172): Homolog of NCBI NO: 15240924 NR Description: RING-H2 zinc finger protein-related [Arabidopsis
  misc_feature (41)..(176): Homolog of NCBI NO: 18397153 NR Description: RING-H2 zinc finger protein ATL6 -related
  misc_feature (41)..(176): Homolog of NCBI NO: 6729030 NR Description: putative RING-H2 zinc finger protein ATL6
  misc_feature (41)..(176): Homolog of NCBI NO: 19347753 NR Description: putative RING-H2 zinc finger protein ATL6
  misc_feature (30)..(74): Homolog of NCBI NO: 15226289 NR Description: zinc finger (C3HC4-type RING finger) protein
  misc_feature (90)..(161): Homolog of NCBI NO: 15226289 NR Description: zinc finger (C3HC4-type RING finger) protein
MPPLSHTHTKHATNASSSSPPQSSAFQFQSPLQVSIPPVFSSSVAYVFLILFTTFFFVGFVFLYFRQFASDAAAAGSYRRRWEEGAAAAAEAKKCLPVVAHCGEGCAECAICLEELREGDAVKMIPYCKHVFHPHCIDTWLDKHVTCPVCRCSELLCGEEVVGSVSARRQEEVVLNLD

SEQ ID NO: 52730 - protein, 153 aa, Glycine max
  peptide (1)..(153): Ceres Seq. ID no. 14309572
LEYKAVFGSRELKTWNSGTADCYYRTRTFPSRCHLSLTLTPNTPLTHHHPRRRNLRLSNSKAHCRFRFLQFFHRVWPTSSSSSSPPSSSSASSSSTSASSPPTPPPPDPTAAAGRRARQRRRRQRSACRWWRTAGRGARSARYAWRSCERGTR

SEQ ID NO: 52731 - DNA, 1009 bp, Glycine max
  misc_feature (1)..(1009): Ceres Seq. ID no. 14309565
tggaatctctagcaaaattccagtaattcacacacatcttctaattcgcttttgtcaacctctttattaattggcacaacccgtgatggcaatataaatagcaaaaccaccagcaacaccaccctttgtccacgagagaaagaaatcaatcacatcctatccaaattcaaatcacgaagaacaagtaaaaaggaagagatgggaaatgctatggggagtaaaaaagcaaaggtgatgaaaatagacggtgaaacgttcaagctcaatactccagcaagagcaaacgacgtcgttaaggactaccctggacatgttctcttggactctcacgcggtgaaaaacttcgggcctcgggccaagccacttgagcctgactaccagctcaagcccaagaagatttattttttggtggagttacccaaggttaagcccgaaccattagtaacgaggagggtgcgatccagtggaatccgtggcatgaacgcccaggataggcttgatttcttgatgctgtcgaaacgctccgtttcggaccttaccatggtgaagcatgggcccaagccagaaaatggtgggcccacgagggtcaaaatgaggctgcccaaggcccacttggagaggcttatggaggagagccacgacgggagcgaggtggcggagaagatcataagtttgtatatggggaataatgccgccgtggacggcggcggcgcaacggtggaggcccaaaaggaggttcacaatcgcaagccacgaaggaaacgggtgagtttcagcccagtggaacaagcagaaattcatgaagaatcagcagcaccacaacagtcactagtttatagcagtccttccagatagtcatttatgcagaagcaagccattatttatatgttaggtgcttctaatgcaatttaattttgccctaaaatctgtagcctatatattgatagacatgtctatacatttatacagtagtagtgctaggaccagaagatgcaaatgttgncttcat

SEQ ID NO: 52732 - protein, 218 aa, Glycine max
  peptide (1)..(218): Ceres Seq. ID no. 14309566
  misc_feature (1)..(193): Homolog of NCBI NO: 25404626 NR Description: hypothetical protein F28G11.8 [imported] -
  misc_feature (1)..(193): Homolog of NCBI NO: 30697354 NR Description: expressed protein [Arabidopsis thaliana]
MGNAMGSKKAKVMKIDGETFKLNTPARANDVVKDYPGHVLLDSHAVKNFGPRAKPLEPDYQLKPKKIYFLVELPKVKPEPLVTRRVRSSGIRGMNAQDRLDFLMLSKRSVSDLTMVKHGPKPENGGPTRVKMRLPKAHLERLMEESHDGSEVAEKIISLYMGNNAAVDGGGATVEAQKEVHNRKPRRKRVSFSPVEQAEIHEESAAPQQSLVYSSPSR

SEQ ID NO: 52733 - protein, 214 aa, Glycine max
  peptide (1)..(214): Ceres Seq. ID no. 14309567
  misc_feature (1)..(189): Homolog of NCBI NO: 25404626 NR Description: hypothetical protein F28G11.8 [imported] -
  misc_feature (1)..(189): Homolog of NCBI NO: 30697354 NR Description: expressed protein [Arabidopsis thaliana]
MGSKKAKVMKIDGETFKLNTPARANDVVKDYPGHVLLDSHAVKNFGPRAKPLEPDYQLKPKKIYFLVELPKVKPEPLVTRRVRSSGIRGMNAQDRLDFLMLSKRSVSDLTMVKHGPKPENGGPTRVKMRLPKAHLERLMEESHDGSEVAEKIISLYMGNNAAVDGGGATVEAQKEVHNRKPRRKRVSFSPVEQAEIHEESAAPQQSLVYSSPSR

SEQ ID NO: 52734 - protein, 206 aa, Glycine max
  peptide (1)..(206): Ceres Seq. ID no. 14309568
  misc_feature (1)..(181): Homolog of NCBI NO: 25404626 NR Description: hypothetical protein F28G11.8 [imported] -
  misc_feature (1)..(181): Homolog of NCBI NO: 30697354 NR Description: expressed protein [Arabidopsis thaliana]
MKIDGETFKLNTPARANDVVKDYPGHVLLDSHAVKNFGPRAKPLEPDYQLKPKKIYFLVELPKVKPEPLVTRRVRSSGIRGMNAQDRLDFLMLSKRSVSDLTMVKHGPKPENGGPTRVKMRLPKAHLERLMEESHDGSEVAEKIISLYMGNNAAVDGGGATVEAQKEVHNRKPRRKRVSFSPVEQAEIHEESAAPQQSLVYSSPSR

SEQ ID NO: 52735 - DNA, 702 bp, Glycine max
  misc_feature (1)..(702): Ceres Seq. ID no. 14309553
accaaaggtatcttgcaatcacaacgaacaaaagctctcgatctcaccgacaccgaggaagaagagatcaatggcgtccgagcagggagtcgtgatcgcgtgccacagcaaggctgagtttgacgcccacatgaccaaggcccaggaagccggcaagctggtggtcatcgacttcactgccgcctggtgcggtccatgccgcgccatcgccccactgttcgtcgaacacgccaagaagttcactcaggtcgtcttcctgaaggtggacgtggacgaagtgaaggaagtcaccgcggcctacgaggtcgaggcgatgccgaccttccacttcgtcaagaacggcaagacggtcgcgaccatcgtgggtgccaggaaggacgagctcctggccctgatcgagaagcatgccgcgcctgcgcctgcgactgcgtctgcctaaatgagatcagatcagtcgtcgccgtcaataagggccagcacgtatggctgtaaatgttgtcgttatcagttctggctttgtcgtttgtgggcgatttgtgaactagtagtatgtttgtttctatccgagccggaggcgatacttaaccatggatacttgttgtgagttcgtttctgttcgcgtgtgactcttgaattgaatcaaccagctcaccactgcaccaggccgtggtgagtggtgacagtgatttcctgttagcatgt

SEQ ID NO: 52736 - protein, 145 aa, Glycine max
  peptide (1)..(145): Ceres Seq. ID no. 14309554
  misc_feature (31)..(135): Pfam Name: Thioredoxin Pfam Description: Thioredoxin
  misc_feature (26)..(145): Homolog of NCBI NO: 16588843 NR Description: thioredoxin H [Prunus persica]
  misc_feature (26)..(143): Homolog of NCBI NO: 11135312 NR Description: Thioredoxin H-type (TRX-H)
  misc_feature (25)..(141): Homolog of NCBI NO: 13624884 NR Description: thioredoxin h [Pisum sativum]
  misc_feature (24)..(137): Homolog of NCBI NO: 15230385 NR Description: thioredoxin H-type 1 (TRX-H-1) [Arabidopsis
  misc_feature (25)..(143): Homolog of NCBI NO: 33621084 NR Description: thioredoxin H3 [Ipomoea batatas]
  misc_feature (25)..(145): Homolog of NCBI NO: 40287476 NR Description: thioredoxin [Capsicum annuum]
  misc_feature (25)..(143): Homolog of NCBI NO: 267124 NR Description: Thioredoxin H-type 1 (TRX-H1)
  misc_feature (24)..(128): Homolog of NCBI NO: 32186040 NR Description: thioredoxin h isoform 1; HvTrxh1 [Hordeum vulgare
  misc_feature (24)..(128): Homolog of NCBI NO: 27461140 NR Description: thioredoxin H [Triticum aestivum]
  misc_feature (24)..(145): Homolog of NCBI NO: 3915131 NR Description: Thioredoxin H-type (TRX-H) (Phloem sap 13 kDa
PKVSCNHNEQKLSISPTPRKKRSMASEQGVVIACHSKAEFDAHMTKAQEAGKLVVIDFTAAWCGPCRAIAPLFVEHAKKFTQVVFLKVDVDEVKEVTAAYEVEAMPTFHFVKNGKTVATIVGARKDELLALIEKHAAPAPATASA

SEQ ID NO: 52737 - protein, 122 aa, Glycine max
  peptide (1)..(122): Ceres Seq. ID no. 14309555
  misc_feature (8)..(112): Pfam Name: Thioredoxin Pfam Description: Thioredoxin
  misc_feature (3)..(122): Homolog of NCBI NO: 16588843 NR Description: thioredoxin H [Prunus persica]
  misc_feature (3)..(120): Homolog of NCBI NO: 11135312 NR Description: Thioredoxin H-type (TRX-H)
  misc_feature (2)..(118): Homolog of NCBI NO: 13624884 NR Description: thioredoxin h [Pisum sativum]
  misc_feature (1)..(114): Homolog of NCBI NO: 15230385 NR Description: thioredoxin H-type 1 (TRX-H-1) [Arabidopsis
  misc_feature (2)..(120): Homolog of NCBI NO: 33621084 NR Description: thioredoxin H3 [Ipomoea batatas]
  misc_feature (2)..(122): Homolog of NCBI NO: 40287476 NR Description: thioredoxin [Capsicum annuum]
  misc_feature (2)..(120): Homolog of NCBI NO: 267124 NR Description: Thioredoxin H-type 1 (TRX-H1)
  misc_feature (1)..(105): Homolog of NCBI NO: 32186040 NR Description: thioredoxin h isoform 1; HvTrxh1 [Hordeum vulgare
  misc_feature (1)..(105): Homolog of NCBI NO: 27461140 NR Description: thioredoxin H [Triticum aestivum]
  misc_feature (1)..(122): Homolog of NCBI NO: 3915131 NR Description: Thioredoxin H-type (TRX-H) (Phloem sap 13 kDa
MASEQGVVIACHSKAEFDAHMTKAQEAGKLVVIDFTAAWCGPCRAIAPLFVEHAKKFTQVVFLKVDVDEVKEVTAAYEVEAMPTFHFVKNGKTVATIVGARKDELLALIEKHAAPAPATASA

SEQ ID NO: 52738 - protein, 102 aa, Glycine max
  peptide (1)..(102): Ceres Seq. ID no. 14309556
  misc_feature (1)..(92): Pfam Name: Thioredoxin Pfam Description: Thioredoxin
  misc_feature (1)..(102): Homolog of NCBI NO: 16588843 NR Description: thioredoxin H [Prunus persica]
  misc_feature (1)..(100): Homolog of NCBI NO: 11135312 NR Description: Thioredoxin H-type (TRX-H)
  misc_feature (1)..(98): Homolog of NCBI NO: 13624884 NR Description: thioredoxin h [Pisum sativum]
  misc_feature (1)..(94): Homolog of NCBI NO: 15230385 NR Description: thioredoxin H-type 1 (TRX-H-1) [Arabidopsis
  misc_feature (1)..(100): Homolog of NCBI NO: 33621084 NR Description: thioredoxin H3 [Ipomoea batatas]
  misc_feature (1)..(102): Homolog of NCBI NO: 40287476 NR Description: thioredoxin [Capsicum annuum]
  misc_feature (1)..(100): Homolog of NCBI NO: 267124 NR Description: Thioredoxin H-type 1 (TRX-H1)
  misc_feature (1)..(85): Homolog of NCBI NO: 32186040 NR Description: thioredoxin h isoform 1; HvTrxh1 [Hordeum vulgare
  misc_feature (1)..(85): Homolog of NCBI NO: 27461140 NR Description: thioredoxin H [Triticum aestivum]
  misc_feature (1)..(102): Homolog of NCBI NO: 3915131 NR Description: Thioredoxin H-type (TRX-H) (Phloem sap 13 kDa
MTKAQEAGKLVVIDFTAAWCGPCRAIAPLFVEHAKKFTQVVFLKVDVDEVKEVTAAYEVEAMPTFHFVKNGKTVATIVGARKDELLALIEKHAAPAPATASA

SEQ ID NO: 52739 - DNA, 1647 bp, Glycine max
  misc_feature (1)..(1647): Ceres Seq. ID no. 15177316
atctcctcttcctcctcaatcctacttaattgctttgtttctccttttaatttctatatatttctctctcttctggaaacaattactttaaggatgagtaaacaagacttgttgaaagttcagagctgtgttctcaaggttaatatccactgcgatggctgtgagcaaaaagtcaagaaactgctgcagaaaatcgatggggtttattctgtgagagtagatgcagatgaagggaaagtggtagtggcaggagatgtggatccagcgaaactggtaaaaaagctaaagaggggagggaagcatgctgagatatgccagaaccagaaaggaggaatgatgtgtaatcagattcagaactatcctatcaatccccaattccagaacatgcaacttggtattgggggaaaggacaacaataataatcacaagggtcagaaagagaaaggtactgctgcggctgctggtcaactagtacacttccctattcttaaaggggttcaggatctcaaggtacctgccaaggaacaaaagtctgtcaagttcaacttgccagaggaggatgaatttgatgccagtgatgatggttatgatgaggatggattaggccatggacatccaatgcagaacaagatcatgcccatgatgattaatcacaaccataaagacaattctggtgggagtaggaatattaatggaagtgttaagaaagctgacgtcattgatcaggcaatgctgttcaagggcaaaggtggaaatttcgatgaggcagaagctgacaatgatggaggaaagaaaggtagtagtagccaaaaagatgaaatcaagaagggggatttggataagcctaaggcagtcggtgaggtagattttcataagaaaaagaatgggaaaagtgagaatggattacttggtcggtttctaggctttgggaaaaagagcaagaaaggagaattagaagaaacaacttataccaataagagcaagaaccaaaacagtggtgctgaaaataagaaaggcaaggaagggaaattggaggatcatggtaacaatgactttgattttcatgattacgatgatacccctcctcatcccaaaaatggcaaaagtggtaagggtagtaacaatgtcaaagaaggccagatgggcccgggcccaataatgggtaataatcttccaatgcgtcatcagatggagaatattcaagcagtacaaggacttccggcgatgaatggtgatggtggctattatcaaggggtgcaaatgcaacatgctccatacaataaccttcagcagcactacatgggtatgatgatgaaccagcatcaacatcagcaagcaaatatgaacaacaacatgtacccaacacccatgatgtatggtaggccgcatccatctatgaactacatgccaccacctcctatgccatctcacccaattgccgatcctattactcataccttcagtgatgagaatgttgagagctgcagtatcatgtaattaattaattaattactagtgacaacttgcttttctgctctatgattcggtctttagggagttcattaaattttgtgtaggacggaaaatgtgggatgtttaggattatattattatattatatataaataaatagtatattgtttgcac

SEQ ID NO: 52740 - protein, 498 aa, Glycine max
  peptide (1)..(498): Ceres Seq. ID no. 15177317
  misc_feature (44)..(104): Pfam Name: Heavy-metal-associated domain Pfam Description: Heavy-metal-associated domain
  misc_feature (77)..(155): Homolog of NCBI NO: 6729032 NR Description: unknown protein [Arabidopsis thaliana]
  misc_feature (195)..(498): Homolog of NCBI NO: 6729032 NR Description: unknown protein [Arabidopsis thaliana]
  misc_feature (32)..(155): Homolog of NCBI NO: 15239643 NR Description: heavy-metal-associated domain-containing protein
  misc_feature (367)..(498): Homolog of NCBI NO: 15239643 NR Description: heavy-metal-associated domain-containing protein
  misc_feature (32)..(155): Homolog of NCBI NO: 30687142 NR Description: heavy-metal-associated domain-containing protein
  misc_feature (367)..(498): Homolog of NCBI NO: 30687142 NR Description: heavy-metal-associated domain-containing protein
  misc_feature (32)..(155): Homolog of NCBI NO: 18397481 NR Description: heavy-metal-associated domain-containing protein
  misc_feature (329)..(498): Homolog of NCBI NO: 18397481 NR Description: heavy-metal-associated domain-containing protein
  misc_feature (32)..(155): Homolog of NCBI NO: 30679432 NR Description: glycine-rich protein [Arabidopsis thaliana]
  misc_feature (195)..(498): Homolog of NCBI NO: 30679432 NR Description: glycine-rich protein [Arabidopsis thaliana]
ISSSSSILLNCFVSPFNFYIFLSLLETITLRMSKQDLLKVQSCVLKVNIHCDGCEQKVKKLLQKIDGVYSVRVDADEGKVVVAGDVDPAKLVKKLKRGGKHAEICQNQKGGMMCNQIQNYPINPQFQNMQLGIGGKDNNNNHKGQKEKGTAAAAGQLVHFPILKGVQDLKVPAKEQKSVKFNLPEEDEFDASDDGYDEDGLGHGHPMQNKIMPMMINHNHKDNSGGSRNINGSVKKADVIDQAMLFKGKGGNFDEAEADNDGGKKGSSSQKDEIKKGDLDKPKAVGEVDFHKKKNGKSENGLLGRFLGFGKKSKKGELEETTYTNKSKNQNSGAENKKGKEGKLEDHGNNDFDFHDYDDTPPHPKNGKSGKGSNNVKEGQMGPGPIMGNNLPMRHQMENIQAVQGLPAMNGDGGYYQGVQMQHAPYNNLQQHYMGMMMNQHQHQQANMNNNMYPTPMMYGRPHPSMNYMPPPPMPSHPIADPITHTFSDENVESCSIM

SEQ ID NO: 52741 - protein, 467 aa, Glycine max
  peptide (1)..(467): Ceres Seq. ID no. 15177318
  misc_feature (13)..(73): Pfam Name: Heavy-metal-associated domain Pfam Description: Heavy-metal-associated domain
  misc_feature (46)..(124): Homolog of NCBI NO: 6729032 NR Description: unknown protein [Arabidopsis thaliana]
  misc_feature (164)..(467): Homolog of NCBI NO: 6729032 NR Description: unknown protein [Arabidopsis thaliana]
  misc_feature (1)..(124): Homolog of NCBI NO: 15239643 NR Description: heavy-metal-associated domain-containing protein
  misc_feature (336)..(467): Homolog of NCBI NO: 15239643 NR Description: heavy-metal-associated domain-containing protein
  misc_feature (1)..(124): Homolog of NCBI NO: 30687142 NR Description: heavy-metal-associated domain-containing protein
  misc_feature (336)..(467): Homolog of NCBI NO: 30687142 NR Description: heavy-metal-associated domain-containing protein
  misc_feature (1)..(124): Homolog of NCBI NO: 18397481 NR Description: heavy-metal-associated domain-containing protein
  misc_feature (298)..(467): Homolog of NCBI NO: 18397481 NR Description: heavy-metal-associated domain-containing protein
  misc_feature (1)..(124): Homolog of NCBI NO: 30679432 NR Description: glycine-rich protein [Arabidopsis thaliana]
  misc_feature (164)..(467): Homolog of NCBI NO: 30679432 NR Description: glycine-rich protein [Arabidopsis thaliana]
MSKQDLLKVQSCVLKVNIHCDGCEQKVKKLLQKIDGVYSVRVDADEGKVVVAGDVDPAKLVKKLKRGGKHAEICQNQKGGMMCNQIQNYPINPQFQNMQLGIGGKDNNNNHKGQKEKGTAAAAGQLVHFPILKGVQDLKVPAKEQKSVKFNLPEEDEFDASDDGYDEDGLGHGHPMQNKIMPMMINHNHKDNSGGSRNINGSVKKADVIDQAMLFKGKGGNFDEAEADNDGGKKGSSSQKDEIKKGDLDKPKAVGEVDFHKKKNGKSENGLLGRFLGFGKKSKKGELEETTYTNKSKNQNSGAENKKGKEGKLEDHGNNDFDFHDYDDTPPHPKNGKSGKGSNNVKEGQMGPGPIMGNNLPMRHQMENIQAVQGLPAMNGDGGYYQGVQMQHAPYNNLQQHYMGMMMNQHQHQQANMNNNMYPTPMMYGRPHPSMNYMPPPPMPSHPIADPITHTFSDENVESCSIM

SEQ ID NO: 52742 - protein, 387 aa, Glycine max
  peptide (1)..(387): Ceres Seq. ID no. 15177319
  misc_feature (1)..(44): Homolog of NCBI NO: 6729032 NR Description: unknown protein [Arabidopsis thaliana]
  misc_feature (84)..(387): Homolog of NCBI NO: 6729032 NR Description: unknown protein [Arabidopsis thaliana]
  misc_feature (1)..(44): Homolog of NCBI NO: 15239643 NR Description: heavy-metal-associated domain-containing protein
  misc_feature (256)..(387): Homolog of NCBI NO: 15239643 NR Description: heavy-metal-associated domain-containing protein
  misc_feature (1)..(44): Homolog of NCBI NO: 30687142 NR Description: heavy-metal-associated domain-containing protein
  misc_feature (256)..(387): Homolog of NCBI NO: 30687142 NR Description: heavy-metal-associated domain-containing protein
  misc_feature (1)..(44): Homolog of NCBI NO: 18397481 NR Description: heavy-metal-associated domain-containing protein
  misc_feature (218)..(387): Homolog of NCBI NO: 18397481 NR Description: heavy-metal-associated domain-containing protein
  misc_feature (1)..(44): Homolog of NCBI NO: 30679432 NR Description: glycine-rich protein [Arabidopsis thaliana]
  misc_feature (84)..(387): Homolog of NCBI NO: 30679432 NR Description: glycine-rich protein [Arabidopsis thaliana]
MMCNQIQNYPINPQFQNMQLGIGGKDNNNNHKGQKEKGTAAAAGQLVHFPILKGVQDLKVPAKEQKSVKFNLPEEDEFDASDDGYDEDGLGHGHPMQNKIMPMMINHNHKDNSGGSRNINGSVKKADVIDQAMLFKGKGGNFDEAEADNDGGKKGSSSQKDEIKKGDLDKPKAVGEVDFHKKKNGKSENGLLGRFLGFGKKSKKGELEETTYTNKSKNQNSGAENKKGKEGKLEDHGNNDFDFHDYDDTPPHPKNGKSGKGSNNVKEGQMGPGPIMGNNLPMRHQMENIQAVQGLPAMNGDGGYYQGVQMQHAPYNNLQQHYMGMMMNQHQHQQANMNNNMYPTPMMYGRPHPSMNYMPPPPMPSHPIADPITHTFSDENVESCSIM

SEQ ID NO: 52743 - DNA, 1945 bp, Glycine max
  misc_feature (1)..(1945): Ceres Seq. ID no. 15177919
aaaaacttcgatacggaaaagaatgaagggtggcacggttcagattagctggcacgagagcaagcccgtcttaaccctcgatttccaccctctctccgccactctcgccaccgccggcgccgatttcgacatcaagttttggcaaataaaacccgcggggtcgccgaagaagcttcccgtagtttcctatcttagtaacctctattaccacagctctgcagtcaatgttattcgcttctcttcttccggggaattgctagcctctggtgctgatggaggggacttgataatatggaagctacattctactgatgctggacagacgtggaaggttctcaagatgttacgatctcatcacaaggacattctggacctgcagtggtctactgatgccacatatatcatttctggatcagttgataattgttgcattatatgggatgttaacaaaggaactaaccttcagacattggatgcccatgcacactatgttcagggggttgcatgggaccctctagggaaatatgttacttctcttagttctgataggacttgccgaatatacatgaataagcctcataaatcaaagggcattgagaaaatcaattatgtttgtcagcaagtcatttccaaggcagatcagccattattaaagaattccaaggagacaaaatttcatctcttccatgatgagacattgccatctttcttcagaagattagcatggtctcctgatggttcatttctacttgtgcccgcaggctcttacaaaattagtactgcatctgaatctgtgaatgcggcttacatattttctagaaaagatctttctaggcctgctatacagcttccctgtgcaagcaaagctgttgtagctgtccgattctgccccatattttttaaacttcgaggaacacactcagctgggttatttaagctcccatatcgcataatatttgctgtggccactttgaactcattgtacatttatgacactgagagcacctctccgatagccgtattagctggtcttcactatgccgcaataacagatattacctggtcatctgatgctcattatttggcattgtcatcacaagatggtttctgctctttggtggaatttgaaaatgacgagcttggatcaccttactcnttatcagaaggaaaagtctcaaacgaggatggtaagagcactgtacagacaaccaatgacactgtcactgtaccaactgaggatgttagtgcagttttagcagagagcaagaaaatggaatcagaagagaaggctgatgacatggtcattgaagcctctggcaatattgatgctgtcgtaacagaaagcggggaaactataacacaagagaaggatgagatgatcaagtcaactgggaatttagcagattttaggaaaaatgaagcagcagagaaagctattgacatggccattgaggcaaccgggaatgttgaaggggttatagcagatagtaggaaaaaggaggcggaagagaaaactgatggcatggtcattgaaacaactggaagtattggtgcagctgaattagatagaagaaaagctgaacaggaagataagacagagaaacagccagctaatctagattcagatggtaaacaaaaggaagcaaaggagaagacagagattctgcaatcaagtttagacggtataaaatcagggccacaattgttcagtccgaagagtacacccatttcaaataagccagccaagaagcgtattactcctatcgccattgatccatgatttttcaattcctgagaaattccttccacgcctgcctgtatacatctgttgtgcgccattttttggaagtcatatatttcctcctctctaatgtttttctcatatttttcgttgacagattctgtaatatagatttcaatataatatttagtgaaaacaatttcc

SEQ ID NO: 52744 - protein, 592 aa, Glycine max
  peptide (1)..(592): Ceres Seq. ID no. 15177920
  misc_feature (110)..(147): Pfam Name: WD domain, G-beta repeat Pfam Description: WD domain, G-beta repeat
  misc_feature (385)..(385): Xaa is any aa, unknown or other
KTSIRKRMKGGTVQISWHESKPVLTLDFHPLSATLATAGADFDIKFWQIKPAGSPKKLPVVSYLSNLYYHSSAVNVIRFSSSGELLASGADGGDLIIWKLHSTDAGQTWKVLKMLRSHHKDILDLQWSTDATYIISGSVDNCCIIWDVNKGTNLQTLDAHAHYVQGVAWDPLGKYVTSLSSDRTCRIYMNKPHKSKGIEKINYVCQQVISKADQPLLKNSKETKFHLFHDETLPSFFRRLAWSPDGSFLLVPAGSYKISTASESVNAAYIFSRKDLSRPAIQLPCASKAVVAVRFCPIFFKLRGTHSAGLFKLPYRIIFAVATLNSLYIYDTESTSPIAVLAGLHYAAITDITWSSDAHYLALSSQDGFCSLVEFENDELGSPYXLSEGKVSNEDGKSTVQTTNDTVTVPTEDVSAVLAESKKMESEEKADDMVIEASGNIDAVVTESGETITQEKDEMIKSTGNLADFRKNEAAEKAIDMAIEATGNVEGVIADSRKKEAEEKTDGMVIETTGSIGAAELDRRKAEQEDKTEKQPANLDSDGKQKEAKEKTEILQSSLDGIKSGPQLFSPKSTPISNKPAKKRITPIAIDP

SEQ ID NO: 52745 - protein, 585 aa, Glycine max
  peptide (1)..(585): Ceres Seq. ID no. 15177921
  misc_feature (103)..(140): Pfam Name: WD domain, G-beta repeat Pfam Description: WD domain, G-beta repeat
  misc_feature (378)..(378): Xaa is any aa, unknown or other
MKGGTVQISWHESKPVLTLDFHPLSATLATAGADFDIKFWQIKPAGSPKKLPVVSYLSNLYYHSSAVNVIRFSSSGELLASGADGGDLIIWKLHSTDAGQTWKVLKMLRSHHKDILDLQWSTDATYIISGSVDNCCIIWDVNKGTNLQTLDAHAHYVQGVAWDPLGKYVTSLSSDRTCRIYMNKPHKSKGIEKINYVCQQVISKADQPLLKNSKETKFHLFHDETLPSFFRRLAWSPDGSFLLVPAGSYKISTASESVNAAYIFSRKDLSRPAIQLPCASKAVVAVRFCPIFFKLRGTHSAGLFKLPYRIIFAVATLNSLYIYDTESTSPIAVLAGLHYAAITDITWSSDAHYLALSSQDGFCSLVEFENDELGSPYXLSEGKVSNEDGKSTVQTTNDTVTVPTEDVSAVLAESKKMESEEKADDMVIEASGNIDAVVTESGETITQEKDEMIKSTGNLADFRKNEAAEKAIDMAIEATGNVEGVIADSRKKEAEEKTDGMVIETTGSIGAAELDRRKAEQEDKTEKQPANLDSDGKQKEAKEKTEILQSSLDGIKSGPQLFSPKSTPISNKPAKKRITPIAIDP

SEQ ID NO: 52746 - protein, 479 aa, Glycine max
  peptide (1)..(479): Ceres Seq. ID no. 15177922
  misc_feature (1)..(34): Pfam Name: WD domain, G-beta repeat Pfam Description: WD domain, G-beta repeat
  misc_feature (272)..(272): Xaa is any aa, unknown or other
MLRSHHKDILDLQWSTDATYIISGSVDNCCIIWDVNKGTNLQTLDAHAHYVQGVAWDPLGKYVTSLSSDRTCRIYMNKPHKSKGIEKINYVCQQVISKADQPLLKNSKETKFHLFHDETLPSFFRRLAWSPDGSFLLVPAGSYKISTASESVNAAYIFSRKDLSRPAIQLPCASKAVVAVRFCPIFFKLRGTHSAGLFKLPYRIIFAVATLNSLYIYDTESTSPIAVLAGLHYAAITDITWSSDAHYLALSSQDGFCSLVEFENDELGSPYXLSEGKVSNEDGKSTVQTTNDTVTVPTEDVSAVLAESKKMESEEKADDMVIEASGNIDAVVTESGETITQEKDEMIKSTGNLADFRKNEAAEKAIDMAIEATGNVEGVIADSRKKEAEEKTDGMVIETTGSIGAAELDRRKAEQEDKTEKQPANLDSDGKQKEAKEKTEILQSSLDGIKSGPQLFSPKSTPISNKPAKKRITPIAIDP

SEQ ID NO: 52747 - DNA, 1296 bp, Glycine max
  misc_feature (1)..(1296): Ceres Seq. ID no. 15170760
ccccaccacacaccccaagcccccacctccattttttccagccaggtttgcagcgagaaggaacagcaaggctagctacacaagccgatggccaaggacgaggtgatggagaccggcggcggcggcgacttcgcggccaaggactacacggacccgccgccggccccgctgatcgacgcggccgagctggcctcctggtcgctctaccgcgccgtcatcgccgagttcatcgccacgctgctcttcctctacatcaccgtggccaccgtcatcgggtacaagcaccagacggacccggcggtgaacagcgccgccgacgcagcgtgcggcggcgtgggcgtgctcggcatcgcctgggccttcggcggcatgatcttcgtcctcgtctactgcaccgccggcatctccgggggccacatcaacccggccgtcaccttcggcctcttcctggcgcgcaaggtgtccctggtccgcgcgctgctctacatgattgcgcagtgcctcggcgccatgtgcggggtcggcctcgtcaagaccttccagagcgcctacttcgtcaggtacggcggcggcgccaacacgctcgccgccggctactccaagggcaccggcctcgctgcggagatcatcggcaccttcgtgctcgtctacaccgtcttctccgccaccgaccccaagcgcagcgcacgcgactctcacgtcccggtgctggcgcccctcccgatcggcttcgccgtgttcatggtccacctggccaccatccccatcaccgtcaccggcatcaacccggcccggagcctgggggccgccgtcatctacaacaaggacaaggcctgggatgatcagtggatcttctgggtcggccccatgatcggcgcggcgatcgcggccttctaccaccagtacatcctcagggccggcgccatcaaggccctcggctccttcaggagcaacgcgtaacaagttatcatccatgtcatctgtatgcaagactgaagcaatggcgacccgtgttgtgtccatccatccagagagaaatgcgcttttgcaacttctcgacagttcagttcggccgccgcaatggtcgtgttattatgtgtcggcagctgcatatgcgtagtacgtggtccggtcatgcgtgccgtgtcttgtaattcggtccatgggatcgcttgtcttaattagcccgcattgcttttcctacttgtatttaaatttagcgaccatatgtatgatcgatccaacgtcgccacctttctatctaagtcatcaatccaccaagcaagtgatcatccc

SEQ ID NO: 52748 - protein, 290 aa, Glycine max
  peptide (1)..(290): Ceres Seq. ID no. 15170761
  misc_feature (33)..(271): Pfam Name: Major intrinsic protein Pfam Description: Major intrinsic protein
  misc_feature (10)..(290): Homolog of NCBI NO: 17940746 NR Description: aquaporin-like protein [Petunia x hybrida]
  misc_feature (1)..(289): Homolog of NCBI NO: 7441245 NR Description: plasma membrane intrinsic protein BPW1 - barley
  misc_feature (1)..(290): Homolog of NCBI NO: 13447807 NR Description: plasma membrane integral protein ZmPIP2-4 [Zea
  misc_feature (1)..(290): Homolog of NCBI NO: 7381267 NR Description: plasma membrane intrinsic protein 1 [Triticum
  misc_feature (1)..(290): Homolog of NCBI NO: 13447805 NR Description: plasma membrane integral protein ZmPIP2-3 [Zea
  misc_feature (1)..(290): Homolog of NCBI NO: 7441249 NR Description: probable plasma membrane intrinsic protein - rice
  misc_feature (1)..(290): Homolog of NCBI NO: 34901270 NR Description: putative plasma membrane intrinsic protein
  misc_feature (1)..(290): Homolog of NCBI NO: 13447803 NR Description: plasma membrane integral protein ZmPIP2-2 [Zea
  misc_feature (1)..(290): Homolog of NCBI NO: 29650727 NR Description: aquaporin [Zea mays]
  misc_feature (1)..(290): Homolog of NCBI NO: 13447801 NR Description: plasma membrane integral protein ZmPIP2-1 [Zea
MAKDEVMETGGGGDFAAKDYTDPPPAPLIDAAELASWSLYRAVIAEFIATLLFLYITVATVIGYKHQTDPAVNSAADAACGGVGVLGIAWAFGGMIFVLVYCTAGISGGHINPAVTFGLFLARKVSLVRALLYMIAQCLGAMCGVGLVKTFQSAYFVRYGGGANTLAAGYSKGTGLAAEIIGTFVLVYTVFSATDPKRSARDSHVPVLAPLPIGFAVFMVHLATIPITVTGINPARSLGAAVIYNKDKAWDDQWIFWVGPMIGAAIAAFYHQYILRAGAIKALGSFRSNA

SEQ ID NO: 52749 - protein, 284 aa, Glycine max
  peptide (1)..(284): Ceres Seq. ID no. 15170762
  misc_feature (27)..(265): Pfam Name: Major intrinsic protein Pfam Description: Major intrinsic protein
  misc_feature (4)..(284): Homolog of NCBI NO: 17940746 NR Description: aquaporin-like protein [Petunia x hybrida]
  misc_feature (1)..(283): Homolog of NCBI NO: 7441245 NR Description: plasma membrane intrinsic protein BPW1 - barley
  misc_feature (1)..(284): Homolog of NCBI NO: 13447807 NR Description: plasma membrane integral protein ZmPIP2-4 [Zea
  misc_feature (1)..(284): Homolog of NCBI NO: 7381267 NR Description: plasma membrane intrinsic protein 1 [Triticum
  misc_feature (1)..(284): Homolog of NCBI NO: 13447805 NR Description: plasma membrane integral protein ZmPIP2-3 [Zea
  misc_feature (1)..(284): Homolog of NCBI NO: 7441249 NR Description: probable plasma membrane intrinsic protein - rice
  misc_feature (1)..(284): Homolog of NCBI NO: 34901270 NR Description: putative plasma membrane intrinsic protein
  misc_feature (1)..(284): Homolog of NCBI NO: 13447803 NR Description: plasma membrane integral protein ZmPIP2-2 [Zea
  misc_feature (1)..(284): Homolog of NCBI NO: 29650727 NR Description: aquaporin [Zea mays]
  misc_feature (1)..(284): Homolog of NCBI NO: 13447801 NR Description: plasma membrane integral protein ZmPIP2-1 [Zea
METGGGGDFAAKDYTDPPPAPLIDAAELASWSLYRAVIAEFIATLLFLYITVATVIGYKHQTDPAVNSAADAACGGVGVLGIAWAFGGMIFVLVYCTAGISGGHINPAVTFGLFLARKVSLVRALLYMIAQCLGAMCGVGLVKTFQSAYFVRYGGGANTLAAGYSKGTGLAAEIIGTFVLVYTVFSATDPKRSARDSHVPVLAPLPIGFAVFMVHLATIPITVTGINPARSLGAAVIYNKDKAWDDQWIFWVGPMIGAAIAAFYHQYILRAGAIKALGSFRSNA

SEQ ID NO: 52750 - protein, 279 aa, Glycine max
  peptide (1)..(279): Ceres Seq. ID no. 15170763
PPHTPSPHLHFFQPGLQREGTARLATQADGQGRGDGDRRRRRLRGQGLHGPAAGPADRRGRAGLLVALPRRHRRVHRHAALPLHHRGHRHRVQAPDGPGGEQRRRRSVRRRGRARHRLGLRRHDLRPRLLHRRHLRGPHQPGRHLRPLPGAQGVPGPRAALHDCAVPRRHVRGRPRQDLPERLLRQVRRRRQHARRRLLQGHRPRCGDHRHLRARLHRLLRHRPQAQRTRLSRPGAGAPPDRLRRVHGPPGHHPHHRHRHQPGPEPGGRRHLQQGQGLG

SEQ ID NO: 52751 - DNA, 943 bp, Glycine max
  misc_feature (1)..(943): Ceres Seq. ID no. 14309549
attcaagttatcactttcctgaattgagtgtaacaggatcattttttttgttatcttatataaaggtcctcaaggaaggtattgtactgagatgactgagacaagggttaatactctcatggtcacgagttccggcaattatggcatgttgcacaacaacaaaattcatttgaattgccaattccttggtctcgggcattccatcaaggaacatggtaggtttgggttagtgtgctcttcatcacttagtggtggtggtaataagatgaaacttagagtgaagaagaaggggaagcaaagttcttcaccaaccatgatggtagctctcaatgagggtcatgaggtcatctctgaggagtccactaccgtgaagctctcggctctggtggctgtgaggaatagtaaagataataacaaggtgtttgcaaatgagatagtgaataaccttctaaccattttctggcctcaaaaccagaccaaaggtgttgttcttcaacttgttagcacacagcttgatcccaggagaatggaagcaaagttgagcaagaaaaccgttttggagttatccgaagaccataaagttgatgagaagggaagaatcagcacctataaagttgaattcattgtggactctgattttgggatccctggtgctgttaccgtggttaacggctttgacaatgagttcttcttggaaagcataaccatggcacaaaatgttcattttgcttgcaaatcttgggttcaaccaaacaagcttgacccagagaagagaattttcttcgttaacaaggtaattaatatacatgcatggtttgttgactcaactgaattttagcaaaattaactagtgtgaggtttggatgtgatgatcatctcttgtaaataggtttggggtaccctatgtgccctatacattttaatagatatctttttcctgatt

SEQ ID NO: 52752 - protein, 248 aa, Glycine max
  peptide (1)..(248): Ceres Seq. ID no. 14309550
  misc_feature (132)..(230): Pfam Name: PLAT/LH2 domain Pfam Description: PLAT/LH2 domain
  misc_feature (130)..(234): Homolog of NCBI NO: 38344820 NR Description: OSJNBa0064H22.1 [Oryza sativa (japonica
  misc_feature (130)..(234): Homolog of NCBI NO: 28911945 NR Description: lipoxygenase [Nicotiana attenuata]
  misc_feature (88)..(234): Homolog of NCBI NO: 18394479 NR Description: lipoxygenase (LOX), putative [Arabidopsis
  misc_feature (88)..(234): Homolog of NCBI NO: 9665131 NR Description: lipoxygenase [Arabidopsis thaliana]
  misc_feature (88)..(234): Homolog of NCBI NO: 6002055 NR Description: lipoxygenase [Arabidopsis thaliana]
  misc_feature (77)..(234): Homolog of NCBI NO: 15218506 NR Description: lipoxygenase (LOX), putative [Arabidopsis
  misc_feature (85)..(234): Homolog of NCBI NO: 14589309 NR Description: lipoxygenase [Sesbania rostrata]
  misc_feature (58)..(234): Homolog of NCBI NO: 32454714 NR Description: lipoxygenase [Nicotiana attenuata]
  misc_feature (58)..(234): Homolog of NCBI NO: 7433165 NR Description: lipoxygenase (EC 1.13.11.12) loxD - tomato
  misc_feature (19)..(234): Homolog of NCBI NO: 7433167 NR Description: probable lipoxygenase (EC 1.13.11.12) (clone H3)
MTETRVNTLMVTSSGNYGMLHNNKIHLNCQFLGLGHSIKEHGRFGLVCSSSLSGGGNKMKLRVKKKGKQSSSPTMMVALNEGHEVISEESTTVKLSALVAVRNSKDNNKVFANEIVNNLLTIFWPQNQTKGVVLQLVSTQLDPRRMEAKLSKKTVLELSEDHKVDEKGRISTYKVEFIVDSDFGIPGAVTVVNGFDNEFFLESITMAQNVHFACKSWVQPNKLDPEKRIFFVNKVINIHAWFVDSTEF

SEQ ID NO: 52753 - protein, 239 aa, Glycine max
  peptide (1)..(239): Ceres Seq. ID no. 14309551
  misc_feature (123)..(221): Pfam Name: PLAT/LH2 domain Pfam Description: PLAT/LH2 domain
  misc_feature (121)..(225): Homolog of NCBI NO: 38344820 NR Description: OSJNBa0064H22.1 [Oryza sativa (japonica
  misc_feature (121)..(225): Homolog of NCBI NO: 28911945 NR Description: lipoxygenase [Nicotiana attenuata]
  misc_feature (79)..(225): Homolog of NCBI NO: 9665131 NR Description: lipoxygenase [Arabidopsis thaliana]
  misc_feature (79)..(225): Homolog of NCBI NO: 18394479 NR Description: lipoxygenase (LOX), putative [Arabidopsis
  misc_feature (79)..(225): Homolog of NCBI NO: 6002055 NR Description: lipoxygenase [Arabidopsis thaliana]
  misc_feature (68)..(225): Homolog of NCBI NO: 15218506 NR Description: lipoxygenase (LOX), putative [Arabidopsis
  misc_feature (76)..(225): Homolog of NCBI NO: 14589309 NR Description: lipoxygenase [Sesbania rostrata]
  misc_feature (49)..(225): Homolog of NCBI NO: 32454714 NR Description: lipoxygenase [Nicotiana attenuata]
  misc_feature (49)..(225): Homolog of NCBI NO: 7433165 NR Description: lipoxygenase (EC 1.13.11.12) loxD - tomato
  misc_feature (10)..(225): Homolog of NCBI NO: 7433167 NR Description: probable lipoxygenase (EC 1.13.11.12) (clone H3)
MVTSSGNYGMLHNNKIHLNCQFLGLGHSIKEHGRFGLVCSSSLSGGGNKMKLRVKKKGKQSSSPTMMVALNEGHEVISEESTTVKLSALVAVRNSKDNNKVFANEIVNNLLTIFWPQNQTKGVVLQLVSTQLDPRRMEAKLSKKTVLELSEDHKVDEKGRISTYKVEFIVDSDFGIPGAVTVVNGFDNEFFLESITMAQNVHFACKSWVQPNKLDPEKRIFFVNKVINIHAWFVDSTEF

SEQ ID NO: 52754 - protein, 230 aa, Glycine max
  peptide (1)..(230): Ceres Seq. ID no. 14309552
  misc_feature (114)..(212): Pfam Name: PLAT/LH2 domain Pfam Description: PLAT/LH2 domain
  misc_feature (112)..(216): Homolog of NCBI NO: 38344820 NR Description: OSJNBa0064H22.1 [Oryza sativa (japonica
  misc_feature (112)..(216): Homolog of NCBI NO: 28911945 NR Description: lipoxygenase [Nicotiana attenuata]
  misc_feature (70)..(216): Homolog of NCBI NO: 9665131 NR Description: lipoxygenase [Arabidopsis thaliana]
  misc_feature (70)..(216): Homolog of NCBI NO: 18394479 NR Description: lipoxygenase (LOX), putative [Arabidopsis
  misc_feature (70)..(216): Homolog of NCBI NO: 6002055 NR Description: lipoxygenase [Arabidopsis thaliana]
  misc_feature (59)..(216): Homolog of NCBI NO: 15218506 NR Description: lipoxygenase (LOX), putative [Arabidopsis
  misc_feature (67)..(216): Homolog of NCBI NO: 14589309 NR Description: lipoxygenase [Sesbania rostrata]
  misc_feature (40)..(216): Homolog of NCBI NO: 32454714 NR Description: lipoxygenase [Nicotiana attenuata]
  misc_feature (40)..(216): Homolog of NCBI NO: 7433165 NR Description: lipoxygenase (EC 1.13.11.12) loxD - tomato
  misc_feature (1)..(216): Homolog of NCBI NO: 7433167 NR Description: probable lipoxygenase (EC 1.13.11.12) (clone H3)
MLHNNKIHLNCQFLGLGHSIKEHGRFGLVCSSSLSGGGNKMKLRVKKKGKQSSSPTMMVALNEGHEVISEESTTVKLSALVAVRNSKDNNKVFANEIVNNLLTIFWPQNQTKGVVLQLVSTQLDPRRMEAKLSKKTVLELSEDHKVDEKGRISTYKVEFIVDSDFGIPGAVTVVNGFDNEFFLESITMAQNVHFACKSWVQPNKLDPEKRIFFVNKVINIHAWFVDSTEF

SEQ ID NO: 52755 - DNA, 908 bp, Glycine max
  misc_feature (1)..(908): Ceres Seq. ID no. 14309488
acacacttcttccacgcttcctcccccgagctacgacgacgactagccagccagctactcctccgcgcgcaagccagcggcgaagctcgtgaactctcccggtgcccagacatggcggcaagaaggctcctcgaggaggcggtcgccgccggcgcgcagcaggactcgctcaactcggacctggtcctcatcctcgccggcctgctctgcgcgctggtctgcgtcctcggcctcggcctcgtggcgcggtgcgcgtgctcgcgccactgggccagggccgcagacgccccgcccggcgccaacaggggcgtcaagaaggaggtgctgcgcgccctgcccaccgtcaggtacgtcgccgacggcggcgaggcgtcggaatcggacgagtgcgccatctgcctcgccgagttcgaggacggccaggacatgcgggtgctgccgcagtgcagccacgcgttccacacggcctgcgtcgacgcctggctgcgctcgcactcctcgtgcccgtcgtgccggcgggtgctcgtcgccgagctgccgcgcggcgagcggagcggacgctgcggcgcgcggcccggcggcctcgacgcgctcctcaaggccgtgccgctgtgccgctgacgtcgctgtagctcggcattagtggcgtgcgcactctggacaaaaggccaagggaaaagtgtgtcgagggaaattagccggtgcataagctcatcggttagcttcttatttacctttctcttggcttgggggcctgctgggtgttgattctttttaggtgtggctactctggaaatgggaaccattgagcatgaaggcgtgtgtatatacatagttgatggggggatttgtgattgtaacctatttgtacatatgtggaagttgctataaaaacatgcacttgctgg

SEQ ID NO: 52756 - protein, 206 aa, Glycine max
  peptide (1)..(206): Ceres Seq. ID no. 14309489
  misc_feature (130)..(171): Pfam Name: Zinc finger, C3HC4 type (RING finger) Pfam Description: Zinc finger, C3HC4 type (RING finger)
  misc_feature (51)..(176): Homolog of NCBI NO: 15241087 NR Description: expressed protein [Arabidopsis thaliana]
  misc_feature (42)..(186): Homolog of NCBI NO: 15239062 NR Description: RING zinc finger protein-related [Arabidopsis
  misc_feature (57)..(100): Homolog of NCBI NO: 37536508 NR Description: putative ring finger protein
  misc_feature (100)..(190): Homolog of NCBI NO: 37536508 NR Description: putative ring finger protein
  misc_feature (50)..(182): Homolog of NCBI NO: 7489432 NR Description: probable ring finger protein - barley
  misc_feature (42)..(189): Homolog of NCBI NO: 15227839 NR Description: RING zinc finger protein -related [Arabidopsis
  misc_feature (41)..(203): Homolog of NCBI NO: 15218042 NR Description: RING zinc finger protein -related [Arabidopsis
  misc_feature (42)..(193): Homolog of NCBI NO: 21555237 NR Description: putative RING zinc finger protein [Arabidopsis
  misc_feature (42)..(193): Homolog of NCBI NO: 15223041 NR Description: RING zinc finger protein -related [Arabidopsis
  misc_feature (38)..(192): Homolog of NCBI NO: 32487554 NR Description: OSJNBa0013K16.6 [Oryza sativa (japonica
THFFHASSPELRRRLASQLLLRAQASGEARELSRCPDMAARRLLEEAVAAGAQQDSLNSDLVLILAGLLCALVCVLGLGLVARCACSRHWARAADAPPGANRGVKKEVLRALPTVRYVADGGEASESDECAICLAEFEDGQDMRVLPQCSHAFHTACVDAWLRSHSSCPSCRRVLVAELPRGERSGRCGARPGGLDALLKAVPLCR

SEQ ID NO: 52757 - protein, 169 aa, Glycine max
  peptide (1)..(169): Ceres Seq. ID no. 14309490
  misc_feature (93)..(134): Pfam Name: Zinc finger, C3HC4 type (RING finger) Pfam Description: Zinc finger, C3HC4 type (RING finger)
  misc_feature (14)..(139): Homolog of NCBI NO: 15241087 NR Description: expressed protein [Arabidopsis thaliana]
  misc_feature (5)..(149): Homolog of NCBI NO: 15239062 NR Description: RING zinc finger protein-related [Arabidopsis
  misc_feature (20)..(63): Homolog of NCBI NO: 37536508 NR Description: putative ring finger protein
  misc_feature (63)..(153): Homolog of NCBI NO: 37536508 NR Description: putative ring finger protein
  misc_feature (13)..(145): Homolog of NCBI NO: 7489432 NR Description: probable ring finger protein - barley
  misc_feature (5)..(152): Homolog of NCBI NO: 15227839 NR Description: RING zinc finger protein -related [Arabidopsis
  misc_feature (4)..(166): Homolog of NCBI NO: 15218042 NR Description: RING zinc finger protein -related [Arabidopsis
  misc_feature (5)..(156): Homolog of NCBI NO: 21555237 NR Description: putative RING zinc finger protein [Arabidopsis
  misc_feature (5)..(156): Homolog of NCBI NO: 15223041 NR Description: RING zinc finger protein -related [Arabidopsis
  misc_feature (1)..(155): Homolog of NCBI NO: 32487554 NR Description: OSJNBa0013K16.6 [Oryza sativa (japonica
MAARRLLEEAVAAGAQQDSLNSDLVLILAGLLCALVCVLGLGLVARCACSRHWARAADAPPGANRGVKKEVLRALPTVRYVADGGEASESDECAICLAEFEDGQDMRVLPQCSHAFHTACVDAWLRSHSSCPSCRRVLVAELPRGERSGRCGARPGGLDALLKAVPLCR

SEQ ID NO: 52758 - DNA, 828 bp, Glycine max
  misc_feature (1)..(828): Ceres Seq. ID no. 15170822
gaagattagcaggccgcctgcgctccttgcccctaagcctcgtttccggtgtacgactccaacgacgacgagatggcgctccgtcggagcttcccctccctcggccgcgcgcttctcacgccggcgccggcgccggcgcggacgctctccgcggaggcctccgatgccctcgttgagatcaagcccggggagattgggatggtctccggcatccccgaggagcacctccgccgtaaggttgtaatttattcaccagctaggactgcatctcagcaaggttcaggcaaagttgggaggtggaaaattaactttttgtcaacccaaaagtgggagaacccgttgatgggatggacatctactggggatccatatgctaatgtcggtgaagcaggacttacattcaacagtgcggagtcagcaaaagcatttgctgaaaaacatggatggaattatgtggtacggaaacggcatacacctcttctgaagcctaaggcctacgctgagaacttcaagtggaaaggccccccgaaggcggagcaagcataagacctccagcagcatgtgaccctgacactggaatgatgttattttcctcctgagctctagagtctagacctcttgtccgtgagcctggcattgggacggtgttgttttcttcctggacagccttttctttcaacagtgtccgtggtgaaagtacgagctagaatatgcatctatcaaacttgtaataagcatggtctgcaatcaaacaaaattagtgtccttcgaaaacgtttgttccttgatgacattgtatctcaatactgtatgcttccttggccggtg

SEQ ID NO: 52759 - protein, 157 aa, Glycine max
  peptide (1)..(157): Ceres Seq. ID no. 15170823
  misc_feature (54)..(138): Pfam Name: ETC complex I subunit conserved region Pfam Description: ETC complex I subunit conserved region
  misc_feature (1)..(148): Homolog of NCBI NO: 18860539 NR Description: CG12203-PA [Drosophila melanogaster]
  misc_feature (40)..(148): Homolog of NCBI NO: 31199457 NR Description: ENSANGP00000021474 [Anopheles gambiae]
  misc_feature (40)..(148): Homolog of NCBI NO: 13528960 NR Description: NADH dehydrogenase (ubiquinone) Fe-S protein 4
  misc_feature (40)..(148): Homolog of NCBI NO: 6754814 NR Description: NADH dehydrogenase (ubiquinone) Fe-S protein 4
  misc_feature (40)..(148): Homolog of NCBI NO: 4505369 NR Description: NADH dehydrogenase (ubiquinone) Fe-S protein 4,
  misc_feature (40)..(148): Homolog of NCBI NO: 28461229 NR Description: NADH dehydrogenase (ubiquinone) Fe-S protein 4,
  misc_feature (40)..(148): Homolog of NCBI NO: 19110803 NR Description: NADH dehydrogenase [Gallus gallus]
  misc_feature (29)..(155): Homolog of NCBI NO: 21555571 NR Description: unknown [Arabidopsis thaliana]
  misc_feature (29)..(155): Homolog of NCBI NO: 15240784 NR Description: expressed protein [Arabidopsis thaliana]
  misc_feature (3)..(138): Homolog of NCBI NO: 34901114 NR Description: NADH-ubiquinone oxidoreductase 18 kDa subunit, precursor-like protein~contains ESTs
MALRRSFPSLGRALLTPAPAPARTLSAEASDALVEIKPGEIGMVSGIPEEHLRRKVVIYSPARTASQQGSGKVGRWKINFLSTQKWENPLMGWTSTGDPYANVGEAGLTFNSAESAKAFAEKHGWNYVVRKRHTPLLKPKAYAENFKWKGPPKAEQA

SEQ ID NO: 52760 - protein, 115 aa, Glycine max
  peptide (1)..(115): Ceres Seq. ID no. 15170824
  misc_feature (12)..(96): Pfam Name: ETC complex I subunit conserved region Pfam Description: ETC complex I subunit conserved region
  misc_feature (1)..(106): Homolog of NCBI NO: 18860539 NR Description: CG12203-PA [Drosophila melanogaster]
  misc_feature (1)..(106): Homolog of NCBI NO: 31199457 NR Description: ENSANGP00000021474 [Anopheles gambiae]
  misc_feature (1)..(106): Homolog of NCBI NO: 6754814 NR Description: NADH dehydrogenase (ubiquinone) Fe-S protein 4
  misc_feature (1)..(106): Homolog of NCBI NO: 13528960 NR Description: NADH dehydrogenase (ubiquinone) Fe-S protein 4
  misc_feature (1)..(106): Homolog of NCBI NO: 4505369 NR Description: NADH dehydrogenase (ubiquinone) Fe-S protein 4,
  misc_feature (1)..(106): Homolog of NCBI NO: 28461229 NR Description: NADH dehydrogenase (ubiquinone) Fe-S protein 4,
  misc_feature (1)..(106): Homolog of NCBI NO: 19110803 NR Description: NADH dehydrogenase [Gallus gallus]
  misc_feature (1)..(113): Homolog of NCBI NO: 21555571 NR Description: unknown [Arabidopsis thaliana]
  misc_feature (1)..(113): Homolog of NCBI NO: 15240784 NR Description: expressed protein [Arabidopsis thaliana]
  misc_feature (1)..(96): Homolog of NCBI NO: 34901114 NR Description: NADH-ubiquinone oxidoreductase 18 kDa subunit, precursor-like protein~contains ESTs
MVSGIPEEHLRRKVVIYSPARTASQQGSGKVGRWKINFLSTQKWENPLMGWTSTGDPYANVGEAGLTFNSAESAKAFAEKHGWNYVVRKRHTPLLKPKAYAENFKWKGPPKAEQA

SEQ ID NO: 52761 - protein, 80 aa, Glycine max
  peptide (1)..(80): Ceres Seq. ID no. 15170825
KISRPPALLAPKPRFRCTTPTTTRWRSVGASPPSAARFSRRRRRRRGRSPRRPPMPSLRSSPGRLGWSPASPRSTSAVRL

SEQ ID NO: 52762 - DNA, 1233 bp, Glycine max
  misc_feature (1)..(1233): Ceres Seq. ID no. 15177312
gatgaaaggcatgttctacacttgttctacttatacgttatctttacatatcagtgtaaagaaatcatgatttgttcctaattaaacctctcaatttaaatatctccctcctttcccatcccacactcccccaccgtttaccgtataggccatcaatctcttcttcttcttcttcttcttcttcttcttccataatggacccttgtccttcatccaacacgaacaccgtgaacgggttctacacgttcgtgagccggggaatggaggagctggagcgagccttcttagccaacaacagcttcatctccctccagttcctccagaaggtcctctccctcctccgttccctccacacccaactcaccctcctcgtccacaagctccacctccccctcggcgacaagtggctcgacgagtacatggacgagacctccaagctctgggagacctctcacctcctcaaatccgccatctccaacttcgaacctttctactcccagggcttcaaccttctctcctccctcgactcatcccacccccaggtagtgagggctatatcagggtgcagaagggaggctttgggtttggaggagcagaaccgcgctctgatggagactcgggtccacacgctgtgtctgcgtctggacgagagggtatccgtggagtccaagctcaacggcttcaacggcttcaggggcgttctctacgcaatgaggaacgtgagttcgatgcttttaatgatcctgctgcacggtttagtgtactgctggccggagacctcggagttggtctcgggagggtacgagggggggaggatgttcctgggatcggcggcgaggctaaggcagagggtggccgcggagatgcgcggcgccgccgggccggggattttgctttacgagtttaggagggctagggtggctgtggaggagctgagaggggaattggaggaggcggagggtggtgttagggagagagtggagagtgttagggtgtgttttggggtgctcagatctggggctgagaacattgtttgccagcttgatgatttctttgatgagattgtcgaggggaggaagaaactcttggatttttgcagtcataggtaaataaatggtagtaaatagtttttagaaagaagaaaaaaaatgttctcctttcttgtttgatcgattaaagaggggcatgtagttgaaaaaaaaaatgaaaagctaaaatgtttttcctttgtgc

SEQ ID NO: 52763 - protein, 304 aa, Glycine max
  peptide (1)..(304): Ceres Seq. ID no. 15177313
  misc_feature (119)..(303): Homolog of NCBI NO: 34907302 NR Description: hypothetical protein~similar to Arabidopsis
  misc_feature (12)..(229): Homolog of NCBI NO: 34907302 NR Description: hypothetical protein~similar to Arabidopsis
  misc_feature (7)..(263): Homolog of NCBI NO: 22330710 NR Description: hypothetical protein [Arabidopsis thaliana]
  misc_feature (1)..(114): Homolog of NCBI NO: 6573780 NR Description: F28K19.7 [Arabidopsis thaliana]
  misc_feature (116)..(304): Homolog of NCBI NO: 6573780 NR Description: F28K19.7 [Arabidopsis thaliana]
  misc_feature (248)..(304): Homolog of NCBI NO: 18395063 NR Description: expressed protein [Arabidopsis thaliana]
  misc_feature (1)..(252): Homolog of NCBI NO: 18395063 NR Description: expressed protein [Arabidopsis thaliana]
  misc_feature (248)..(304): Homolog of NCBI NO: 21593454 NR Description: unknown [Arabidopsis thaliana]
  misc_feature (1)..(252): Homolog of NCBI NO: 21593454 NR Description: unknown [Arabidopsis thaliana]
MDPCPSSNTNTVNGFYTFVSRGMEELERAFLANNSFISLQFLQKVLSLLRSLHTQLTLLVHKLHLPLGDKWLDEYMDETSKLWETSHLLKSAISNFEPFYSQGFNLLSSLDSSHPQVVRAISGCRREALGLEEQNRALMETRVHTLCLRLDERVSVESKLNGFNGFRGVLYAMRNVSSMLLMILLHGLVYCWPETSELVSGGYEGGRMFLGSAARLRQRVAAEMRGAAGPGILLYEFRRARVAVEELRGELEEAEGGVRERVESVRVCFGVLRSGAENIVCQLDDFFDEIVEGRKKLLDFCSHR

SEQ ID NO: 52764 - protein, 282 aa, Glycine max
  peptide (1)..(282): Ceres Seq. ID no. 15177314
  misc_feature (97)..(281): Homolog of NCBI NO: 34907302 NR Description: hypothetical protein~similar to Arabidopsis
  misc_feature (1)..(207): Homolog of NCBI NO: 34907302 NR Description: hypothetical protein~similar to Arabidopsis
  misc_feature (1)..(241): Homolog of NCBI NO: 22330710 NR Description: hypothetical protein [Arabidopsis thaliana]
  misc_feature (1)..(92): Homolog of NCBI NO: 6573780 NR Description: F28K19.7 [Arabidopsis thaliana]
  misc_feature (94)..(282): Homolog of NCBI NO: 6573780 NR Description: F28K19.7 [Arabidopsis thaliana]
  misc_feature (226)..(282): Homolog of NCBI NO: 18395063 NR Description: expressed protein [Arabidopsis thaliana]
  misc_feature (1)..(230): Homolog of NCBI NO: 18395063 NR Description: expressed protein [Arabidopsis thaliana]
  misc_feature (226)..(282): Homolog of NCBI NO: 21593454 NR Description: unknown [Arabidopsis thaliana]
  misc_feature (1)..(230): Homolog of NCBI NO: 21593454 NR Description: unknown [Arabidopsis thaliana]
MEELERAFLANNSFISLQFLQKVLSLLRSLHTQLTLLVHKLHLPLGDKWLDEYMDETSKLWETSHLLKSAISNFEPFYSQGFNLLSSLDSSHPQVVRAISGCRREALGLEEQNRALMETRVHTLCLRLDERVSVESKLNGFNGFRGVLYAMRNVSSMLLMILLHGLVYCWPETSELVSGGYEGGRMFLGSAARLRQRVAAEMRGAAGPGILLYEFRRARVAVEELRGELEEAEGGVRERVESVRVCFGVLRSGAENIVCQLDDFFDEIVEGRKKLLDFCSHR

SEQ ID NO: 52765 - protein, 229 aa, Glycine max
  peptide (1)..(229): Ceres Seq. ID no. 15177315
  misc_feature (44)..(228): Homolog of NCBI NO: 34907302 NR Description: hypothetical protein~similar to Arabidopsis
  misc_feature (1)..(154): Homolog of NCBI NO: 34907302 NR Description: hypothetical protein~similar to Arabidopsis
  misc_feature (1)..(188): Homolog of NCBI NO: 22330710 NR Description: hypothetical protein [Arabidopsis thaliana]
  misc_feature (1)..(39): Homolog of NCBI NO: 6573780 NR Description: F28K19.7 [Arabidopsis thaliana]
  misc_feature (41)..(229): Homolog of NCBI NO: 6573780 NR Description: F28K19.7 [Arabidopsis thaliana]
  misc_feature (173)..(229): Homolog of NCBI NO: 18395063 NR Description: expressed protein [Arabidopsis thaliana]
  misc_feature (1)..(177): Homolog of NCBI NO: 18395063 NR Description: expressed protein [Arabidopsis thaliana]
  misc_feature (173)..(229): Homolog of NCBI NO: 21593454 NR Description: unknown [Arabidopsis thaliana]
  misc_feature (1)..(177): Homolog of NCBI NO: 21593454 NR Description: unknown [Arabidopsis thaliana]
MDETSKLWETSHLLKSAISNFEPFYSQGFNLLSSLDSSHPQVVRAISGCRREALGLEEQNRALMETRVHTLCLRLDERVSVESKLNGFNGFRGVLYAMRNVSSMLLMILLHGLVYCWPETSELVSGGYEGGRMFLGSAARLRQRVAAEMRGAAGPGILLYEFRRARVAVEELRGELEEAEGGVRERVESVRVCFGVLRSGAENIVCQLDDFFDEIVEGRKKLLDFCSHR

SEQ ID NO: 52766 - DNA, 1598 bp, Glycine max
  misc_feature (1)..(1598): Ceres Seq. ID no. 15170497
taatttgtgactctctttcgtttctcatcagagacttacacagtccaatttccaaaccgaatcgagtttaaatttgaatttcattttcaacttccctgtgatgccttacacggtccgagagaacctctcgatcgggaacatcggcgacgcggcggagattctcgaaaacggcgccgctcagagcgtgacgcacatcctctccgtcctcagctccgcctctatctccttcttctccgaatggaaaaccactctctccatccccgccatggagatcaccaaagtccacgtggcggacgccgccgccaaatcggctctcccgccggagaagctcctctactcgctcgagtacgccggccgcgacctcaagctcgtgcgcatggccgtgcctctcagagacaccgagaaagatgacttgctcgattacttggaagtctgcatcgatttcattgatcgcggtcggaaggaaggttccgttctcgttcactgtttcgccggagtttccagaagcgcggcgattattacggcgtatttgatgagaaccgaacgtctatctgtagaagatgcccttgaatcgttgaggcagagctgtgaatttgtttgtcccaatgatggttttcttgagcagttgaaaatgtttgaggggatgggtttcaaggttgatcactccagccctatatacaagcgctttcgtctaaaaatactatatgaaaatcatttctcagggttgaggatagacagttccaaacttggtgcagatcctggcatgcctgttgaaatttcttcagaggcagaagaaactactaaagttgaaaataatcatagtcctacatatcgctgtaagaagtgccgacgacttgttgcattgcaagaacatgtcatagaccatgttcctggtgagggtgagagagcctttgagttccacaaacggagaggtggcaaccctttcaacaaatctgatgaatttgagtgttcatctgtatttattgagcctctacggtggatgaaagctgttgaggaaggtgcaatggagggaaagctgtcctgtgctcattgtgatgcccgtttgggatacttcaattggtcaggcatacaatgcagctgcggaagctggataactccagcttttcaactccacaaaagctggatagatgtgagtcccatgtaatcattgttgcgccattttatgcctaagggatgccactgccaaattctttgtcattgtttttggacttatattctgctcaaattctccaagctggtccactgccaacaatgaagttgtggaaggaaggaatggagtcttgctcttttgacatgctcaagttttccaggctgaactaatgcagttatatggaagggaggattattatagttttacactttttgtgcttcttccagaatgactttttggagctgtgattgtagattattactgctttctagtaaatggtgaagcatgagttaggattccaatattagggcttgttccctcgatgattctaccgtaagcaaccataatatttgtttcgtcaaaagaaaatgagtgttctccattgtaccttcttctattattctcaatatacaaatttttttcttac

SEQ ID NO: 52767 - protein, 354 aa, Glycine max
  peptide (1)..(354): Ceres Seq. ID no. 15170498
  misc_feature (62)..(182): Pfam Name: Dual specificity phosphatase, catalytic domain Pfam Description: Dual specificity phosphatase, catalytic domain
  misc_feature (204)..(342): Homolog of NCBI NO: 7486300 NR Description: hypothetical protein F28J12.250 - Arabidopsis
  misc_feature (245)..(350): Homolog of NCBI NO: 19112380 NR Description: protein tyrosine phosphatase
  misc_feature (97)..(264): Homolog of NCBI NO: 19112380 NR Description: protein tyrosine phosphatase
  misc_feature (244)..(350): Homolog of NCBI NO: 18415129 NR Description: expressed protein [Arabidopsis thaliana]
  misc_feature (244)..(350): Homolog of NCBI NO: 21555746 NR Description: unknown [Arabidopsis thaliana]
  misc_feature (106)..(354): Homolog of NCBI NO: 6322217 NR Description: nitrogen starvation-induced protein phosphatase;
  misc_feature (84)..(354): Homolog of NCBI NO: 30580455 NR Description: Dual specificity protein phosphatase 12 (Dual
  misc_feature (84)..(354): Homolog of NCBI NO: 12963553 NR Description: dual specificity phosphatase 12; EST AA027408
  misc_feature (62)..(350): Homolog of NCBI NO: 6005956 NR Description: dual specificity phosphatase 12
  misc_feature (90)..(350): Homolog of NCBI NO: 11560052 NR Description: glucokinase-associated dual specificity
MPYTVRENLSIGNIGDAAEILENGAAQSVTHILSVLSSASISFFSEWKTTLSIPAMEITKVHVADAAAKSALPPEKLLYSLEYAGRDLKLVRMAVPLRDTEKDDLLDYLEVCIDFIDRGRKEGSVLVHCFAGVSRSAAIITAYLMRTERLSVEDALESLRQSCEFVCPNDGFLEQLKMFEGMGFKVDHSSPIYKRFRLKILYENHFSGLRIDSSKLGADPGMPVEISSEAEETTKVENNHSPTYRCKKCRRLVALQEHVIDHVPGEGERAFEFHKRRGGNPFNKSDEFECSSVFIEPLRWMKAVEEGAMEGKLSCAHCDARLGYFNWSGIQCSCGSWITPAFQLHKSWIDVSPM

SEQ ID NO: 52768 - protein, 299 aa, Glycine max
  peptide (1)..(299): Ceres Seq. ID no. 15170499
  misc_feature (7)..(127): Pfam Name: Dual specificity phosphatase, catalytic domain Pfam Description: Dual specificity phosphatase, catalytic domain
  misc_feature (149)..(287): Homolog of NCBI NO: 7486300 NR Description: hypothetical protein F28J12.250 - Arabidopsis
  misc_feature (190)..(295): Homolog of NCBI NO: 19112380 NR Description: protein tyrosine phosphatase
  misc_feature (42)..(209): Homolog of NCBI NO: 19112380 NR Description: protein tyrosine phosphatase
  misc_feature (189)..(295): Homolog of NCBI NO: 18415129 NR Description: expressed protein [Arabidopsis thaliana]
  misc_feature (189)..(295): Homolog of NCBI NO: 21555746 NR Description: unknown [Arabidopsis thaliana]
  misc_feature (51)..(299): Homolog of NCBI NO: 6322217 NR Description: nitrogen starvation-induced protein phosphatase;
  misc_feature (29)..(299): Homolog of NCBI NO: 30580455 NR Description: Dual specificity protein phosphatase 12 (Dual
  misc_feature (29)..(299): Homolog of NCBI NO: 12963553 NR Description: dual specificity phosphatase 12; EST AA027408
  misc_feature (7)..(295): Homolog of NCBI NO: 6005956 NR Description: dual specificity phosphatase 12
  misc_feature (35)..(295): Homolog of NCBI NO: 11560052 NR Description: glucokinase-associated dual specificity
MEITKVHVADAAAKSALPPEKLLYSLEYAGRDLKLVRMAVPLRDTEKDDLLDYLEVCIDFIDRGRKEGSVLVHCFAGVSRSAAIITAYLMRTERLSVEDALESLRQSCEFVCPNDGFLEQLKMFEGMGFKVDHSSPIYKRFRLKILYENHFSGLRIDSSKLGADPGMPVEISSEAEETTKVENNHSPTYRCKKCRRLVALQEHVIDHVPGEGERAFEFHKRRGGNPFNKSDEFECSSVFIEPLRWMKAVEEGAMEGKLSCAHCDARLGYFNWSGIQCSCGSWITPAFQLHKSWIDVSPM

SEQ ID NO: 52769 - protein, 262 aa, Glycine max
  peptide (1)..(262): Ceres Seq. ID no. 15170500
  misc_feature (1)..(90): Pfam Name: Dual specificity phosphatase, catalytic domain Pfam Description: Dual specificity phosphatase, catalytic domain
  misc_feature (112)..(250): Homolog of NCBI NO: 7486300 NR Description: hypothetical protein F28J12.250 - Arabidopsis
  misc_feature (153)..(258): Homolog of NCBI NO: 19112380 NR Description: protein tyrosine phosphatase
  misc_feature (5)..(172): Homolog of NCBI NO: 19112380 NR Description: protein tyrosine phosphatase
  misc_feature (152)..(258): Homolog of NCBI NO: 18415129 NR Description: expressed protein [Arabidopsis thaliana]
  misc_feature (152)..(258): Homolog of NCBI NO: 21555746 NR Description: unknown [Arabidopsis thaliana]
  misc_feature (14)..(262): Homolog of NCBI NO: 6322217 NR Description: nitrogen starvation-induced protein phosphatase;
  misc_feature (1)..(262): Homolog of NCBI NO: 30580455 NR Description: Dual specificity protein phosphatase 12 (Dual
  misc_feature (1)..(262): Homolog of NCBI NO: 12963553 NR Description: dual specificity phosphatase 12; EST AA027408
  misc_feature (1)..(258): Homolog of NCBI NO: 6005956 NR Description: dual specificity phosphatase 12
  misc_feature (1)..(258): Homolog of NCBI NO: 11560052 NR Description: glucokinase-associated dual specificity
MAVPLRDTEKDDLLDYLEVCIDFIDRGRKEGSVLVHCFAGVSRSAAIITAYLMRTERLSVEDALESLRQSCEFVCPNDGFLEQLKMFEGMGFKVDHSSPIYKRFRLKILYENHFSGLRIDSSKLGADPGMPVEISSEAEETTKVENNHSPTYRCKKCRRLVALQEHVIDHVPGEGERAFEFHKRRGGNPFNKSDEFECSSVFIEPLRWMKAVEEGAMEGKLSCAHCDARLGYFNWSGIQCSCGSWITPAFQLHKSWIDVSPM

SEQ ID NO: 52770 - DNA, 900 bp, Glycine max
  misc_feature (1)..(900): Ceres Seq. ID no. 15176955
aaagaaaaccctacattacgtagagcttcgtctctccatcgaatccagcaacgacgacgatgatgatctctcgtcgattagcttccagattccttaaaccctcgtcttcctcatccctaagcatctcccttcaccatctccactcttcttcttccataagaaaccatttgatccacagatcagaacagcttcaagagctgggtctctttagatccttctctgctttcatcaccaatcccaacaccgagaagcttcgatctcagacacgatcaacgaggtacttctcaacaccgagccaagaggtcaatccgaatccagaggaggagccaaagatgaagcaccaggagatcgaaggcccgacggtggagcgcgacgtgtcggctttaggtaacgagacgagaaaagtgttcgaagggatgatgaagaacatgtacagtctaagtggagccatgggtcttctcggtttgactcagttagtcgtggggggaacgattatgtacgcgacgcgtttgaatccgatgcatgtgatgacgatgcagagctgtatagcgttcggattcccgttcgcgatggcgttgatggtgagacgctcgttgaagccgatgtatttcttcaagaagatggaggaagcggggaggttgcagatcctgactttgactcttcaggttgcgaagaatctcaatgtcttgttcgttagagcacgtgttgtgtccatcttgtgcgttgccgggttgtcttgcggcaatctatacctcctgttgtctccatgaaaatggaacatttttttattgtctttttttttttaatatccatacaaatggaaccataatgtcatcaataaggaaggaaaacgaaatgagaaaatccgagaaggcagattcttgcttctgttttttgatc

SEQ ID NO: 52771 - protein, 236 aa, Glycine max
  peptide (1)..(236): Ceres Seq. ID no. 15176956
  misc_feature (1)..(236): Homolog of NCBI NO: 18399699 NR Description: expressed protein [Arabidopsis thaliana]
MMISRRLASRFLKPSSSSSLSISLHHLHSSSSIRNHLIHRSEQLQELGLFRSFSAFITNPNTEKLRSQTRSTRYFSTPSQEVNPNPEEEPKMKHQEIEGPTVERDVSALGNETRKVFEGMMKNMYSLSGAMGLLGLTQLVVGGTIMYATRLNPMHVMTMQSCIAFGFPFAMALMVRRSLKPMYFFKKMEEAGRLQILTLTLQVAKNLNVLFVRARVVSILCVAGLSCGNLYLLLSP

SEQ ID NO: 52772 - protein, 235 aa, Glycine max
  peptide (1)..(235): Ceres Seq. ID no. 15176957
  misc_feature (1)..(235): Homolog of NCBI NO: 18399699 NR Description: expressed protein [Arabidopsis thaliana]
MISRRLASRFLKPSSSSSLSISLHHLHSSSSIRNHLIHRSEQLQELGLFRSFSAFITNPNTEKLRSQTRSTRYFSTPSQEVNPNPEEEPKMKHQEIEGPTVERDVSALGNETRKVFEGMMKNMYSLSGAMGLLGLTQLVVGGTIMYATRLNPMHVMTMQSCIAFGFPFAMALMVRRSLKPMYFFKKMEEAGRLQILTLTLQVAKNLNVLFVRARVVSILCVAGLSCGNLYLLLSP

SEQ ID NO: 52773 - protein, 145 aa, Glycine max
  peptide (1)..(145): Ceres Seq. ID no. 15176958
  misc_feature (1)..(145): Homolog of NCBI NO: 18399699 NR Description: expressed protein [Arabidopsis thaliana]
MKHQEIEGPTVERDVSALGNETRKVFEGMMKNMYSLSGAMGLLGLTQLVVGGTIMYATRLNPMHVMTMQSCIAFGFPFAMALMVRRSLKPMYFFKKMEEAGRLQILTLTLQVAKNLNVLFVRARVVSILCVAGLSCGNLYLLLSP

SEQ ID NO: 52774 - DNA, 1633 bp, Glycine max
  misc_feature (1)..(1633): Ceres Seq. ID no. 15170501
aaggcgccgttgtagttgtagctgtagaagggtgagagaagatgtttcctcaggagaatcatagtaacggctatcagcatcagcagggttacagtcacagagagcgagtccgtcggggcacttgcaggtcacgtgcctccacttcctcacactctcactccgttagggtttacgaccaacctcgtcctccttgcactgatttcgacgtcgcctatttccattcctacgctcaccttggcatccaccaagagatgatcaaggatcgtgtgcgtactgatacttatagggatgcaatcatgcagcatcagagtttcattgcaggcaaagttgtcgttgatgttggatgcggtacaggaatcctttctatattttgtgctcaggctggtgcaaaacgggtgtatgcaattgatgccagtgacattgccctgcaggatgttgaaattaatgaagaagtggatgttataatttccgaatggatgggctatatgcttctgtatgagagcatgcttggaagtgttattaatgctagagatcgttggctcaaacctggtggtcttattcttccttcaagttcaacgttgtacatggctcctgtcactcatacggacagatacagtgacagtgttgacttctggcgcaatgtttatggaattgatatgtctgccatggtatcactggctaaacaatgcgcatttgaagaaccttccgtggagactataactggtgaaaatgtcttgacatggccacatgtggtaaaatatattgatagttattctgttaccatccaagagttagaatctgtaacagccaagtttaagttcaattccatgatgcgagcaccactgcatggttttgcattttggtttgacgttgaatttaatgggcatgcaataccatcaaccaattatcattcgacaacttcatttgttgacaatcatcagatgaatggtagtcagagaaaaaggcgaacaaacccaaatgaagcactggtcttgtccactgcacctgaggaccctcctacacattggcagcagacattgatatacttttacgatcctatagagctggaacaagatcaactaattgaaggtttggtaacattgtcacagagcaaagaaaatgctcgatttatgaatattcaccttgaatatacttcaggtggtcgatcttatgtgaaagagtctgttatgagatgatcttttcttgtattttggcattgtcttttgcattagcacttgcacaacattctctgattgcagcttatatcttttctgacttcgtttctcctggagaactgaggtagcagtttggttcttgaaaatcattaatctctgcttgctagattagaatggagcaactgacgaacatgttagcatagagttaggtaaatcccatgaaattttgttgtaatttacttgatataacacatcattgaggcggattatttaagttataatttgtcctttctaaagcctttattgtggggccgaatcgtttcaattttttcttggagtcttactgtaacatagagctgttttcgaagcatattcttgtcgaatttattttatgttcgttaaaaagtggtgtactgactatccctcatattttcatatatacatcggccattttcctg

SEQ ID NO: 52775 - protein, 384 aa, Glycine max
  peptide (1)..(384): Ceres Seq. ID no. 15170502
  misc_feature (122)..(279): Homolog of NCBI NO: 34849512 NR Description: Unknown (protein for IMAGE:6792235) [Danio rerio]
  misc_feature (13)..(134): Homolog of NCBI NO: 38344195 NR Description: OSJNBa0064G10.11 [Oryza sativa (japonica
  misc_feature (129)..(384): Homolog of NCBI NO: 38344195 NR Description: OSJNBa0064G10.11 [Oryza sativa (japonica
  misc_feature (47)..(142): Homolog of NCBI NO: 40539106 NR Description: putative arginine methyltransferase (alternative
  misc_feature (129)..(384): Homolog of NCBI NO: 40539106 NR Description: putative arginine methyltransferase (alternative
  misc_feature (31)..(134): Homolog of NCBI NO: 9293956 NR Description: protein arginine N-methyltransferase-like protein
  misc_feature (129)..(238): Homolog of NCBI NO: 9293956 NR Description: protein arginine N-methyltransferase-like protein
  misc_feature (275)..(384): Homolog of NCBI NO: 9293956 NR Description: protein arginine N-methyltransferase-like protein
  misc_feature (31)..(134): Homolog of NCBI NO: 30685597 NR Description: protein arginine N-methyltransferase family
  misc_feature (129)..(384): Homolog of NCBI NO: 30685597 NR Description: protein arginine N-methyltransferase family
MFPQENHSNGYQHQQGYSHRERVRRGTCRSRASTSSHSHSVRVYDQPRPPCTDFDVAYFHSYAHLGIHQEMIKDRVRTDTYRDAIMQHQSFIAGKVVVDVGCGTGILSIFCAQAGAKRVYAIDASDIALQDVEINEEVDVIISEWMGYMLLYESMLGSVINARDRWLKPGGLILPSSSTLYMAPVTHTDRYSDSVDFWRNVYGIDMSAMVSLAKQCAFEEPSVETITGENVLTWPHVVKYIDSYSVTIQELESVTAKFKFNSMMRAPLHGFAFWFDVEFNGHAIPSTNYHSTTSFVDNHQMNGSQRKRRTNPNEALVLSTAPEDPPTHWQQTLIYFYDPIELEQDQLIEGLVTLSQSKENARFMNIHLEYTSGGRSYVKESVMR

SEQ ID NO: 52776 - protein, 314 aa, Glycine max
  peptide (1)..(314): Ceres Seq. ID no. 15170503
  misc_feature (52)..(209): Homolog of NCBI NO: 34849512 NR Description: Unknown (protein for IMAGE:6792235) [Danio rerio]
  misc_feature (1)..(64): Homolog of NCBI NO: 38344195 NR Description: OSJNBa0064G10.11 [Oryza sativa (japonica
  misc_feature (59)..(314): Homolog of NCBI NO: 38344195 NR Description: OSJNBa0064G10.11 [Oryza sativa (japonica
  misc_feature (1)..(72): Homolog of NCBI NO: 40539106 NR Description: putative arginine methyltransferase (alternative
  misc_feature (59)..(314): Homolog of NCBI NO: 40539106 NR Description: putative arginine methyltransferase (alternative
  misc_feature (1)..(64): Homolog of NCBI NO: 9293956 NR Description: protein arginine N-methyltransferase-like protein
  misc_feature (59)..(168): Homolog of NCBI NO: 9293956 NR Description: protein arginine N-methyltransferase-like protein
  misc_feature (205)..(314): Homolog of NCBI NO: 9293956 NR Description: protein arginine N-methyltransferase-like protein
  misc_feature (1)..(64): Homolog of NCBI NO: 30685597 NR Description: protein arginine N-methyltransferase family
  misc_feature (59)..(314): Homolog of NCBI NO: 30685597 NR Description: protein arginine N-methyltransferase family
MIKDRVRTDTYRDAIMQHQSFIAGKVVVDVGCGTGILSIFCAQAGAKRVYAIDASDIALQDVEINEEVDVIISEWMGYMLLYESMLGSVINARDRWLKPGGLILPSSSTLYMAPVTHTDRYSDSVDFWRNVYGIDMSAMVSLAKQCAFEEPSVETITGENVLTWPHVVKYIDSYSVTIQELESVTAKFKFNSMMRAPLHGFAFWFDVEFNGHAIPSTNYHSTTSFVDNHQMNGSQRKRRTNPNEALVLSTAPEDPPTHWQQTLIYFYDPIELEQDQLIEGLVTLSQSKENARFMNIHLEYTSGGRSYVKESVMR

SEQ ID NO: 52777 - protein, 299 aa, Glycine max
  peptide (1)..(299): Ceres Seq. ID no. 15170504
  misc_feature (37)..(194): Homolog of NCBI NO: 34849512 NR Description: Unknown (protein for IMAGE:6792235) [Danio rerio]
  misc_feature (1)..(49): Homolog of NCBI NO: 38344195 NR Description: OSJNBa0064G10.11 [Oryza sativa (japonica
  misc_feature (44)..(299): Homolog of NCBI NO: 38344195 NR Description: OSJNBa0064G10.11 [Oryza sativa (japonica
  misc_feature (1)..(57): Homolog of NCBI NO: 40539106 NR Description: putative arginine methyltransferase (alternative
  misc_feature (44)..(299): Homolog of NCBI NO: 40539106 NR Description: putative arginine methyltransferase (alternative
  misc_feature (1)..(49): Homolog of NCBI NO: 9293956 NR Description: protein arginine N-methyltransferase-like protein
  misc_feature (44)..(153): Homolog of NCBI NO: 9293956 NR Description: protein arginine N-methyltransferase-like protein
  misc_feature (190)..(299): Homolog of NCBI NO: 9293956 NR Description: protein arginine N-methyltransferase-like protein
  misc_feature (1)..(49): Homolog of NCBI NO: 30685597 NR Description: protein arginine N-methyltransferase family
  misc_feature (44)..(299): Homolog of NCBI NO: 30685597 NR Description: protein arginine N-methyltransferase family
MQHQSFIAGKVVVDVGCGTGILSIFCAQAGAKRVYAIDASDIALQDVEINEEVDVIISEWMGYMLLYESMLGSVINARDRWLKPGGLILPSSSTLYMAPVTHTDRYSDSVDFWRNVYGIDMSAMVSLAKQCAFEEPSVETITGENVLTWPHVVKYIDSYSVTIQELESVTAKFKFNSMMRAPLHGFAFWFDVEFNGHAIPSTNYHSTTSFVDNHQMNGSQRKRRTNPNEALVLSTAPEDPPTHWQQTLIYFYDPIELEQDQLIEGLVTLSQSKENARFMNIHLEYTSGGRSYVKESVMR

SEQ ID NO: 52778 - DNA, 1382 bp, Glycine max
  misc_feature (1)..(1382): Ceres Seq. ID no. 15176803
ctctacaaaacacacgccaccaccctattcctgcctctccactcctcccctctcccctcctcttctcttctctccactgcccaacttttgctatagacaagaaagaacctaagctaggtagctttcctccagagcagagcaatggccatgcatcctcttgcccaggggcacccgcaagcctggccatggggggtagccatgtacacgaacatacactaccaccaccagtacgagagagagcacctgttcgagaaatccttgacgcccagtgacgtgggcaagctcaacaggctggtgatccccaagcagcacgcggagaggtacttccccctcaacggcggagactcccccggtgacaaggacctgctcctgtctttcgaggacgaggccggcaagccgtggcggttccggtactcgtactggacgagcagccagagctacgttctcaccaagggctggagcaggtacgtcaaggagaagcagcttgacgccggagacatcgtgcacttcgagagggtgcgcggccttggcacaggcgaccggctcttcatccactgcaggcgccgtggcgagagcgcgccgccaccacctgtccgcgtacctccgcccgctctgaacgccggggagcagcagccttggagcccgatgtgctatagcacatcaggatcataccctaccagccctgccaactcccatgcctatcgccgctccgtggagcaagatcacagcgagatgctgcatgcaggtgactcgccgagagaggcagacgccaagagcagcacggcatcggggccgccgtcgagacgtctacggctgtttggcgtcaacctcgactgcggtccggagccagaggcagaggcagcaacgccaatgtacggctacacccaccagagcccctacgctgcagcagtggccacggtgccaacttactggggcagttcataagatggtgaggtctgaagccatgctcgagtatcctaacaaccagcagtgaaactagtcactactcccaccagccagcctactagctatgctactctggactgagtgacaggcttgaattgaaccctggaagaggaagtggaagtggaagatcccttgtttcccgggcaatcttccttccatccacagagtgccctttttttttcctgttttctttcttctggtcttccagagaccctattcgatcacagtacggggcccttagcaggtggcaggtttcaggaaacgtcaggttgaaaaggtgagggaagtgggagagatagagggatggtgacacacatgaaaaacaaaagggcatgcttagcaagcatgcatgtatgtatgtgtcatctgtatgtactgggtccaagaacaaaccatgaagttgatgtatcctctcc

SEQ ID NO: 52779 - protein, 267 aa, Glycine max
  peptide (1)..(267): Ceres Seq. ID no. 15176804
  misc_feature (35)..(145): Pfam Name: B3 DNA binding domain Pfam Description: B3 DNA binding domain
  misc_feature (31)..(146): Homolog of NCBI NO: 30686674 NR Description: DNA-binding protein, putative [Arabidopsis
  misc_feature (31)..(146): Homolog of NCBI NO: 25408446 NR Description: probable RAV2-like DNA binding protein
  misc_feature (31)..(233): Homolog of NCBI NO: 21618252 NR Description: RAV-like protein [Arabidopsis thaliana]
  misc_feature (31)..(233): Homolog of NCBI NO: 26450371 NR Description: putative RAV [Arabidopsis thaliana]
  misc_feature (31)..(233): Homolog of NCBI NO: 15228649 NR Description: DNA-binding protein, putative [Arabidopsis
  misc_feature (23)..(153): Homolog of NCBI NO: 30681791 NR Description: DNA-binding protein, putative [Arabidopsis
  misc_feature (22)..(232): Homolog of NCBI NO: 15239984 NR Description: DNA-binding protein, putative [Arabidopsis
  misc_feature (192)..(252): Homolog of NCBI NO: 34902226 NR Description: Putative RAV-like B3 domain DNA binding protein
  misc_feature (31)..(150): Homolog of NCBI NO: 34902226 NR Description: Putative RAV-like B3 domain DNA binding protein
  misc_feature (23)..(253): Homolog of NCBI NO: 30681787 NR Description: DNA-binding protein, putative [Arabidopsis
MAMHPLAQGHPQAWPWGVAMYTNIHYHHQYEREHLFEKSLTPSDVGKLNRLVIPKQHAERYFPLNGGDSPGDKDLLLSFEDEAGKPWRFRYSYWTSSQSYVLTKGWSRYVKEKQLDAGDIVHFERVRGLGTGDRLFIHCRRRGESAPPPPVRVPPPALNAGEQQPWSPMCYSTSGSYPTSPANSHAYRRSVEQDHSEMLHAGDSPREADAKSSTASGPPSRRLRLFGVNLDCGPEPEAEAATPMYGYTHQSPYAAAVATVPTYWGSS

SEQ ID NO: 52780 - protein, 265 aa, Glycine max
  peptide (1)..(265): Ceres Seq. ID no. 15176805
  misc_feature (33)..(143): Pfam Name: B3 DNA binding domain Pfam Description: B3 DNA binding domain
  misc_feature (29)..(144): Homolog of NCBI NO: 30686674 NR Description: DNA-binding protein, putative [Arabidopsis
  misc_feature (29)..(144): Homolog of NCBI NO: 25408446 NR Description: probable RAV2-like DNA binding protein
  misc_feature (29)..(231): Homolog of NCBI NO: 21618252 NR Description: RAV-like protein [Arabidopsis thaliana]
  misc_feature (29)..(231): Homolog of NCBI NO: 26450371 NR Description: putative RAV [Arabidopsis thaliana]
  misc_feature (29)..(231): Homolog of NCBI NO: 15228649 NR Description: DNA-binding protein, putative [Arabidopsis
  misc_feature (21)..(151): Homolog of NCBI NO: 30681791 NR Description: DNA-binding protein, putative [Arabidopsis
  misc_feature (20)..(230): Homolog of NCBI NO: 15239984 NR Description: DNA-binding protein, putative [Arabidopsis
  misc_feature (190)..(250): Homolog of NCBI NO: 34902226 NR Description: Putative RAV-like B3 domain DNA binding protein
  misc_feature (29)..(148): Homolog of NCBI NO: 34902226 NR Description: Putative RAV-like B3 domain DNA binding protein
  misc_feature (21)..(251): Homolog of NCBI NO: 30681787 NR Description: DNA-binding protein, putative [Arabidopsis
MHPLAQGHPQAWPWGVAMYTNIHYHHQYEREHLFEKSLTPSDVGKLNRLVIPKQHAERYFPLNGGDSPGDKDLLLSFEDEAGKPWRFRYSYWTSSQSYVLTKGWSRYVKEKQLDAGDIVHFERVRGLGTGDRLFIHCRRRGESAPPPPVRVPPPALNAGEQQPWSPMCYSTSGSYPTSPANSHAYRRSVEQDHSEMLHAGDSPREADAKSSTASGPPSRRLRLFGVNLDCGPEPEAEAATPMYGYTHQSPYAAAVATVPTYWGSS

SEQ ID NO: 52781 - protein, 248 aa, Glycine max
  peptide (1)..(248): Ceres Seq. ID no. 15176806
  misc_feature (16)..(126): Pfam Name: B3 DNA binding domain Pfam Description: B3 DNA binding domain
  misc_feature (12)..(127): Homolog of NCBI NO: 30686669 NR Description: DNA-binding protein, putative [Arabidopsis
  misc_feature (12)..(127): Homolog of NCBI NO: 25408446 NR Description: probable RAV2-like DNA binding protein
  misc_feature (12)..(214): Homolog of NCBI NO: 21618252 NR Description: RAV-like protein [Arabidopsis thaliana]
  misc_feature (12)..(214): Homolog of NCBI NO: 26450371 NR Description: putative RAV [Arabidopsis thaliana]
  misc_feature (12)..(214): Homolog of NCBI NO: 15228649 NR Description: DNA-binding protein, putative [Arabidopsis
  misc_feature (4)..(134): Homolog of NCBI NO: 30681791 NR Description: DNA-binding protein, putative [Arabidopsis
  misc_feature (3)..(213): Homolog of NCBI NO: 15239984 NR Description: DNA-binding protein, putative [Arabidopsis
  misc_feature (173)..(233): Homolog of NCBI NO: 34902226 NR Description: Putative RAV-like B3 domain DNA binding protein
  misc_feature (12)..(131): Homolog of NCBI NO: 34902226 NR Description: Putative RAV-like B3 domain DNA binding protein
  misc_feature (4)..(234): Homolog of NCBI NO: 30681787 NR Description: DNA-binding protein, putative [Arabidopsis
MYTNIHYHHQYEREHLFEKSLTPSDVGKLNRLVIPKQHAERYFPLNGGDSPGDKDLLLSFEDEAGKPWRFRYSYWTSSQSYVLTKGWSRYVKEKQLDAGDIVHFERVRGLGTGDRLFIHCRRRGESAPPPPVRVPPPALNAGEQQPWSPMCYSTSGSYPTSPANSHAYRRSVEQDHSEMLHAGDSPREADAKSSTASGPPSRRLRLFGVNLDCGPEPEAEAATPMYGYTHQSPYAAAVATVPTYWGSS

SEQ ID NO: 52782 - DNA, 1696 bp, Glycine max
  misc_feature (1)..(1696): Ceres Seq. ID no. 15170442
aaattcggcttcagcatctctcatcctctctctacttctcaaagaaagacgcacgcagcgttctaaaaccctaattgggtatatgcaaagagggctttgtagcatgtgcttaaggtatgttttaaacattgcttgtttaattgtcatggtggcattgtgatgcaaaatgtgtgtgagctcatactgagaaggagctcatctgctaagtccatttgaagaggatgtatggaagggcatcatcaggtcttgataggtttaagaaggctcagaccttggaaccattctctgttgctgtcaacgcttcttccagaaatggtgcccaaccctctagtaaagtagttggccattcatctgctttgcctccacaggctcaggcttcttccaaccaatcccaacaacatgcatttcagaagactgtaggagtggaggcagccccgttgttggggcagaatcagcaggtgactcaggttgggggagggcagtcgacgtggcagccgccggattgggcgatcgagccaaggtcaggtgttttttacctggaggttttgaaggatggccaggtgctagaccggattaatctggacagacgaaggaatatctttgggaggcaaatccagacttgtgattttgtgcttgatcatcagtctgtctctcgccaacatgctgctgttattcctcacaagaatgggagcatatatgtaattgatttgggatctgcacatggtacatttgttgcaaatgagcggttgaccaaggatttgccagttgagcttgaagtgggacaatcattgcgatttgctgcatcaacaagagcatacatattaagaaagaatgatgcagctcttttccctcggcctccaccacctacagagattaatttcccaccgcctcctgacccatctgatgaagaagctgttgtagcttataatacgctactgaatcgttatggcatcaacaaggctgatttagtgtccaaatctggtgagtctggtagttcggtaagtggcaaaaataaagattaccaaactgaaagaccatctaagagaattaggaaaacaagagtttccttcagggatcaagttgggggagagttagttgaggttgttggaatttcagatggtgcagatgtagaaacagaacctggtccagttggtgttaaagaaggaagtctagtcggtaaatatgaatctcttgtacagattactgtaataccaaaggggaaagagcagtcctctgtcaaggaggcagattcatccccaaaaggtgtgactgataaactacaagaagtattgaaaaagatcaaaaccccagtcaaaactgggatttatgatgacctatatggagaatcgttatctgtcaaagttggatcttcctgggcatattcacctgcactcagtactggtgaacgatctccagataaggaggatggtgcggggagcggaaagtcacctgttgatggagatgatgatgatttatttgggtgactattcaacttatgcagactgggttgtgagataaatttgtagtagttctgtatgagtttaacatcatagggagttgaaaacatgcaaatggagttaattgttccaacgaatccataattgttgatgttttcctctgcatgcccccaccccccttacactaaaagacagcaggttcatggttaaacgatgtgttatccttgtatggacccatt

SEQ ID NO: 52783 - protein, 420 aa, Glycine max
  peptide (1)..(420): Ceres Seq. ID no. 15170443
  misc_feature (125)..(193): Pfam Name: FHA domain Pfam Description: FHA domain
  misc_feature (93)..(285): Homolog of NCBI NO: 13699256 NR Description: protein phosphatase 1 regulatory inhibitor
  misc_feature (93)..(285): Homolog of NCBI NO: 32766445 NR Description: Unknown (protein for MGC:63827) [Danio rerio]
  misc_feature (93)..(323): Homolog of NCBI NO: 22122685 NR Description: RIKEN cDNA 6330548N22 [Mus musculus]
  misc_feature (32)..(210): Homolog of NCBI NO: 34898708 NR Description: contains ESTs
  misc_feature (93)..(323): Homolog of NCBI NO: 27732693 NR Description: similar to expressed sequence AU044684
  misc_feature (93)..(319): Homolog of NCBI NO: 38174471 NR Description: Unknown (protein for MGC:69160) [Xenopus laevis]
  misc_feature (88)..(203): Homolog of NCBI NO: 19922418 NR Description: Nuclear inhibitor of PP1 CG8980-PA [Drosophila
  misc_feature (93)..(340): Homolog of NCBI NO: 31240047 NR Description: ENSANGP00000016742 [Anopheles gambiae]
  misc_feature (79)..(420): Homolog of NCBI NO: 15238804 NR Description: expressed protein [Arabidopsis thaliana]
  misc_feature (8)..(420): Homolog of NCBI NO: 24414059 NR Description: OJ1136_A10.4 [Oryza sativa (japonica
MYGRASSGLDRFKKAQTLEPFSVAVNASSRNGAQPSSKVVGHSSALPPQAQASSNQSQQHAFQKTVGVEAAPLLGQNQQVTQVGGGQSTWQPPDWAIEPRSGVFYLEVLKDGQVLDRINLDRRRNIFGRQIQTCDFVLDHQSVSRQHAAVIPHKNGSIYVIDLGSAHGTFVANERLTKDLPVELEVGQSLRFAASTRAYILRKNDAALFPRPPPPTEINFPPPPDPSDEEAVVAYNTLLNRYGINKADLVSKSGESGSSVSGKNKDYQTERPSKRIRKTRVSFRDQVGGELVEVVGISDGADVETEPGPVGVKEGSLVGKYESLVQITVIPKGKEQSSVKEADSSPKGVTDKLQEVLKKIKTPVKTGIYDDLYGESLSVKVGSSWAYSPALSTGERSPDKEDGAGSGKSPVDGDDDDLFG

SEQ ID NO: 52784 - DNA, 1005 bp, Glycine max
  misc_feature (1)..(1005): Ceres Seq. ID no. 15176306
atgcacagtcacctcgtaagcaagcagctgctacagcctcaacaatcaaaccttgattcgacatggcgaagtcgcccatggcgatcttggctctcgggctagcagcactagtcctatccggcgccgggctggtggccgcgcagaactgcggctgccagccgaacgagtgctgcagcaagtacggttattgcgggaccgatgccagctactgcggacaagattgtcggtcgggcccgtgcacggcgagcggcggcgggagcggcgatcccgtggagagcgtcgtcaccgacgcgttctttgacgggatcaagtcccaggccgccgacgggtgccccgggaagagcttttacacgcgccagtttttcctggacggcgcccaggcgaaccccgacttcggcaaaggcagcaccagcgacgacggcaagagggagatagccgccttcttcgcccacttcacccacgagaccggacacatgtgctccatcgaggagaacgaaggggcgagcaaggattactgcgacgagacgaacacgcaatggccgtgtaccccggggaaggcgtactacgggcgcgggccgctgcagctgtcgtggaactacaactacggggcggccggtgagagcaccgggttcgacgggctcaacagcccggagacggtggcgcaggaccaggcgctaacgttcaaggcggcgttctggttctggatgaccaacgtgcaccaggccgtgcccagtgggttcggcgcgacgaccagggcaatcaacggtgacgtggagtgcgacggcaagaagccagacttggtgagcgcgcgggcgggctactacacggactactgccagcagttcggcgtcgacccagggaacaacctcacttgctaggtgcttggttctgaattgatcgacgcgcaaaaacctttctggcgatgctcctactgctctacctccctgtgtattctgggatatctatatatcctgtatacgtaataaatttacatctctgtattcg

SEQ ID NO: 52785 - protein, 271 aa, Glycine max
  peptide (1)..(271): Ceres Seq. ID no. 15176307
  misc_feature (73)..(271): Pfam Name: Chitinase class I Pfam Description: Chitinase class I
  misc_feature (8)..(271): Homolog of NCBI NO: 482985 NR Description: chitinase (EC 3.2.1.14) precursor - maize
  misc_feature (8)..(271): Homolog of NCBI NO: 15213848 NR Description: chitinase-B [Saccharum officinarum]
  misc_feature (8)..(271): Homolog of NCBI NO: 15213852 NR Description: chitinase-B [Sorghum halepense]
  misc_feature (1)..(271): Homolog of NCBI NO: 116329 NR Description: ENDOCHITINASE A PRECURSOR (SEED CHITINASE A)
  misc_feature (1)..(271): Homolog of NCBI NO: 283037 NR Description: chitinase (EC 3.2.1.14) A - maize
  misc_feature (6)..(271): Homolog of NCBI NO: 38345417 NR Description: OSJNBb0091E11.8 [Oryza sativa (japonica
  misc_feature (6)..(271): Homolog of NCBI NO: 30793457 NR Description: chitinase [Oryza sativa (japonica cultivar-group)]
  misc_feature (1)..(25): Homolog of NCBI NO: 4741842 NR Description: chitinase II precursor [Triticum aestivum]
  misc_feature (62)..(271): Homolog of NCBI NO: 4741842 NR Description: chitinase II precursor [Triticum aestivum]
  misc_feature (1)..(271): Homolog of NCBI NO: 4741848 NR Description: chitinase IV precursor [Triticum aestivum]
MAKSPMAILALGLAALVLSGAGLVAAQNCGCQPNECCSKYGYCGTDASYCGQDCRSGPCTASGGGSGDPVESVVTDAFFDGIKSQAADGCPGKSFYTRQFFLDGAQANPDFGKGSTSDDGKREIAAFFAHFTHETGHMCSIEENEGASKDYCDETNTQWPCTPGKAYYGRGPLQLSWNYNYGAAGESTGFDGLNSPETVAQDQALTFKAAFWFWMTNVHQAVPSGFGATTRAINGDVECDGKKPDLVSARAGYYTDYCQQFGVDPGNNLTC

SEQ ID NO: 52786 - protein, 266 aa, Glycine max
  peptide (1)..(266): Ceres Seq. ID no. 15176308
  misc_feature (68)..(266): Pfam Name: Chitinase class I Pfam Description: Chitinase class I
  misc_feature (3)..(266): Homolog of NCBI NO: 482985 NR Description: chitinase (EC 3.2.1.14) precursor - maize
  misc_feature (3)..(266): Homolog of NCBI NO: 15213848 NR Description: chitinase-B [Saccharum officinarum]
  misc_feature (3)..(266): Homolog of NCBI NO: 15213852 NR Description: chitinase-B [Sorghum halepense]
  misc_feature (1)..(266): Homolog of NCBI NO: 116329 NR Description: ENDOCHITINASE A PRECURSOR (SEED CHITINASE A)
  misc_feature (1)..(266): Homolog of NCBI NO: 283037 NR Description: chitinase (EC 3.2.1.14) A - maize
  misc_feature (1)..(266): Homolog of NCBI NO: 38345417 NR Description: OSJNBb0091E11.8 [Oryza sativa (japonica
  misc_feature (1)..(266): Homolog of NCBI NO: 30793457 NR Description: chitinase [Oryza sativa (japonica cultivar-group)]
  misc_feature (1)..(20): Homolog of NCBI NO: 4741842 NR Description: chitinase II precursor [Triticum aestivum]
  misc_feature (57)..(266): Homolog of NCBI NO: 4741842 NR Description: chitinase II precursor [Triticum aestivum]
  misc_feature (1)..(266): Homolog of NCBI NO: 4741848 NR Description: chitinase IV precursor [Triticum aestivum]
MAILALGLAALVLSGAGLVAAQNCGCQPNECCSKYGYCGTDASYCGQDCRSGPCTASGGGSGDPVESVVTDAFFDGIKSQAADGCPGKSFYTRQFFLDGAQANPDFGKGSTSDDGKREIAAFFAHFTHETGHMCSIEENEGASKDYCDETNTQWPCTPGKAYYGRGPLQLSWNYNYGAAGESTGFDGLNSPETVAQDQALTFKAAFWFWMTNVHQAVPSGFGATTRAINGDVECDGKKPDLVSARAGYYTDYCQQFGVDPGNNLTC

SEQ ID NO: 52787 - DNA, 1304 bp, Glycine max
  misc_feature (1)..(1304): Ceres Seq. ID no. 15176333
atgctctccccgccccttccaggacaagaagaagcccttcgatcgtccggtctagctgtttctgcttatcgatatctggtttatcgcagcagtttggagctgtcggattcgagtagctagcttagctctacaatcgagcgagaagaaggatcgaggagatgagcggcggcggcggcggaggatcggcggcgacgcaggggcagcaggatctgcagctgccgccggggttcagattccatccgacggacgaggagctggtgatgcactacctgtgccggcggtgcgccggcctgcccatctccgtgcccatcatcgccgaggtcgacctctacaagttcgacccatggcagctcccgagaatggcgctctacggcgagaaggagtggtacttcttctccccgcgcgaccgcaagtacccgaacgggtcgcggccgaaccggtcggccggcacgggctactggaaggccaccggcgccgacaagccggtgggcacgcccaagcccctggccatcaagaaggcgctcgtcttctatgccgggaaggcgcccaagggcgacaagaccaactggatcatgcacgagtaccgcctcgccgacgtcgaccgctccgcccgcaagaagaacagcctcaggttggatgactgggtgctttgccggatctacaacaagaaaggcgcctcggagaggccgagcgccggtgaccggaccgcgagcgcgagccccgggcacgcggccgtcggctcgccgccggagcagaaaccggccctgctgccgccatacgcgccgcagccgttctcggacctggcggcgtactacgaggtgaggccgtcggactcgatgccgcgggcgcacgcggactcgagctgctcggaacacgtgctgacggcgtcgtgcgagcggccggaggtgcagagccagcccaagatctccgagtgggagcgcacgttcgccacagccaccccgggcgtcaacccggccggcttgatgctcgacccggcggccgggctccccgccggcgacccgctcctccaggacatcctcatgtactggggcaagccgttctgagaatccggctccgtggctgtacgtgtggtttggcgctgggatgaaatcgatcggggtagcggccggaatctatcggcaggagatactcatagccgttggatggaagatatcagtagtgcacaaggagtcacggacggcggcgatgagacgcgggagccccggtgtgttcgaggagggacgcagagagtactcttggtgtatacggatttgaactaagctgtgtatatgcgattgatttgg

SEQ ID NO: 52788 - protein, 301 aa, Glycine max
  peptide (1)..(301): Ceres Seq. ID no. 15176334
  misc_feature (20)..(145): Pfam Name: No apical meristem (NAM) protein Pfam Description: No apical meristem (NAM) protein
  misc_feature (17)..(176): Homolog of NCBI NO: 21593134 NR Description: GRAB1-like protein [Arabidopsis thaliana]
  misc_feature (17)..(176): Homolog of NCBI NO: 15223963 NR Description: No apical meristem (NAM) protein family
  misc_feature (14)..(260): Homolog of NCBI NO: 21105734 NR Description: nam-like protein 3 [Petunia x hybrida]
  misc_feature (14)..(261): Homolog of NCBI NO: 14485513 NR Description: putative NAC domain protein [Solanum tuberosum]
  misc_feature (14)..(261): Homolog of NCBI NO: 40647397 NR Description: NAC domain protein [Lycopersicon esculentum]
  misc_feature (17)..(301): Homolog of NCBI NO: 31322576 NR Description: NAC-domain protein 5-11 [Brassica napus]
  misc_feature (17)..(301): Homolog of NCBI NO: 31322578 NR Description: NAC-domain protein 18 [Brassica napus]
  misc_feature (18)..(301): Homolog of NCBI NO: 15223456 NR Description: No apical meristem (NAM) protein family
  misc_feature (17)..(301): Homolog of NCBI NO: 21105748 NR Description: nam-like protein 10 [Petunia x hybrida]
  misc_feature (14)..(301): Homolog of NCBI NO: 25458553 NR Description: OsNAC6 protein [imported] - rice
MSGGGGGGSAATQGQQDLQLPPGFRFHPTDEELVMHYLCRRCAGLPISVPIIAEVDLYKFDPWQLPRMALYGEKEWYFFSPRDRKYPNGSRPNRSAGTGYWKATGADKPVGTPKPLAIKKALVFYAGKAPKGDKTNWIMHEYRLADVDRSARKKNSLRLDDWVLCRIYNKKGASERPSAGDRTASASPGHAAVGSPPEQKPALLPPYAPQPFSDLAAYYEVRPSDSMPRAHADSSCSEHVLTASCERPEVQSQPKISEWERTFATATPGVNPAGLMLDPAAGLPAGDPLLQDILMYWGKPF

SEQ ID NO: 52789 - protein, 267 aa, Glycine max
  peptide (1)..(267): Ceres Seq. ID no. 15176335
  misc_feature (1)..(111): Pfam Name: No apical meristem (NAM) protein Pfam Description: No apical meristem (NAM) protein
  misc_feature (1)..(142): Homolog of NCBI NO: 21593134 NR Description: GRAB1-like protein [Arabidopsis thaliana]
  misc_feature (1)..(142): Homolog of NCBI NO: 15223963 NR Description: No apical meristem (NAM) protein family
  misc_feature (1)..(226): Homolog of NCBI NO: 21105734 NR Description: nam-like protein 3 [Petunia x hybrida]
  misc_feature (1)..(227): Homolog of NCBI NO: 14485513 NR Description: putative NAC domain protein [Solanum tuberosum]
  misc_feature (1)..(227): Homolog of NCBI NO: 40647397 NR Description: NAC domain protein [Lycopersicon esculentum]
  misc_feature (1)..(267): Homolog of NCBI NO: 31322576 NR Description: NAC-domain protein 5-11 [Brassica napus]
  misc_feature (1)..(267): Homolog of NCBI NO: 31322578 NR Description: NAC-domain protein 18 [Brassica napus]
  misc_feature (1)..(267): Homolog of NCBI NO: 15223456 NR Description: No apical meristem (NAM) protein family
  misc_feature (1)..(267): Homolog of NCBI NO: 21105748 NR Description: nam-like protein 10 [Petunia x hybrida]
  misc_feature (1)..(267): Homolog of NCBI NO: 25458553 NR Description: OsNAC6 protein [imported] - rice
MHYLCRRCAGLPISVPIIAEVDLYKFDPWQLPRMALYGEKEWYFFSPRDRKYPNGSRPNRSAGTGYWKATGADKPVGTPKPLAIKKALVFYAGKAPKGDKTNWIMHEYRLADVDRSARKKNSLRLDDWVLCRIYNKKGASERPSAGDRTASASPGHAAVGSPPEQKPALLPPYAPQPFSDLAAYYEVRPSDSMPRAHADSSCSEHVLTASCERPEVQSQPKISEWERTFATATPGVNPAGLMLDPAAGLPAGDPLLQDILMYWGKPF

SEQ ID NO: 52790 - protein, 234 aa, Glycine max
  peptide (1)..(234): Ceres Seq. ID no. 15176336
  misc_feature (1)..(78): Pfam Name: No apical meristem (NAM) protein Pfam Description: No apical meristem (NAM) protein
  misc_feature (1)..(109): Homolog of NCBI NO: 21593134 NR Description: GRAB1-like protein [Arabidopsis thaliana]
  misc_feature (1)..(109): Homolog of NCBI NO: 15223963 NR Description: No apical meristem (NAM) protein family
  misc_feature (1)..(193): Homolog of NCBI NO: 21105734 NR Description: nam-like protein 3 [Petunia x hybrida]
  misc_feature (1)..(194): Homolog of NCBI NO: 14485513 NR Description: putative NAC domain protein [Solanum tuberosum]
  misc_feature (1)..(194): Homolog of NCBI NO: 40647397 NR Description: NAC domain protein [Lycopersicon esculentum]
  misc_feature (1)..(234): Homolog of NCBI NO: 31322576 NR Description: NAC-domain protein 5-11 [Brassica napus]
  misc_feature (1)..(234): Homolog of NCBI NO: 31322578 NR Description: NAC-domain protein 18 [Brassica napus]
  misc_feature (1)..(234): Homolog of NCBI NO: 15223456 NR Description: No apical meristem (NAM) protein family
  misc_feature (1)..(234): Homolog of NCBI NO: 21105748 NR Description: nam-like protein 10 [Petunia x hybrida]
  misc_feature (1)..(234): Homolog of NCBI NO: 25458553 NR Description: OsNAC6 protein [imported] - rice
MALYGEKEWYFFSPRDRKYPNGSRPNRSAGTGYWKATGADKPVGTPKPLAIKKALVFYAGKAPKGDKTNWIMHEYRLADVDRSARKKNSLRLDDWVLCRIYNKKGASERPSAGDRTASASPGHAAVGSPPEQKPALLPPYAPQPFSDLAAYYEVRPSDSMPRAHADSSCSEHVLTASCERPEVQSQPKISEWERTFATATPGVNPAGLMLDPAAGLPAGDPLLQDILMYWGKPF

SEQ ID NO: 52791 - DNA, 1327 bp, Glycine max
  misc_feature (1)..(1327): Ceres Seq. ID no. 15170536
ataaaaaaaaggacaacttcaaaggaggacttttgacaatttagtcaacttcttcaatcttaggcccagcaccaccagtggatgattttccatagccagcaccattaggaatgtcatctgcaccacttccttggtacatgtttgagataattgggttgcaaagtccctccaactccttcaatttgtcctgaaattcctcaacctcagtcagtaggttcctatctagccactcaatggtctcatcaaccgccttctctatcttctccttatcagaagggttcattttgcctgcaaacttgtcatccttcacagtattcctcatgttgtacgccaagttctccaaggagttcttggcgtccaccttcttcttcacctcctcgtcctctgccttgtacctctccgcctcctggaccatcttctcaatctcctccttgctcagccttcccttatcattagtgatcgtgatcttgtggtcttatcctcaaaataccattggcgtcaatgtcaaagcacacattgatctgtggaactcctcttggtgctgaagggatgcctgtgagttcaaacttccctaaaagattgttgtctttggtgcttgccctctcgccttcatacacctgaattagcactcctggctgattatcagcataagttgagaaaatctgttccttcttggtgggaatggttgtgttccttggaatcaacactgtcatcacacctcctgcagtctcaatgccgaggctaagaggagtgacatcaagcagaagcaagtcctgaaccttctcgttcccttcaccgctcaaaatcgcagcctgcacagcagccccataggctacagcctcatccgggttaatgctcttgcaaagctctttgccattgaagaaatcctgcaacagttgttgcacttttggaatcctggtggatccaccaacaaggacaacatcgtgaacgtgtccatgttgagctcctcaaacctggctctggtgatggtggaatagaagtcaataccttcgtagagagagtcaatctcgatggtagtttgagtggtggaagagagagtcctcttagccctctctcgcatgcagtcctcaatctcctaagtgctctggcattagtgctgacatccttcttgtgtttcctcttgaactcagacacgaagtggttcacaagcctgttattaagaaaatggttagtccatagttcagttaaaaaacagttcactgcattgaattaaattaaattgtttactaaactgaactgtttctatgtactggtatgcaaaagaaacattagaagaagaaagaatcttatatcatttggtttagtc

SEQ ID NO: 52792 - protein, 103 aa, Glycine max
  peptide (1)..(103): Ceres Seq. ID no. 15170537
  misc_feature (84)..(103): Homolog of NCBI NO: 11359110 NR Description: hypothetical protein ask2 - fission yeast
  misc_feature (1)..(103): Homolog of NCBI NO: 26245935 NR Description: Putative glutamate dehydrogenase [Escherichia
  misc_feature (84)..(103): Homolog of NCBI NO: 1165013 NR Description: putative gdh [Drosophila auraria]
  misc_feature (84)..(103): Homolog of NCBI NO: 1165014 NR Description: LAC ORF [Drosophila auraria]
  misc_feature (84)..(103): Homolog of NCBI NO: 1169326 NR Description: NAD-specific glutamate dehydrogenase (NAD-GDH)
MVSSTAFSIFSLSEGFILPANLSSFTVFLMLYAKFSKEFLASTFFFTSSSSALYLSASWTIFSISSLLSLPLSLVIVILWSYPQNTIGVNVKAHIDLWNSSWC

SEQ ID NO: 52793 - protein, 74 aa, Glycine max
  peptide (1)..(74): Ceres Seq. ID no. 15170538
  misc_feature (55)..(74): Homolog of NCBI NO: 11359110 NR Description: hypothetical protein ask2 - fission yeast
  misc_feature (1)..(74): Homolog of NCBI NO: 26245935 NR Description: Putative glutamate dehydrogenase [Escherichia
  misc_feature (55)..(74): Homolog of NCBI NO: 1165013 NR Description: putative gdh [Drosophila auraria]
  misc_feature (55)..(74): Homolog of NCBI NO: 1165014 NR Description: LAC ORF [Drosophila auraria]
  misc_feature (55)..(74): Homolog of NCBI NO: 1169326 NR Description: NAD-specific glutamate dehydrogenase (NAD-GDH)
MLYAKFSKEFLASTFFFTSSSSALYLSASWTIFSISSLLSLPLSLVIVILWSYPQNTIGVNVKAHIDLWNSSWC

SEQ ID NO: 52794 - DNA, 1087 bp, Glycine max
  misc_feature (1)..(1087): Ceres Seq. ID no. 15170454
aactactccgtcactttgtttgcaaagctcctcctcgatccatcgatcactgcaccggccggcggcaccgcgctcgcaggggctagccaacgagacggcagcaatggcggaccgtgaccgcagcggcatctacggcggcgcccacgccacctacgggcagcagcagcagcagggaggaggcgggcgcccgatgggtgagcaggtgaagggcatgctccacgacaaggggccgacggcgtcgcaggcgctgacggtggtgacgctgttcccgctgggcgggctgctgctggtgctgtcggggctggcgctgacggcctccgtggtggggctggccgtggccacgccggtgttcctgatcttcagccccgtgctcgtccccgccgcgctgctcatcgggacggccgtcatggggttcctcacgtcgggcgcgctggggctcgggggcctgtcctcgctcacgtgcctcgccaacacggcgcggcaggcgttccagcgcaccccggactacgtggaggaggcgcaccgcaggatggcggaggccgcggcgcacgcgggccacaagaccgcgcaggcaggccaggccatccagggcagggcgcaggaggccggcgccgggggaggtgcaggtgccggcgctggcggcggcggcagggcttcctcgtaagcaagtcatccatgcatggattatggatagatgcgcgcgtgcgtgtctatcagtatcagcagccagcagggtcgtcgcggaatgctgtgttcctgtacgtgtgggtgaccgtccttccgtccttcgtctttctccccccgagtgtgtgttacgtatgtcctggtattcgtcgtgtgtgttcatcgccgctccagttgaattccggtgtctgttcatcgccgctccaggtcgtagatgtgaatatactttgctaggggaataagtgataagtctgtctggaaggtaatgtttgagctttgctagtgtggctgggcactctggtcactggttgtgttgtgcatgcatcagctgtatgatcgtcgtctgttgtggaaaattggtcaatgtattctcttgctgaataatttgtgacatctaattgtt

SEQ ID NO: 52795 - protein, 220 aa, Glycine max
  peptide (1)..(220): Ceres Seq. ID no. 15170455
  misc_feature (78)..(195): Pfam Name: Oleosin Pfam Description: Oleosin
  misc_feature (35)..(206): Homolog of NCBI NO: 22651523 NR Description: oleosin [Olea europaea subsp. europaea]
  misc_feature (35)..(208): Homolog of NCBI NO: 10834827 NR Description: oleosin [Sesamum indicum]
  misc_feature (35)..(203): Homolog of NCBI NO: 10880961 NR Description: 19 kDa oleosin [Perilla frutescens]
  misc_feature (35)..(203): Homolog of NCBI NO: 9963897 NR Description: oleosin [Perilla frutescens]
  misc_feature (46)..(202): Homolog of NCBI NO: 82051 NR Description: lipid body-associated membrane protein - carrot
  misc_feature (51)..(220): Homolog of NCBI NO: 1362166 NR Description: oleosin 1 - barley
  misc_feature (35)..(213): Homolog of NCBI NO: 3334279 NR Description: OLEOSIN 18 KD (OSE721)
  misc_feature (35)..(213): Homolog of NCBI NO: 28273373 NR Description: oleosin [Oryza sativa (japonica cultivar-group)]
  misc_feature (35)..(220): Homolog of NCBI NO: 1076818 NR Description: oleosin 17 - maize
  misc_feature (35)..(220): Homolog of NCBI NO: 129081 NR Description: Oleosin Zm-II (Oleosin 18 kDa) (Lipid
TTPSLCLQSSSSIHRSLHRPAAPRSQGLANETAAMADRDRSGIYGGAHATYGQQQQQGGGGRPMGEQVKGMLHDKGPTASQALTVVTLFPLGGLLLVLSGLALTASVVGLAVATPVFLIFSPVLVPAALLIGTAVMGFLTSGALGLGGLSSLTCLANTARQAFQRTPDYVEEAHRRMAEAAAHAGHKTAQAGQAIQGRAQEAGAGGGAGAGAGGGGRASS

SEQ ID NO: 52796 - protein, 186 aa, Glycine max
  peptide (1)..(186): Ceres Seq. ID no. 15170456
  misc_feature (44)..(161): Pfam Name: Oleosin Pfam Description: Oleosin
  misc_feature (1)..(172): Homolog of NCBI NO: 22651523 NR Description: oleosin [Olea europaea subsp. europaea]
  misc_feature (1)..(174): Homolog of NCBI NO: 10834827 NR Description: oleosin [Sesamum indicum]
  misc_feature (1)..(169): Homolog of NCBI NO: 10880961 NR Description: 19 kDa oleosin [Perilla frutescens]
  misc_feature (1)..(169): Homolog of NCBI NO: 9963897 NR Description: oleosin [Perilla frutescens]
  misc_feature (12)..(168): Homolog of NCBI NO: 82051 NR Description: lipid body-associated membrane protein - carrot
  misc_feature (17)..(186): Homolog of NCBI NO: 1362166 NR Description: oleosin 1 - barley
  misc_feature (1)..(179): Homolog of NCBI NO: 3334279 NR Description: OLEOSIN 18 KD (OSE721)
  misc_feature (1)..(179): Homolog of NCBI NO: 28273373 NR Description: oleosin [Oryza sativa (japonica cultivar-group)]
  misc_feature (1)..(186): Homolog of NCBI NO: 1076818 NR Description: oleosin 17 - maize
  misc_feature (1)..(186): Homolog of NCBI NO: 129081 NR Description: Oleosin Zm-II (Oleosin 18 kDa) (Lipid
MADRDRSGIYGGAHATYGQQQQQGGGGRPMGEQVKGMLHDKGPTASQALTVVTLFPLGGLLLVLSGLALTASVVGLAVATPVFLIFSPVLVPAALLIGTAVMGFLTSGALGLGGLSSLTCLANTARQAFQRTPDYVEEAHRRMAEAAAHAGHKTAQAGQAIQGRAQEAGAGGGAGAGAGGGGRASS

SEQ ID NO: 52797 - protein, 157 aa, Glycine max
  peptide (1)..(157): Ceres Seq. ID no. 15170457
  misc_feature (15)..(132): Pfam Name: Oleosin Pfam Description: Oleosin
  misc_feature (1)..(143): Homolog of NCBI NO: 22651523 NR Description: oleosin [Olea europaea subsp. europaea]
  misc_feature (1)..(145): Homolog of NCBI NO: 10834827 NR Description: oleosin [Sesamum indicum]
  misc_feature (1)..(140): Homolog of NCBI NO: 10880961 NR Description: 19 kDa oleosin [Perilla frutescens]
  misc_feature (1)..(140): Homolog of NCBI NO: 9963897 NR Description: oleosin [Perilla frutescens]
  misc_feature (1)..(139): Homolog of NCBI NO: 82051 NR Description: lipid body-associated membrane protein - carrot
  misc_feature (1)..(157): Homolog of NCBI NO: 1362166 NR Description: oleosin 1 - barley
  misc_feature (1)..(150): Homolog of NCBI NO: 3334279 NR Description: OLEOSIN 18 KD (OSE721)
  misc_feature (1)..(150): Homolog of NCBI NO: 28273373 NR Description: oleosin [Oryza sativa (japonica cultivar-group)]
  misc_feature (1)..(157): Homolog of NCBI NO: 1076818 NR Description: oleosin 17 - maize
  misc_feature (1)..(157): Homolog of NCBI NO: 129081 NR Description: Oleosin Zm-II (Oleosin 18 kDa) (Lipid
MGEQVKGMLHDKGPTASQALTVVTLFPLGGLLLVLSGLALTASVVGLAVATPVFLIFSPVLVPAALLIGTAVMGFLTSGALGLGGLSSLTCLANTARQAFQRTPDYVEEAHRRMAEAAAHAGHKTAQAGQAIQGRAQEAGAGGGAGAGAGGGGRASS

SEQ ID NO: 52798 - DNA, 1191 bp, Glycine max
  misc_feature (1)..(1191): Ceres Seq. ID no. 15170465
atatatttctaactaattgtgcttatccttattgagagaaaaaatggccaaatcaatcaaattctttgagttgaacacaggggccaagattccttctcttgggttagggacttggcaagctgaacctggtgttgtagctgaagctctcaccacagccattcaggttggatacaggcatattgactgtgctagtgcgtataagaatcaagcagagattggttctgctcttaagaagctttttgatgatggtgtggtgaagcgtgaggacttatggatcacttccaaactctggtgttcagatcatgcaccagaagatgtgccaaaagcattggataaaacattacaggaattgcaacttgactatcttgacctctatctgatccactggccagtccgcatgaaaagtggaacatttggattcaataaagaatatcttgagcaaccagacattcccaatacatggagagcaatggaggcactctatgactcagacaaggctagagccataggagtgagcaatttctcttcaaagaagcttcaagatttgttagatatagcaagagtggttcctgctgttaaccaagtggaattgcacccaggatggcagcagccaaagttgcgcgcattttgtgaatctaaagaaattcatctatctggatattctccactaggttcaccagcagctctcaaaagtgatattcttaagaatcctgttgtcacagagattgcagagagattggggaagacaccagcacaagttgcccttcgatggggcttgcaagcaggtcatagtgtgcttcctaagagcactaatgagtccagaatcaagggaaattttgatatctttgactggtctattcctcaagatttgatgaccaagatctctgaaattaagcaggaaaggctagttaaggccagtttttttgttcacgagacctatggtgcctataggagcattgaagacttctgggatggtgaactctgagcaatatgcatctttgagacgttgaaaaatacattgctcctagagcaaatttattctgccttatacccactagttgtagtgattcaagtgagattttgagaagtgttactattgatggtaacaccgaataagtagccaagagttatttttcatttaatgattgtatcttttattcaatataataaagtgagttgagtgaatttgac

SEQ ID NO: 52799 - protein, 313 aa, Glycine max
  peptide (1)..(313): Ceres Seq. ID no. 15170466
  misc_feature (11)..(313): Homolog of NCBI NO: 40781599 NR Description: reductase 1 [Hydrangea macrophylla]
  misc_feature (1)..(313): Homolog of NCBI NO: 18404526 NR Description: aldo/keto reductase family [Arabidopsis thaliana]
  misc_feature (6)..(313): Homolog of NCBI NO: 34908280 NR Description: putative aldose reductase
  misc_feature (1)..(311): Homolog of NCBI NO: 13160399 NR Description: aldose reductase [Digitalis purpurea]
  misc_feature (1)..(311): Homolog of NCBI NO: 13160397 NR Description: aldose reductase [Digitalis purpurea]
  misc_feature (1)..(313): Homolog of NCBI NO: 15232354 NR Description: aldo/keto reductase family [Arabidopsis thaliana]
  misc_feature (12)..(313): Homolog of NCBI NO: 28393400 NR Description: putative aldo/keto reductase [Arabidopsis
  misc_feature (1)..(313): Homolog of NCBI NO: 30687261 NR Description: aldo/keto reductase family [Arabidopsis thaliana]
  misc_feature (1)..(313): Homolog of NCBI NO: 30687247 NR Description: aldo/keto reductase family [Arabidopsis thaliana]
  misc_feature (1)..(313): Homolog of NCBI NO: 7431112 NR Description: abscisic acid activated protein - alfalfa
MAKSIKFFELNTGAKIPSLGLGTWQAEPGVVAEALTTAIQVGYRHIDCASAYKNQAEIGSALKKLFDDGVVKREDLWITSKLWCSDHAPEDVPKALDKTLQELQLDYLDLYLIHWPVRMKSGTFGFNKEYLEQPDIPNTWRAMEALYDSDKARAIGVSNFSSKKLQDLLDIARVVPAVNQVELHPGWQQPKLRAFCESKEIHLSGYSPLGSPAALKSDILKNPVVTEIAERLGKTPAQVALRWGLQAGHSVLPKSTNESRIKGNFDIFDWSIPQDLMTKISEIKQERLVKASFFVHETYGAYRSIEDFWDGEL

SEQ ID NO: 52800 - protein, 195 aa, Glycine max
  peptide (1)..(195): Ceres Seq. ID no. 15170467
  misc_feature (1)..(195): Homolog of NCBI NO: 40781599 NR Description: reductase 1 [Hydrangea macrophylla]
  misc_feature (1)..(195): Homolog of NCBI NO: 18404526 NR Description: aldo/keto reductase family [Arabidopsis thaliana]
  misc_feature (1)..(195): Homolog of NCBI NO: 34908280 NR Description: putative aldose reductase
  misc_feature (1)..(193): Homolog of NCBI NO: 13160399 NR Description: aldose reductase [Digitalis purpurea]
  misc_feature (1)..(193): Homolog of NCBI NO: 13160397 NR Description: aldose reductase [Digitalis purpurea]
  misc_feature (1)..(195): Homolog of NCBI NO: 15232354 NR Description: aldo/keto reductase family [Arabidopsis thaliana]
  misc_feature (1)..(195): Homolog of NCBI NO: 28393400 NR Description: putative aldo/keto reductase [Arabidopsis
  misc_feature (1)..(195): Homolog of NCBI NO: 30687261 NR Description: aldo/keto reductase family [Arabidopsis thaliana]
  misc_feature (1)..(195): Homolog of NCBI NO: 30687247 NR Description: aldo/keto reductase family [Arabidopsis thaliana]
  misc_feature (1)..(195): Homolog of NCBI NO: 7431112 NR Description: abscisic acid activated protein - alfalfa
MKSGTFGFNKEYLEQPDIPNTWRAMEALYDSDKARAIGVSNFSSKKLQDLLDIARVVPAVNQVELHPGWQQPKLRAFCESKEIHLSGYSPLGSPAALKSDILKNPVVTEIAERLGKTPAQVALRWGLQAGHSVLPKSTNESRIKGNFDIFDWSIPQDLMTKISEIKQERLVKASFFVHETYGAYRSIEDFWDGEL

SEQ ID NO: 52801 - protein, 171 aa, Glycine max
  peptide (1)..(171): Ceres Seq. ID no. 15170468
  misc_feature (1)..(171): Homolog of NCBI NO: 40781599 NR Description: reductase 1 [Hydrangea macrophylla]
  misc_feature (1)..(171): Homolog of NCBI NO: 18404526 NR Description: aldo/keto reductase family [Arabidopsis thaliana]
  misc_feature (1)..(171): Homolog of NCBI NO: 34908280 NR Description: putative aldose reductase
  misc_feature (1)..(169): Homolog of NCBI NO: 13160399 NR Description: aldose reductase [Digitalis purpurea]
  misc_feature (1)..(169): Homolog of NCBI NO: 13160397 NR Description: aldose reductase [Digitalis purpurea]
  misc_feature (1)..(171): Homolog of NCBI NO: 15232354 NR Description: aldo/keto reductase family [Arabidopsis thaliana]
  misc_feature (1)..(171): Homolog of NCBI NO: 28393400 NR Description: putative aldo/keto reductase [Arabidopsis
  misc_feature (1)..(171): Homolog of NCBI NO: 30687261 NR Description: aldo/keto reductase family [Arabidopsis thaliana]
  misc_feature (1)..(171): Homolog of NCBI NO: 30687247 NR Description: aldo/keto reductase family [Arabidopsis thaliana]
  misc_feature (1)..(171): Homolog of NCBI NO: 7431112 NR Description: abscisic acid activated protein - alfalfa
MEALYDSDKARAIGVSNFSSKKLQDLLDIARVVPAVNQVELHPGWQQPKLRAFCESKEIHLSGYSPLGSPAALKSDILKNPVVTEIAERLGKTPAQVALRWGLQAGHSVLPKSTNESRIKGNFDIFDWSIPQDLMTKISEIKQERLVKASFFVHETYGAYRSIEDFWDGEL

SEQ ID NO: 52802 - DNA, 1462 bp, Glycine max
  misc_feature (1)..(1462): Ceres Seq. ID no. 15176325
actagagcagtggaaaccaactcaaattcactcgcgagcatacacgaacacacgacaaaccgtatagatcagtcgtcgaagccagtgtaagcaaacatgcaaccgcagcaggacgccgccgaggacgtggtcattgtcggcgccggcctcgccggtgtcggcgtcgccctgggactccacaggaagggcgtgcggagcgtggtgctggagtcgtcgccggcgcttcggacgtccggcttcgcgttcatgacatggaccaacgccttccgcgcgcttgacgccctcggcgtcggcgacaagatgaggagccaccacctgcaggttcagggggtgcgcgtcatgtctccgactaccggggaagtggtgcgagagctggatctccgggtgcaaggcaaactgggaccccacgaagcccggtgcgtgcagcgtaacgtgctcctccaggcgctggaggaagagcttccggcagacaccatccgctacaactccaggatcgtctccatcgacgacgacaaagaaggcggtggcgatgccaagatcctccatctcgccgacggttcgatgctccgagcaaaggtgctgatcggttgcgacgggatcaactcagtggtggccaaatggctggggctcgccaagccgctggactcggggcgtagagccacgcgggggcacgtcaagtaccccaatggccacggcttccagcccaagttcatgcagttcagcggcaacggcttccgtgccggcctggtgccctgcggcgacacggacgtgtactggttcctgacgtggtcaccttcctgtccggacgggaaggaggacgttgaccatagcccggcggagatgaagcagttcgtcctggccaagctgcggagcatcaaggcacctgacgaggtgctggaagcggtcgagaggagcgagatgaacgacgtcctcgtggcgcccctgaggtaccgcccgccgctgtcgctcctcttcgggagcatcagcaaggggaacgtgtgcgtcgccggcgacgcgctccaccccacgacgccggacctggcacagggcgcgtgcatcgcgctggaggatgccgtcgtcctcgcgcggtgcctcggcgacgccatggcccgcgatggcgacggcactgagacgatcgaggcggctctgcgccggtacgccgggatccggcggtggaggagcgcgcaggtgatcgcggcgtcctacatggtggggcgtgtgcagcagagcgagcacgccgtggtgagatttgcgcgggacaggctgctgtcaggggtgctcgccaaggggctcctcatgacgccggactacgactgtggcacactttgactgcgaggggtctggttctggcagaagccatttgtaaaggggtctggttcgcgacttatggggctggacgaaagcctgtttttccaccagtgacggtcctatgtatccagttgtacgaatacggctttcaagc

SEQ ID NO: 52803 - protein, 410 aa, Glycine max
  peptide (1)..(410): Ceres Seq. ID no. 15176326
  misc_feature (158)..(370): Pfam Name: Monooxygenase Pfam Description: Monooxygenase
  misc_feature (105)..(267): Homolog of NCBI NO: 7485202 NR Description: hypothetical protein - Arabidopsis thaliana
  misc_feature (11)..(410): Homolog of NCBI NO: 11358512 NR Description: monooxygenase 1 [imported] - Arabidopsis thaliana
  misc_feature (1)..(410): Homolog of NCBI NO: 4164576 NR Description: CTF2A [Arabidopsis thaliana]
  misc_feature (1)..(410): Homolog of NCBI NO: 21536869 NR Description: putative monooxygenase [Arabidopsis thaliana]
  misc_feature (1)..(410): Homolog of NCBI NO: 18403916 NR Description: monooxygenase family [Arabidopsis thaliana]
  misc_feature (1)..(410): Homolog of NCBI NO: 34393624 NR Description: putative monooxygenase 2 [Oryza sativa (japonica
  misc_feature (56)..(410): Homolog of NCBI NO: 24745927 NR Description: monooxygenase [Solanum tuberosum]
  misc_feature (4)..(396): Homolog of NCBI NO: 21537119 NR Description: monooxygenase [Arabidopsis thaliana]
  misc_feature (4)..(410): Homolog of NCBI NO: 15239070 NR Description: monooxygenase 2 (MO2), putative [Arabidopsis
  misc_feature (4)..(410): Homolog of NCBI NO: 15233923 NR Description: monooxygenase 2 (MO2) [Arabidopsis thaliana]
MQPQQDAAEDVVIVGAGLAGVGVALGLHRKGVRSVVLESSPALRTSGFAFMTWTNAFRALDALGVGDKMRSHHLQVQGVRVMSPTTGEVVRELDLRVQGKLGPHEARCVQRNVLLQALEEELPADTIRYNSRIVSIDDDKEGGGDAKILHLADGSMLRAKVLIGCDGINSVVAKWLGLAKPLDSGRRATRGHVKYPNGHGFQPKFMQFSGNGFRAGLVPCGDTDVYWFLTWSPSCPDGKEDVDHSPAEMKQFVLAKLRSIKAPDEVLEAVERSEMNDVLVAPLRYRPPLSLLFGSISKGNVCVAGDALHPTTPDLAQGACIALEDAVVLARCLGDAMARDGDGTETIEAALRRYAGIRRWRSAQVIAASYMVGRVQQSEHAVVRFARDRLLSGVLAKGLLMTPDYDCGTL

SEQ ID NO: 52804 - protein, 360 aa, Glycine max
  peptide (1)..(360): Ceres Seq. ID no. 15176327
  misc_feature (108)..(320): Pfam Name: Monooxygenase Pfam Description: Monooxygenase
  misc_feature (55)..(217): Homolog of NCBI NO: 7485202 NR Description: hypothetical protein - Arabidopsis thaliana
  misc_feature (1)..(360): Homolog of NCBI NO: 11358512 NR Description: monooxygenase 1 [imported] - Arabidopsis thaliana
  misc_feature (1)..(360): Homolog of NCBI NO: 4164576 NR Description: CTF2A [Arabidopsis thaliana]
  misc_feature (1)..(360): Homolog of NCBI NO: 21536869 NR Description: putative monooxygenase [Arabidopsis thaliana]
  misc_feature (1)..(360): Homolog of NCBI NO: 18403916 NR Description: monooxygenase family [Arabidopsis thaliana]
  misc_feature (1)..(360): Homolog of NCBI NO: 34393624 NR Description: putative monooxygenase 2 [Oryza sativa (japonica
  misc_feature (6)..(360): Homolog of NCBI NO: 24745927 NR Description: monooxygenase [Solanum tuberosum]
  misc_feature (1)..(346): Homolog of NCBI NO: 21537119 NR Description: monooxygenase [Arabidopsis thaliana]
  misc_feature (1)..(360): Homolog of NCBI NO: 15239070 NR Description: monooxygenase 2 (MO2), putative [Arabidopsis
  misc_feature (1)..(360): Homolog of NCBI NO: 15233923 NR Description: monooxygenase 2 (MO2) [Arabidopsis thaliana]
MTWTNAFRALDALGVGDKMRSHHLQVQGVRVMSPTTGEVVRELDLRVQGKLGPHEARCVQRNVLLQALEEELPADTIRYNSRIVSIDDDKEGGGDAKILHLADGSMLRAKVLIGCDGINSVVAKWLGLAKPLDSGRRATRGHVKYPNGHGFQPKFMQFSGNGFRAGLVPCGDTDVYWFLTWSPSCPDGKEDVDHSPAEMKQFVLAKLRSIKAPDEVLEAVERSEMNDVLVAPLRYRPPLSLLFGSISKGNVCVAGDALHPTTPDLAQGACIALEDAVVLARCLGDAMARDGDGTETIEAALRRYAGIRRWRSAQVIAASYMVGRVQQSEHAVVRFARDRLLSGVLAKGLLMTPDYDCGTL

SEQ ID NO: 52805 - protein, 342 aa, Glycine max
  peptide (1)..(342): Ceres Seq. ID no. 15176328
  misc_feature (90)..(302): Pfam Name: Monooxygenase Pfam Description: Monooxygenase
  misc_feature (37)..(199): Homolog of NCBI NO: 7485202 NR Description: hypothetical protein - Arabidopsis thaliana
  misc_feature (1)..(342): Homolog of NCBI NO: 11358512 NR Description: monooxygenase 1 [imported] - Arabidopsis thaliana
  misc_feature (1)..(342): Homolog of NCBI NO: 4164576 NR Description: CTF2A [Arabidopsis thaliana]
  misc_feature (1)..(342): Homolog of NCBI NO: 21536869 NR Description: putative monooxygenase [Arabidopsis thaliana]
  misc_feature (1)..(342): Homolog of NCBI NO: 18403916 NR Description: monooxygenase family [Arabidopsis thaliana]
  misc_feature (1)..(342): Homolog of NCBI NO: 34393624 NR Description: putative monooxygenase 2 [Oryza sativa (japonica
  misc_feature (1)..(342): Homolog of NCBI NO: 24745927 NR Description: monooxygenase [Solanum tuberosum]
  misc_feature (1)..(328): Homolog of NCBI NO: 21537119 NR Description: monooxygenase [Arabidopsis thaliana]
  misc_feature (1)..(342): Homolog of NCBI NO: 15239070 NR Description: monooxygenase 2 (MO2), putative [Arabidopsis
  misc_feature (1)..(342): Homolog of NCBI NO: 15233923 NR Description: monooxygenase 2 (MO2) [Arabidopsis thaliana]
MRSHHLQVQGVRVMSPTTGEVVRELDLRVQGKLGPHEARCVQRNVLLQALEEELPADTIRYNSRIVSIDDDKEGGGDAKILHLADGSMLRAKVLIGCDGINSVVAKWLGLAKPLDSGRRATRGHVKYPNGHGFQPKFMQFSGNGFRAGLVPCGDTDVYWFLTWSPSCPDGKEDVDHSPAEMKQFVLAKLRSIKAPDEVLEAVERSEMNDVLVAPLRYRPPLSLLFGSISKGNVCVAGDALHPTTPDLAQGACIALEDAVVLARCLGDAMARDGDGTETIEAALRRYAGIRRWRSAQVIAASYMVGRVQQSEHAVVRFARDRLLSGVLAKGLLMTPDYDCGTL

SEQ ID NO: 52806 - DNA, 997 bp, Glycine max
  misc_feature (1)..(997): Ceres Seq. ID no. 14309384
attcactctccttcatctctctcgctttctctctctttctctggcctctctctctctctcagaatttacacacgatccaatgacaacgaccaacaacgtgaacggatgttttggagacacgaagctgaccaaagtgtttgtaggaggattggcttgggacactaacaaagaagcaatgcatgatcatttcatcaagtacggtgatatcttggaggcagtcatcatctccgacaaactcactcgccgttccaaaggctacggctttgtgactttcaaagatgcggaagccgcgaagagggcttgtgaagactcgactccgatcatcaatggccgccgtgccaactgcaatcttgcnttccctcggtgggccgccttcgtagatctcccaccgtggcctcccctcaacaaggatctaagcacgtgggtaggcccatgtcaggacatgtagggaacaatcaagctcaatggtactacccctgcgggattcgcacaccagcaacatcaacaacaccatcatcagaccattcctttctatgggtaccctccctcctatgtcgccctgaacatgaccttcaatcaaaaagttggatacgttggaggcacctatatgagcggatactatgcacaaccgcaaccacaatcgctaccactgccacaaccacaatattaccaccaccatcacatgtatggtggaggaagagtaatggttggggcaaacccgatgatgcctctctacactgtctatccttatcatcaatctcacgccatcggttttcctcaaccctcttatacgaaacccatatcaggtacagttggaggaggaggagatagcataatgaagaaggccataagttgatgggctacacaacaagttgttgaccaaacgattcagcccaagaatattcattttctccggctcacaatgtttatttttaatatagagacaaatcattgttaaattaattcctttacatttcataatttattcattaaaact

SEQ ID NO: 52807 - protein, 148 aa, Glycine max
  peptide (1)..(148): Ceres Seq. ID no. 14309385
  misc_feature (45)..(100): Pfam Name: RNA recognition motif. (a.k.a. RRM, RBD, or RNP domain) Pfam Description: RNA recognition motif. (a.k.a. RRM, RBD, or RNP
  misc_feature (39)..(148): Homolog of NCBI NO: 15226439 NR Description: RNA recognition motif (RRM)-containing protein
  misc_feature (33)..(118): Homolog of NCBI NO: 25406448 NR Description: probable RNA-binding protein, 24808-23340
  misc_feature (35)..(148): Homolog of NCBI NO: 34905758 NR Description: similar to RNA-binding protein
  misc_feature (26)..(148): Homolog of NCBI NO: 25518498 NR Description: hypothetical protein F9H16.14 - Arabidopsis
  misc_feature (33)..(148): Homolog of NCBI NO: 22330665 NR Description: RNA recognition motif (RRM)-containing protein
  misc_feature (26)..(148): Homolog of NCBI NO: 23505939 NR Description: At1g20880/F9H16_14 [Arabidopsis thaliana]
  misc_feature (26)..(148): Homolog of NCBI NO: 18394923 NR Description: RNA recognition motif (RRM)-containing protein
  misc_feature (26)..(148): Homolog of NCBI NO: 15010636 NR Description: At1g20880/F9H16_14 [Arabidopsis thaliana]
  misc_feature (27)..(148): Homolog of NCBI NO: 15232579 NR Description: RNA recognition motif (RRM)-containing protein
  misc_feature (27)..(148): Homolog of NCBI NO: 21536939 NR Description: RNA binding protein-like [Arabidopsis thaliana]
  misc_feature (118)..(118): Xaa is any aa, unknown or other
FTLLHLSRFLSLSLASLSLSEFTHDPMTTTNNVNGCFGDTKLTKVFVGGLAWDTNKEAMHDHFIKYGDILEAVIISDKLTRRSKGYGFVTFKDAEAAKRACEDSTPIINGRRANCNLXFPRWAAFVDLPPWPPLNKDLSTWVGPCQDM

SEQ ID NO: 52808 - protein, 132 aa, Glycine max
  peptide (1)..(132): Ceres Seq. ID no. 14309386
MSGHVGNNQAQWYYPCGIRTPATSTTPSSDHSFLWVPSLLCRPEHDLQSKSWIRWRHLYERILCTTATTIATTATTTILPPPSHVWWRKSNGWGKPDDASLHCLSLSSISRHRFSSTLLYETHIRYSWRRRR

SEQ ID NO: 52809 - protein, 122 aa, Glycine max
  peptide (1)..(122): Ceres Seq. ID no. 14309387
  misc_feature (19)..(74): Pfam Name: RNA recognition motif. (a.k.a. RRM, RBD, or RNP domain) Pfam Description: RNA recognition motif. (a.k.a. RRM, RBD, or RNP
  misc_feature (13)..(122): Homolog of NCBI NO: 15226439 NR Description: RNA recognition motif (RRM)-containing protein
  misc_feature (7)..(92): Homolog of NCBI NO: 25406448 NR Description: probable RNA-binding protein, 24808-23340
  misc_feature (9)..(122): Homolog of NCBI NO: 34905758 NR Description: similar to RNA-binding protein
  misc_feature (1)..(122): Homolog of NCBI NO: 25518498 NR Description: hypothetical protein F9H16.14 - Arabidopsis
  misc_feature (7)..(122): Homolog of NCBI NO: 22330665 NR Description: RNA recognition motif (RRM)-containing protein
  misc_feature (1)..(122): Homolog of NCBI NO: 18394923 NR Description: RNA recognition motif (RRM)-containing protein
  misc_feature (1)..(122): Homolog of NCBI NO: 23505939 NR Description: At1g20880/F9H16_14 [Arabidopsis thaliana]
  misc_feature (1)..(122): Homolog of NCBI NO: 15010636 NR Description: At1g20880/F9H16_14 [Arabidopsis thaliana]
  misc_feature (1)..(122): Homolog of NCBI NO: 15232579 NR Description: RNA recognition motif (RRM)-containing protein
  misc_feature (1)..(122): Homolog of NCBI NO: 21536939 NR Description: RNA binding protein-like [Arabidopsis thaliana]
  misc_feature (92)..(92): Xaa is any aa, unknown or other
MTTTNNVNGCFGDTKLTKVFVGGLAWDTNKEAMHDHFIKYGDILEAVIISDKLTRRSKGYGFVTFKDAEAAKRACEDSTPIINGRRANCNLXFPRWAAFVDLPPWPPLNKDLSTWVGPCQDM

SEQ ID NO: 52810 - DNA, 1782 bp, Glycine max
  misc_feature (1)..(1782): Ceres Seq. ID no. 15170434
attctgtttctgtgcctctccacactgaaaaaactgtacgcataacacagcagagagagctccctcgtcgattctaaattcgcattgtggcgcgtggttcacactcgacgcgttttgcggaatttcgactggcccagggcaccgttactcttttttcgaatttcactcctcaaagagaggaatgtgtgatggattctgtggagagtcagggtttcagaggtgtggatgagagttttggagagtgcttctcctgttgaatctgtcactcatttgaatatggctttgcagaagtatgctccttctggcaatgcaccttctgttaatatgaaacatttgagcttctccagtaaggtgcctaagaaagctgagctcgatgaagcaaatctgaatcacaacatggatgtggatattgaccttagggaaatttattttctcattatgcactttctttctgctgggccatgtcataaaactcatttacagttttggaatgagcttcttgagcatcaacttttgcctagaaggtatcatgcttggtattcaaggactggggcatgtagtggagacaaagatgatgatggtctatcattccctttaaattacaatatgttagtagagaggtattctcatattgaaaaggatcacttggtaaagcttttgaagcaattgttgttaaatacagcctccccatcactgggtatgaatcttggaaatgctccaaatgcagctgatgtacctactcttctaggaagcggttcattttcacttctgagctatgatagggacaaaatgaaagaagtcaaatggccgcctcctcatatgcgctggcctcatatgaaagccaatcaggttcatgggcttaatttgagggaaattgggggtggtttcccaagacaccaccgtgcaccatctatacgtgctgcatgctatgccattgcaaaaccttctaccatggtgcaaaagatgcaaaatatcaagaggttaagaggacatcgcaatgctgtctattgtgctatatttgatcgggcaggaagatatgtgattactggttccgatgaccgacttgtaaaaatttggtcaatggaaactgcatattgtttggccagttgccgtggacatgatggtgacatcactgacttggctgtgagttcaaacaatgctttagttgcatcctcatcaaatgactgtgtcattcgagtttggcgcttgccagatggcttgccaatatcagttttgcggggacatactggagctgttacagccatagcatttagtcccagaccgaatgctgtataccagcttttatctagtcaatgcacgtgattgtgctacgatcgtggggtggcgaagcagagtggccccttgccactcctaaggcactcgctgcggcatgcttggttgttgcagtgccattcatggaacaaattgcagaaaatcagggtgatttgtggacttcacagctgctccttcatttgccctgttgccaaacaagcccttgcgacctttagcgttgctgggcaaggctgtgacatttgctgtccctggaaaagcgtctgcaacctcccatcttccatccccttctcttccacaggggtggtgctagctaacctagcaactgatgggtagagggtcctagttagggtttcagttttaattctcttgtcttttttgatttgttgggcctcgatttgagtccaatagttgttgttgttattgttgttattgttgttttttaatgtaaaacatagcataataaaagaatataatagtattaaaaaatat

SEQ ID NO: 52811 - protein, 365 aa, Glycine max
  peptide (1)..(365): Ceres Seq. ID no. 15170435
  misc_feature (248)..(285): Pfam Name: WD domain, G-beta repeat Pfam Description: WD domain, G-beta repeat
  misc_feature (116)..(351): Homolog of NCBI NO: 23831562 NR Description: WD-repeat protein 9
  misc_feature (116)..(351): Homolog of NCBI NO: 14970564 NR Description: WDR9 protein, form B [Homo sapiens]
  misc_feature (143)..(352): Homolog of NCBI NO: 7487572 NR Description: hypothetical protein T30B22.29 - Arabidopsis
  misc_feature (59)..(352): Homolog of NCBI NO: 25409048 NR Description: probable WD-40 repeat protein [imported] -
  misc_feature (59)..(352): Homolog of NCBI NO: 20196881 NR Description: hypothetical protein [Arabidopsis thaliana]
  misc_feature (59)..(182): Homolog of NCBI NO: 30690675 NR Description: transducin / WD-40 repeat protein family
  misc_feature (161)..(362): Homolog of NCBI NO: 30690675 NR Description: transducin / WD-40 repeat protein family
  misc_feature (59)..(362): Homolog of NCBI NO: 22135972 NR Description: putative WD-40 repeat protein [Arabidopsis
  misc_feature (18)..(355): Homolog of NCBI NO: 9759426 NR Description: WD-40 repeat protein-like [Arabidopsis thaliana]
  misc_feature (18)..(362): Homolog of NCBI NO: 15239884 NR Description: transducin / WD-40 repeat protein family
MRVLESASPVESVTHLNMALQKYAPSGNAPSVNMKHLSFSSKVPKKAELDEANLNHNMDVDIDLREIYFLIMHFLSAGPCHKTHLQFWNELLEHQLLPRRYHAWYSRTGACSGDKDDDGLSFPLNYNMLVERYSHIEKDHLVKLLKQLLLNTASPSLGMNLGNAPNAADVPTLLGSGSFSLLSYDRDKMKEVKWPPPHMRWPHMKANQVHGLNLREIGGGFPRHHRAPSIRAACYAIAKPSTMVQKMQNIKRLRGHRNAVYCAIFDRAGRYVITGSDDRLVKIWSMETAYCLASCRGHDGDITDLAVSSNNALVASSSNDCVIRVWRLPDGLPISVLRGHTGAVTAIAFSPRPNAVYQLLSSQCT

SEQ ID NO: 52812 - protein, 348 aa, Glycine max
  peptide (1)..(348): Ceres Seq. ID no. 15170436
  misc_feature (231)..(268): Pfam Name: WD domain, G-beta repeat Pfam Description: WD domain, G-beta repeat
  misc_feature (99)..(334): Homolog of NCBI NO: 16445438 NR Description: WD repeat domain 9 isoform B
  misc_feature (99)..(334): Homolog of NCBI NO: 14970564 NR Description: WDR9 protein, form B [Homo sapiens]
  misc_feature (126)..(335): Homolog of NCBI NO: 7487572 NR Description: hypothetical protein T30B22.29 - Arabidopsis
  misc_feature (42)..(335): Homolog of NCBI NO: 25409048 NR Description: probable WD-40 repeat protein [imported] -
  misc_feature (42)..(335): Homolog of NCBI NO: 20196881 NR Description: hypothetical protein [Arabidopsis thaliana]
  misc_feature (42)..(165): Homolog of NCBI NO: 30690675 NR Description: transducin / WD-40 repeat protein family
  misc_feature (144)..(345): Homolog of NCBI NO: 30690675 NR Description: transducin / WD-40 repeat protein family
  misc_feature (42)..(345): Homolog of NCBI NO: 22135972 NR Description: putative WD-40 repeat protein [Arabidopsis
  misc_feature (1)..(338): Homolog of NCBI NO: 9759426 NR Description: WD-40 repeat protein-like [Arabidopsis thaliana]
  misc_feature (1)..(345): Homolog of NCBI NO: 15239884 NR Description: transducin / WD-40 repeat protein family
MALQKYAPSGNAPSVNMKHLSFSSKVPKKAELDEANLNHNMDVDIDLREIYFLIMHFLSAGPCHKTHLQFWNELLEHQLLPRRYHAWYSRTGACSGDKDDDGLSFPLNYNMLVERYSHIEKDHLVKLLKQLLLNTASPSLGMNLGNAPNAADVPTLLGSGSFSLLSYDRDKMKEVKWPPPHMRWPHMKANQVHGLNLREIGGGFPRHHRAPSIRAACYAIAKPSTMVQKMQNIKRLRGHRNAVYCAIFDRAGRYVITGSDDRLVKIWSMETAYCLASCRGHDGDITDLAVSSNNALVASSSNDCVIRVWRLPDGLPISVLRGHTGAVTAIAFSPRPNAVYQLLSSQCT

SEQ ID NO: 52813 - protein, 332 aa, Glycine max
  peptide (1)..(332): Ceres Seq. ID no. 15170437
  misc_feature (215)..(252): Pfam Name: WD domain, G-beta repeat Pfam Description: WD domain, G-beta repeat
  misc_feature (83)..(318): Homolog of NCBI NO: 23831562 NR Description: WD-repeat protein 9
  misc_feature (83)..(318): Homolog of NCBI NO: 14970564 NR Description: WDR9 protein, form B [Homo sapiens]
  misc_feature (110)..(319): Homolog of NCBI NO: 7487572 NR Description: hypothetical protein T30B22.29 - Arabidopsis
  misc_feature (26)..(319): Homolog of NCBI NO: 25409048 NR Description: probable WD-40 repeat protein [imported] -
  misc_feature (26)..(319): Homolog of NCBI NO: 20196881 NR Description: hypothetical protein [Arabidopsis thaliana]
  misc_feature (26)..(149): Homolog of NCBI NO: 30690675 NR Description: transducin / WD-40 repeat protein family
  misc_feature (128)..(329): Homolog of NCBI NO: 30690675 NR Description: transducin / WD-40 repeat protein family
  misc_feature (26)..(329): Homolog of NCBI NO: 22135972 NR Description: putative WD-40 repeat protein [Arabidopsis
  misc_feature (1)..(322): Homolog of NCBI NO: 9759426 NR Description: WD-40 repeat protein-like [Arabidopsis thaliana]
  misc_feature (1)..(329): Homolog of NCBI NO: 15239884 NR Description: transducin / WD-40 repeat protein family
MKHLSFSSKVPKKAELDEANLNHNMDVDIDLREIYFLIMHFLSAGPCHKTHLQFWNELLEHQLLPRRYHAWYSRTGACSGDKDDDGLSFPLNYNMLVERYSHIEKDHLVKLLKQLLLNTASPSLGMNLGNAPNAADVPTLLGSGSFSLLSYDRDKMKEVKWPPPHMRWPHMKANQVHGLNLREIGGGFPRHHRAPSIRAACYAIAKPSTMVQKMQNIKRLRGHRNAVYCAIFDRAGRYVITGSDDRLVKIWSMETAYCLASCRGHDGDITDLAVSSNNALVASSSNDCVIRVWRLPDGLPISVLRGHTGAVTAIAFSPRPNAVYQLLSSQCT

SEQ ID NO: 52814 - DNA, 813 bp, Glycine max
  misc_feature (1)..(813): Ceres Seq. ID no. 15176321
gtgctttctcaggggttggcttctcctccccactcagtcctcggttcccggtccggtcccgttccgttcgttagggtttagtagtagcggggaagaggaaggaatggcggacgtcgagtaccgctgcttcgtcggcggcctcgcctgggccaccgacgaccagtccctccagaacgccttctccaagtacggcgacgtcatcgactccaagatcatcactgacagggagacgggccgatcccgcgggttcgggttcgtcaccttcgcgtcggacgaggcgatgcgccaggcgatcgaggccatgaacggccaggacctggacggccgcaacatcaccgtcaacgaggcgcagtcccgtcgctccggcggaggaggcggcggcggcttcggcggcggcggtggcggctacgggggccagcgccgtgagggcggaggcggcggcggctacggcggcggcggcggcggctacggaggtggccgcagcggcggcggcggcggctacggcagccgtgacggcggcggctacggaggcggcggcggcggcggctacggcggcagccgcggcggctccggcggcggcaactggagggagtgaatggtggggcccctagctggccagttatcctagttaccgatccctttttttacctgtctaccaaagtgttatcgctcgctcccgagtaccctagatctcgctccatcgcgtaggttccgagatgttctggctaccgttagatgtgacgccgctaccgttccgtgttacttgttaccgtccctgttccgttcgctatgaatgaaatgaaaaatcagagc

SEQ ID NO: 52815 - protein, 197 aa, Glycine max
  peptide (1)..(197): Ceres Seq. ID no. 15176322
  misc_feature (42)..(113): Pfam Name: RNA recognition motif. (a.k.a. RRM, RBD, or RNP domain) Pfam Description: RNA recognition motif. (a.k.a. RRM, RBD, or RNP
  misc_feature (37)..(196): Homolog of NCBI NO: 7439985 NR Description: glycine-rich RNA-binding protein - rice
  misc_feature (37)..(195): Homolog of NCBI NO: 15226605 NR Description: glycine-rich RNA-binding protein (AtGRP7)
  misc_feature (36)..(196): Homolog of NCBI NO: 18076086 NR Description: glycine-rich RNA-binding protein [Ricinus
  misc_feature (37)..(196): Homolog of NCBI NO: 2331131 NR Description: glycine-rich protein [Oryza sativa]
  misc_feature (36)..(196): Homolog of NCBI NO: 20152613 NR Description: putative glycine rich protein [Rumex obtusifolius]
  misc_feature (35)..(196): Homolog of NCBI NO: 1076731 NR Description: RNA binding protein - barley
  misc_feature (36)..(196): Homolog of NCBI NO: 10799202 NR Description: glycine-rich RNA-binding protein [Sorghum bicolor]
  misc_feature (36)..(196): Homolog of NCBI NO: 544423 NR Description: Glycine-rich RNA-binding protein 2
  misc_feature (35)..(196): Homolog of NCBI NO: 7439981 NR Description: glycine-rich RNA-binding protein GRP1 - wheat
  misc_feature (35)..(197): Homolog of NCBI NO: 7439979 NR Description: glycine-rich RNA-binding protein,
CFLRGWLLLPTQSSVPGPVPFRSLGFSSSGEEEGMADVEYRCFVGGLAWATDDQSLQNAFSKYGDVIDSKIITDRETGRSRGFGFVTFASDEAMRQAIEAMNGQDLDGRNITVNEAQSRRSGGGGGGGFGGGGGGYGGQRREGGGGGGYGGGGGGYGGGRSGGGGGYGSRDGGGYGGGGGGGYGGSRGGSGGGNWRE

SEQ ID NO: 52816 - protein, 163 aa, Glycine max
  peptide (1)..(163): Ceres Seq. ID no. 15176323
  misc_feature (8)..(79): Pfam Name: RNA recognition motif. (a.k.a. RRM, RBD, or RNP domain) Pfam Description: RNA recognition motif. (a.k.a. RRM, RBD, or RNP
  misc_feature (3)..(162): Homolog of NCBI NO: 7439985 NR Description: glycine-rich RNA-binding protein - rice
  misc_feature (3)..(161): Homolog of NCBI NO: 15226605 NR Description: glycine-rich RNA-binding protein (AtGRP7)
  misc_feature (2)..(162): Homolog of NCBI NO: 18076086 NR Description: glycine-rich RNA-binding protein [Ricinus
  misc_feature (3)..(162): Homolog of NCBI NO: 2331131 NR Description: glycine-rich protein [Oryza sativa]
  misc_feature (2)..(162): Homolog of NCBI NO: 20152613 NR Description: putative glycine rich protein [Rumex obtusifolius]
  misc_feature (1)..(162): Homolog of NCBI NO: 1076731 NR Description: RNA binding protein - barley
  misc_feature (2)..(162): Homolog of NCBI NO: 10799202 NR Description: glycine-rich RNA-binding protein [Sorghum bicolor]
  misc_feature (2)..(162): Homolog of NCBI NO: 544423 NR Description: Glycine-rich RNA-binding protein 2
  misc_feature (1)..(162): Homolog of NCBI NO: 7439981 NR Description: glycine-rich RNA-binding protein GRP1 - wheat
  misc_feature (1)..(163): Homolog of NCBI NO: 7439979 NR Description: glycine-rich RNA-binding protein,
MADVEYRCFVGGLAWATDDQSLQNAFSKYGDVIDSKIITDRETGRSRGFGFVTFASDEAMRQAIEAMNGQDLDGRNITVNEAQSRRSGGGGGGGFGGGGGGYGGQRREGGGGGGYGGGGGGYGGGRSGGGGGYGSRDGGGYGGGGGGGYGGSRGGSGGGNWRE

SEQ ID NO: 52817 - protein, 104 aa, Glycine max
  peptide (1)..(104): Ceres Seq. ID no. 15176324
  misc_feature (27)..(101): Pfam Name: Herpesvirus latent membrane protein 1 (LMP1) Pfam Description: Herpesvirus latent membrane protein 1 (LMP1)
  misc_feature (1)..(103): Homolog of NCBI NO: 7439985 NR Description: glycine-rich RNA-binding protein - rice
  misc_feature (1)..(102): Homolog of NCBI NO: 15226605 NR Description: glycine-rich RNA-binding protein (AtGRP7)
  misc_feature (1)..(103): Homolog of NCBI NO: 18076086 NR Description: glycine-rich RNA-binding protein [Ricinus
  misc_feature (1)..(103): Homolog of NCBI NO: 2331131 NR Description: glycine-rich protein [Oryza sativa]
  misc_feature (1)..(103): Homolog of NCBI NO: 20152613 NR Description: putative glycine rich protein [Rumex obtusifolius]
  misc_feature (1)..(103): Homolog of NCBI NO: 1076731 NR Description: RNA binding protein - barley
  misc_feature (1)..(103): Homolog of NCBI NO: 10799202 NR Description: glycine-rich RNA-binding protein [Sorghum bicolor]
  misc_feature (1)..(103): Homolog of NCBI NO: 544423 NR Description: Glycine-rich RNA-binding protein 2
  misc_feature (1)..(103): Homolog of NCBI NO: 7439981 NR Description: glycine-rich RNA-binding protein GRP1 - wheat
  misc_feature (1)..(104): Homolog of NCBI NO: 7439979 NR Description: glycine-rich RNA-binding protein,
MRQAIEAMNGQDLDGRNITVNEAQSRRSGGGGGGGFGGGGGGYGGQRREGGGGGGYGGGGGGYGGGRSGGGGGYGSRDGGGYGGGGGGGYGGSRGGSGGGNWRE

SEQ ID NO: 52818 - DNA, 601 bp, Glycine max
  misc_feature (1)..(601): Ceres Seq. ID no. 15169814
gttagagacaaaataaaaacccaaataatttcaaaatagttttttagataatattttgatcggatggggttcttacacaagctgtgggatgacacggtggccggaccagctccggaaaatggtctgggagaattgagaaagcatgtttcattagccactgtccaatctcctcctctctccaccgatcaagtcacaagaagcatagtcgttaccaaggggaataacaatgttcgtgggctccggaatttgaagatgggtccgggtcgtgctccggattctccgaccgggtcaagtagcaccccgggaacgcctctaacccctggaacaccgtgtgatcactttggaccattcagcgcagataaaatcccatccgccggtgaagttgatgcctcaagtctcactacttatgaatggattgtgataaacgcattggaccgttgaaaacgacgagaaagagagaaagctctacgggtttttgtttataaatattaatcacctaagcatgtaattatgttaatatttacagatatggtaactgttaaataatgtctccttttaacaatgatttagtattatataacaaaacataaaattattacat

SEQ ID NO: 52819 - protein, 125 aa, Glycine max
  peptide (1)..(125): Ceres Seq. ID no. 15169815
  misc_feature (1)..(29): Homolog of NCBI NO: 9294646 NR Description: gene_id:MAG2.17~unknown protein [Arabidopsis
  misc_feature (1)..(102): Homolog of NCBI NO: 21553000 NR Description: Drm4 [Pisum sativum]
  misc_feature (1)..(86): Homolog of NCBI NO: 21552998 NR Description: Drm3 [Pisum sativum]
  misc_feature (1)..(97): Homolog of NCBI NO: 25082799 NR Description: expressed protein [Arabidopsis thaliana]
  misc_feature (1)..(99): Homolog of NCBI NO: 30696086 NR Description: expressed protein [Arabidopsis thaliana]
  misc_feature (1)..(102): Homolog of NCBI NO: 18405730 NR Description: expressed protein [Arabidopsis thaliana]
  misc_feature (1)..(100): Homolog of NCBI NO: 30696084 NR Description: expressed protein [Arabidopsis thaliana]
  misc_feature (1)..(125): Homolog of NCBI NO: 27802109 NR Description: auxin-repressed protein-like protein [Nicotiana
  misc_feature (1)..(118): Homolog of NCBI NO: 25405689 NR Description: hypothetical protein F15I1.15 [imported] -
  misc_feature (1)..(125): Homolog of NCBI NO: 15221029 NR Description: hypothetical protein [Arabidopsis thaliana]
MGFLHKLWDDTVAGPAPENGLGELRKHVSLATVQSPPLSTDQVTRSIVVTKGNNNVRGLRNLKMGPGRAPDSPTGSSSTPGTPLTPGTPCDHFGPFSADKIPSAGEVDASSLTTYEWIVINALDR

SEQ ID NO: 52820 - protein, 62 aa, Glycine max
  peptide (1)..(62): Ceres Seq. ID no. 15169816
  misc_feature (1)..(39): Homolog of NCBI NO: 21553000 NR Description: Drm4 [Pisum sativum]
  misc_feature (1)..(23): Homolog of NCBI NO: 21552998 NR Description: Drm3 [Pisum sativum]
  misc_feature (1)..(34): Homolog of NCBI NO: 25082799 NR Description: expressed protein [Arabidopsis thaliana]
  misc_feature (1)..(36): Homolog of NCBI NO: 30696086 NR Description: expressed protein [Arabidopsis thaliana]
  misc_feature (1)..(39): Homolog of NCBI NO: 18405730 NR Description: expressed protein [Arabidopsis thaliana]
  misc_feature (1)..(37): Homolog of NCBI NO: 30696084 NR Description: expressed protein [Arabidopsis thaliana]
  misc_feature (1)..(62): Homolog of NCBI NO: 27802109 NR Description: auxin-repressed protein-like protein [Nicotiana
  misc_feature (1)..(55): Homolog of NCBI NO: 25405689 NR Description: hypothetical protein F15I1.15 [imported] -
  misc_feature (1)..(62): Homolog of NCBI NO: 15221029 NR Description: hypothetical protein [Arabidopsis thaliana]
MGPGRAPDSPTGSSSTPGTPLTPGTPCDHFGPFSADKIPSAGEVDASSLTTYEWIVINALDR

SEQ ID NO: 52821 - DNA, 1437 bp, Glycine max
  misc_feature (1)..(1437): Ceres Seq. ID no. 15176337
ctaatccattaacgtagcttcatctccatcttcctcaattctccaccacttccaccagcaacgactcgccgagagcgacagcgagatgggcagggtggcggccaagcagccagggttcgatggcggcctgagccggttatatcgtcgagccaggcgcgctggaactcggcgacgatgacgcggtggtgcttagcggcagtgagggcgcctctgtagcatgatggtcgccaggctgctccatcagcccgccgctcggcttcacgtgtagcagccgtcgccgacggtgccgctacccgaggcggcctcctccccgtcgaccttctttgcggcgccggtcgggctggtgaggatcggccgcagcttcagcccgtcgagccgctcggccgcagccctaggcttcgacgacgggtggatgcgggccacggtggtggctggcttcgtggtcgtgcaagctacgacctccactttgagccggcgagagaagacggacgcacatgtgccccagcgcgcgaggcagcctaccaaggcccgtagccggtagctcacaggaccgtatcaacaacttgccgtgtacggcgtcctccttcgttctagcctccttggtcggtccatcgactgagcgcaccaccgacgcatgcgaggccgcatccactgtcaccgccatgaggagctgtaggccctctcaggcgcgaacgtcgttgccggaggaaaccagcttgcttgctggcctgcatcccgcgataatggacgacgcgcgcagcctcgcaggacggcggtggtttgtgggacgaagccgacggagaatgggagatgcctgaggctggttcatttgcggcctcctcacggtggccacggccagcagcgacaacgggattgatggtgaaattgtccgtgcccaacgcccacaatctcgccttccacccgcgtttcagcgccgcaagaacgtcgaccgctggtggaacaaggtcttccagcgggaggcctgggcgtacgtcaagaacctgcagcgcctgccgacgtccgacgcagtgcagaaccagcagcagccgcggtccggcgagccgtgcgacggcagtagcaacagcaacaactacgagcgcgaccagtacaccgacgcgagcgacggcagccacagcaactaccagcgcaaccagtccggcgagaaacatacgacgggccgacggcagcaagcacagcagctacaagtgctgagccggtcgggcgacgagtgagagcttggaactgagaacgcgttgatgggcgcatgttgtttgcttattttgtggatgcaggggtttagaagtgcaagtccacagcctgcaaatgtgttttgtttgaactggtactgttttttccctgccgttattgatcgcgatggtctcctggtgtaaagatgtttgctactttcttgatgaaattgaagtctttcttgtgtgc

SEQ ID NO: 52822 - protein, 133 aa, Glycine max
  peptide (1)..(133): Ceres Seq. ID no. 15176338
  misc_feature (41)..(133): Pfam Name: Equine herpesvirus glycoprotein gp2 Pfam Description: Equine herpesvirus glycoprotein gp2
MPEAGSFAASSRWPRPAATTGLMVKLSVPNAHNLAFHPRFSAARTSTAGGTRSSSGRPGRTSRTCSACRRPTQCRTSSSRGPASRATAVATATTTSATSTPTRATAATATTSATSPARNIRRADGSKHSSYKC

SEQ ID NO: 52823 - protein, 111 aa, Glycine max
  peptide (1)..(111): Ceres Seq. ID no. 15176339
  misc_feature (19)..(111): Pfam Name: Equine herpesvirus glycoprotein gp2 Pfam Description: Equine herpesvirus glycoprotein gp2
MVKLSVPNAHNLAFHPRFSAARTSTAGGTRSSSGRPGRTSRTCSACRRPTQCRTSSSRGPASRATAVATATTTSATSTPTRATAATATTSATSPARNIRRADGSKHSSYKC

SEQ ID NO: 52824 - protein, 107 aa, Glycine max
  peptide (1)..(107): Ceres Seq. ID no. 15176340
MCPSARGSLPRPVAGSSQDRINNLPCTASSFVLASLVGPSTERTTDACEAASTVTAMRSCRPSQARTSLPEETSLLAGLHPAIMDDARSLAGRRWFVGRSRRRMGDA

SEQ ID NO: 52825 - DNA, 783 bp, Glycine max
  misc_feature (1)..(783): Ceres Seq. ID no. 15170477
atatcaaacagccaaccaaaaccaaacatctctctctctctctctctctagctgctttcaatggcttccttgctcgattccgtcaccgttacccgcgtgttttctcttccgatcacttcctcgatttcacctgcttcaaaggttccgtcaatctctgcccggaggatttctcccgttccggaattcagaggtttgaaagcttcctggaggagttcggtgactcagtcagcgagtcttggtacgaatctcggatcccgattcgctcgtggtggtagaatcgtctgcgaggctcaggacaccactgccgccgccgtcgaagtaccaaacatctctgactcagaatggcaaacacaggttctcgagtcagatgtaccagtattggtcgagttttgggcaccgtggtgtggaccttgccgtatgattcaccccattgttgaccaactggccagggatttcgcaggcaagttcaaattctacaaaatcaacaccgacgagagcccaaacacagccaaccgttacgggatacgcagcgttcctaccgtgatcatattcaaagacggtgagaagaaagacagtatcatcggagctgtccctaaagagacgttggagaaaactatagaaagattcgtggtcgagtaactaaacaaaaacaaaatttcactctttattatcactcatgtcttctgcgttgtataattcttcttaaggtctcttttgactatttatgtttccatgcgtccactatgtattgtttagtattataaaaaaaaatgaataacgaac

SEQ ID NO: 52826 - protein, 192 aa, Glycine max
  peptide (1)..(192): Ceres Seq. ID no. 15170478
  misc_feature (86)..(191): Pfam Name: Thioredoxin Pfam Description: Thioredoxin
  misc_feature (83)..(190): Homolog of NCBI NO: 1351239 NR Description: Thioredoxin M-type, chloroplast precursor (TRX-M)
  misc_feature (39)..(190): Homolog of NCBI NO: 21354 NR Description: unnamed protein product [Spinacia oleracea]
  misc_feature (19)..(190): Homolog of NCBI NO: 6539610 NR Description: thioredoxin m2 [Arabidopsis thaliana]
  misc_feature (19)..(190): Homolog of NCBI NO: 15236327 NR Description: thioredoxin M-type 2, chloroplast precursor
  misc_feature (25)..(190): Homolog of NCBI NO: 11135407 NR Description: Thioredoxin M-type, chloroplast precursor (TRX-M)
  misc_feature (25)..(190): Homolog of NCBI NO: 30678634 NR Description: thioredoxin M-type 1, chloroplast precursor
  misc_feature (1)..(190): Homolog of NCBI NO: 38346628 NR Description: OSJNBa0074L08.22 [Oryza sativa (japonica
  misc_feature (14)..(190): Homolog of NCBI NO: 15594012 NR Description: putative thioredoxin m2 [Pisum sativum]
  misc_feature (1)..(192): Homolog of NCBI NO: 6539614 NR Description: thioredoxin m4 [Arabidopsis thaliana]
  misc_feature (1)..(192): Homolog of NCBI NO: 15232567 NR Description: thioredoxin M-type 4, chloroplast precursor
MASLLDSVTVTRVFSLPITSSISPASKVPSISARRISPVPEFRGLKASWRSSVTQSASLGTNLGSRFARGGRIVCEAQDTTAAAVEVPNISDSEWQTQVLESDVPVLVEFWAPWCGPCRMIHPIVDQLARDFAGKFKFYKINTDESPNTANRYGIRSVPTVIIFKDGEKKDSIIGAVPKETLEKTIERFVVE

SEQ ID NO: 52827 - DNA, 1564 bp, Glycine max
  misc_feature (1)..(1564): Ceres Seq. ID no. 15170483
cccaatcccctcctctccctctcccactccggcggcggcagcagcagcatcagcgcggaagagccaaggagccgaccatggcgacgatcgtcaacaccacggaggaggagccgatgctggcggtggtgcgctccacggcggagctcgcctgggccgacggaggcgccgaggtcgccgacccggaggtggcccgcctctgcgccgaggcgcagcagcacgtcctcgccggccgctggctcgacatggccaccctcatgctcgcctccgccgacctcctcctcctcgccccacgcctctccgacaaagatctcgagtgcaccctgaccgtcatctgcaacctcgtcaccaaggccggatccgaggacgaggcgctggagatcgccaagctcatctgcgccaagctcacccaccagccgggcgagaagcccacgctgcgcatcaaagtcctgttcagcctgtacaacctgcttccgagcctctccggcaaggcattggtctacaggaaggcgctcgagctcgccgccgccgggaaggccgccgccgactgcgtcgtgcccaccttcaagaacatcgatgcctttgtcgcctactggggcatcggcaagccggagcagagggacctgttccttgccgtcaccaggattctcaaggaccagaagggcatgaccaaggagtacttcaagtttctgaacaagtacctgcccacgttcgatggatcggctgatgacgccgacgcaatcggtgcggcaaaggaagaagctgctgcagcaatcattgagtttgtcaagtcatctgatctctatcagtgtgacctgctcgacatgccagctgttgcacagctcgagaaagatgagaagtatcagccagtttacgagctactgaagatattccttactcagaggcttgaatcctatttagcgtttcagactgctaactctacattgctgcaaggatatggactggttcatgaggagtgcataacaaaaatgcgcctgatgtccctgcttgatctgagcggccattgttctggggaaattccttactctgcaattacaaaagcccttgagatcaatgatgatgaggtggaatattggattgtgaaagcaatttcatccaagattttggattgcaaagttgaccagcttaatcaattggtcattgtcagccggcatactgcaagggtctttgggatgccacaatggcagagtctacgttcaaagcttggagtgtggaggggaaatatcgcaaatgctatcaacacaatccaagccaacaaggtgactgaagatggcgggcaggggatgcaaggattgatgatccgctgatcggaggaagtccctaaattgagattatagcctgagagattagacgagcaatccttttgtattagatatcttgtaatccgaaatacttctaccctgtgaccatgcttggctagatcctggttgcaatggcatgctaagcaatctcatgttgcatgaattttgtagacaaaagccatgcctgaagtcagcagttacttgttacagaatcgctattgttcatactgcatgcctgttttatc

SEQ ID NO: 52828 - protein, 440 aa, Glycine max
  peptide (1)..(440): Ceres Seq. ID no. 15170484
  misc_feature (288)..(387): Pfam Name: PCI domain Pfam Description: PCI domain
  misc_feature (44)..(422): Homolog of NCBI NO: 32419046 NR Description: hypothetical protein [Neurospora crassa]
  misc_feature (69)..(421): Homolog of NCBI NO: 27735458 NR Description: Similar to dendritic cell protein [Xenopus laevis]
  misc_feature (26)..(149): Homolog of NCBI NO: 32489165 NR Description: OSJNBa0094O15.2 [Oryza sativa (japonica
  misc_feature (26)..(440): Homolog of NCBI NO: 6041797 NR Description: unknown protein [Arabidopsis thaliana]
  misc_feature (26)..(387): Homolog of NCBI NO: 30678503 NR Description: expressed protein [Arabidopsis thaliana]
  misc_feature (26)..(440): Homolog of NCBI NO: 22330807 NR Description: expressed protein [Arabidopsis thaliana]
  misc_feature (387)..(440): Homolog of NCBI NO: 15242346 NR Description: expressed protein [Arabidopsis thaliana]
  misc_feature (26)..(387): Homolog of NCBI NO: 15242346 NR Description: expressed protein [Arabidopsis thaliana]
  misc_feature (26)..(440): Homolog of NCBI NO: 30685439 NR Description: expressed protein [Arabidopsis thaliana]
  misc_feature (80)..(440): Homolog of NCBI NO: 32489165 NR Description: OSJNBa0094O15.2 [Oryza sativa (japonica
QSPPLPLPLRRRQQQHQRGRAKEPTMATIVNTTEEEPMLAVVRSTAELAWADGGAEVADPEVARLCAEAQQHVLAGRWLDMATLMLASADLLLLAPRLSDKDLECTLTVICNLVTKAGSEDEALEIAKLICAKLTHQPGEKPTLRIKVLFSLYNLLPSLSGKALVYRKALELAAAGKAAADCVVPTFKNIDAFVAYWGIGKPEQRDLFLAVTRILKDQKGMTKEYFKFLNKYLPTFDGSADDADAIGAAKEEAAAAIIEFVKSSDLYQCDLLDMPAVAQLEKDEKYQPVYELLKIFLTQRLESYLAFQTANSTLLQGYGLVHEECITKMRLMSLLDLSGHCSGEIPYSAITKALEINDDEVEYWIVKAISSKILDCKVDQLNQLVIVSRHTARVFGMPQWQSLRSKLGVWRGNIANAINTIQANKVTEDGGQGMQGLMIR

SEQ ID NO: 52829 - protein, 415 aa, Glycine max
  peptide (1)..(415): Ceres Seq. ID no. 15170485
  misc_feature (263)..(362): Pfam Name: PCI domain Pfam Description: PCI domain
  misc_feature (19)..(397): Homolog of NCBI NO: 32419046 NR Description: hypothetical protein [Neurospora crassa]
  misc_feature (44)..(396): Homolog of NCBI NO: 27735458 NR Description: Similar to dendritic cell protein [Xenopus laevis]
  misc_feature (1)..(124): Homolog of NCBI NO: 32489165 NR Description: OSJNBa0094O15.2 [Oryza sativa (japonica
  misc_feature (1)..(415): Homolog of NCBI NO: 6041797 NR Description: unknown protein [Arabidopsis thaliana]
  misc_feature (1)..(362): Homolog of NCBI NO: 30678503 NR Description: expressed protein [Arabidopsis thaliana]
  misc_feature (1)..(415): Homolog of NCBI NO: 22330807 NR Description: expressed protein [Arabidopsis thaliana]
  misc_feature (362)..(415): Homolog of NCBI NO: 15242346 NR Description: expressed protein [Arabidopsis thaliana]
  misc_feature (1)..(362): Homolog of NCBI NO: 15242346 NR Description: expressed protein [Arabidopsis thaliana]
  misc_feature (1)..(415): Homolog of NCBI NO: 30685439 NR Description: expressed protein [Arabidopsis thaliana]
  misc_feature (55)..(415): Homolog of NCBI NO: 32489165 NR Description: OSJNBa0094O15.2 [Oryza sativa (japonica
MATIVNTTEEEPMLAVVRSTAELAWADGGAEVADPEVARLCAEAQQHVLAGRWLDMATLMLASADLLLLAPRLSDKDLECTLTVICNLVTKAGSEDEALEIAKLICAKLTHQPGEKPTLRIKVLFSLYNLLPSLSGKALVYRKALELAAAGKAAADCVVPTFKNIDAFVAYWGIGKPEQRDLFLAVTRILKDQKGMTKEYFKFLNKYLPTFDGSADDADAIGAAKEEAAAAIIEFVKSSDLYQCDLLDMPAVAQLEKDEKYQPVYELLKIFLTQRLESYLAFQTANSTLLQGYGLVHEECITKMRLMSLLDLSGHCSGEIPYSAITKALEINDDEVEYWIVKAISSKILDCKVDQLNQLVIVSRHTARVFGMPQWQSLRSKLGVWRGNIANAINTIQANKVTEDGGQGMQGLMIR

SEQ ID NO: 52830 - protein, 403 aa, Glycine max
  peptide (1)..(403): Ceres Seq. ID no. 15170486
  misc_feature (251)..(350): Pfam Name: PCI domain Pfam Description: PCI domain
  misc_feature (7)..(385): Homolog of NCBI NO: 32419046 NR Description: hypothetical protein [Neurospora crassa]
  misc_feature (32)..(384): Homolog of NCBI NO: 27735458 NR Description: Similar to dendritic cell protein [Xenopus laevis]
  misc_feature (1)..(112): Homolog of NCBI NO: 32489165 NR Description: OSJNBa0094O15.2 [Oryza sativa (japonica
  misc_feature (1)..(403): Homolog of NCBI NO: 6041797 NR Description: unknown protein [Arabidopsis thaliana]
  misc_feature (1)..(350): Homolog of NCBI NO: 30678503 NR Description: expressed protein [Arabidopsis thaliana]
  misc_feature (1)..(403): Homolog of NCBI NO: 22330807 NR Description: expressed protein [Arabidopsis thaliana]
  misc_feature (350)..(403): Homolog of NCBI NO: 15242346 NR Description: expressed protein [Arabidopsis thaliana]
  misc_feature (1)..(350): Homolog of NCBI NO: 15242346 NR Description: expressed protein [Arabidopsis thaliana]
  misc_feature (1)..(403): Homolog of NCBI NO: 30685439 NR Description: expressed protein [Arabidopsis thaliana]
  misc_feature (43)..(403): Homolog of NCBI NO: 32489165 NR Description: OSJNBa0094O15.2 [Oryza sativa (japonica
MLAVVRSTAELAWADGGAEVADPEVARLCAEAQQHVLAGRWLDMATLMLASADLLLLAPRLSDKDLECTLTVICNLVTKAGSEDEALEIAKLICAKLTHQPGEKPTLRIKVLFSLYNLLPSLSGKALVYRKALELAAAGKAAADCVVPTFKNIDAFVAYWGIGKPEQRDLFLAVTRILKDQKGMTKEYFKFLNKYLPTFDGSADDADAIGAAKEEAAAAIIEFVKSSDLYQCDLLDMPAVAQLEKDEKYQPVYELLKIFLTQRLESYLAFQTANSTLLQGYGLVHEECITKMRLMSLLDLSGHCSGEIPYSAITKALEINDDEVEYWIVKAISSKILDCKVDQLNQLVIVSRHTARVFGMPQWQSLRSKLGVWRGNIANAINTIQANKVTEDGGQGMQGLMIR

SEQ ID NO: 52831 - DNA, 1507 bp, Glycine max
  misc_feature (1)..(1507): Ceres Seq. ID no. 15176313
ccatcagaaccggatccctctcttcttcttgctctagcactcttcactaagtctccacggtagatggagggcgtcgaggagatcgtcatcgccggcgccgggctcgccggcctcgccacggccctggggctgcacaggaaaggggtgaggtgcgtggtgctggagtcgtcggcgacgctgcgggcgtcggggtacgccttcaccacatggaccaacgccttccgcgcgctggatgcgctcggtgtcggggacaagatcagggagcaccatctcctctacgagaggctggtggccttctctgcgtccacgggcgaggctgccgcaaaagtgagcctaaagatgcagggtaaaagcgtgcctcacgagatccggtgcgtgaagcgcaacttcctgctggagacgctggagaacgagctgccggagggcaccatcaggtactcctccaagatggtcgccattgagatcgaggaagagggcaacgtgaagctcctgcacatggccgacggctccaccatcagagccaacgttcttgtggggtgtgacggagtgaactcggtggtggcgaggtggctgggcctgcccaagcccatcctctcggggcggtccgccaccaggggcctcgccgagtacccggacggccacggcttcgggccggagatgctgcagttcatcggccagggcttccgctccggcgtgctcccctgctccgacacctccgtgtactggaacttcacctggtacccgtccccggcggacggggacgcggacgagagtgtggccaagatgcggcggcacgtgctggccaggctgacggccgccaagatcccggcggaggcgctggacgtggtggagcggagcgagatgagcgaggtggtgtcgtcgccgctgcggttccggtcgccgctggcgctggtccggggcagcatctgcaggggcggcgtgtgcgtggccggcgacgcgttcctcccgatgaccccggagctcggccagggcggctgcgcggcgctggaggacggcgtcgtcctcgcccggtgcctcggggaggccttcgccgtcggcgggcacgggagcgccgaggcggccctggagaagtacgcccaggagcggaggtggcgcgccgtccggctggtcactgccgcgtacgttgtcggcttcgtgcagcagagcagcaacccggcgatcaagttcctcagggagaagttcctgtcggggttgctggccagagtgatggtcgacatggccgactacgactgcgggaagctctagtagttctgccattccttccttcacgacggcagaacaagaacgacgagagaaaacgaatcagttaaaacggcatcaatcaaatcgattggatgcctgtatttcgacttttcgagttaaataaagaaaataatttgatacctgataggattattagtctacaatatgtagatgataccctctatttcatggaaaacagtcagaaaatggcaataaaatggaggaagcacgtatagcttaaggc

SEQ ID NO: 52832 - protein, 400 aa, Glycine max
  peptide (1)..(400): Ceres Seq. ID no. 15176314
  misc_feature (152)..(360): Pfam Name: Monooxygenase Pfam Description: Monooxygenase
  misc_feature (25)..(384): Homolog of NCBI NO: 25408045 NR Description: probable monooxygenase [imported] - Arabidopsis
  misc_feature (5)..(400): Homolog of NCBI NO: 4164576 NR Description: CTF2A [Arabidopsis thaliana]
  misc_feature (7)..(400): Homolog of NCBI NO: 11358512 NR Description: monooxygenase 1 [imported] - Arabidopsis thaliana
  misc_feature (5)..(400): Homolog of NCBI NO: 21536869 NR Description: putative monooxygenase [Arabidopsis thaliana]
  misc_feature (5)..(400): Homolog of NCBI NO: 18403916 NR Description: monooxygenase family [Arabidopsis thaliana]
  misc_feature (6)..(400): Homolog of NCBI NO: 34393624 NR Description: putative monooxygenase 2 [Oryza sativa (japonica
  misc_feature (2)..(386): Homolog of NCBI NO: 21537119 NR Description: monooxygenase [Arabidopsis thaliana]
  misc_feature (52)..(400): Homolog of NCBI NO: 24745927 NR Description: monooxygenase [Solanum tuberosum]
  misc_feature (2)..(400): Homolog of NCBI NO: 15239070 NR Description: monooxygenase 2 (MO2), putative [Arabidopsis
  misc_feature (2)..(400): Homolog of NCBI NO: 15233923 NR Description: monooxygenase 2 (MO2) [Arabidopsis thaliana]
MEGVEEIVIAGAGLAGLATALGLHRKGVRCVVLESSATLRASGYAFTTWTNAFRALDALGVGDKIREHHLLYERLVAFSASTGEAAAKVSLKMQGKSVPHEIRCVKRNFLLETLENELPEGTIRYSSKMVAIEIEEEGNVKLLHMADGSTIRANVLVGCDGVNSVVARWLGLPKPILSGRSATRGLAEYPDGHGFGPEMLQFIGQGFRSGVLPCSDTSVYWNFTWYPSPADGDADESVAKMRRHVLARLTAAKIPAEALDVVERSEMSEVVSSPLRFRSPLALVRGSICRGGVCVAGDAFLPMTPELGQGGCAALEDGVVLARCLGEAFAVGGHGSAEAALEKYAQERRWRAVRLVTAAYVVGFVQQSSNPAIKFLREKFLSGLLARVMVDMADYDCGKL

SEQ ID NO: 52833 - protein, 308 aa, Glycine max
  peptide (1)..(308): Ceres Seq. ID no. 15176315
  misc_feature (60)..(268): Pfam Name: Monooxygenase Pfam Description: Monooxygenase
  misc_feature (1)..(292): Homolog of NCBI NO: 25408045 NR Description: probable monooxygenase [imported] - Arabidopsis
  misc_feature (1)..(308): Homolog of NCBI NO: 4164576 NR Description: CTF2A [Arabidopsis thaliana]
  misc_feature (1)..(308): Homolog of NCBI NO: 11358512 NR Description: monooxygenase 1 [imported] - Arabidopsis thaliana
  misc_feature (1)..(308): Homolog of NCBI NO: 21536869 NR Description: putative monooxygenase [Arabidopsis thaliana]
  misc_feature (1)..(308): Homolog of NCBI NO: 18403916 NR Description: monooxygenase family [Arabidopsis thaliana]
  misc_feature (1)..(308): Homolog of NCBI NO: 34393624 NR Description: putative monooxygenase 2 [Oryza sativa (japonica
  misc_feature (1)..(294): Homolog of NCBI NO: 21537119 NR Description: monooxygenase [Arabidopsis thaliana]
  misc_feature (1)..(308): Homolog of NCBI NO: 24745927 NR Description: monooxygenase [Solanum tuberosum]
  misc_feature (1)..(308): Homolog of NCBI NO: 15239070 NR Description: monooxygenase 2 (MO2), putative [Arabidopsis
  misc_feature (1)..(308): Homolog of NCBI NO: 15233923 NR Description: monooxygenase 2 (MO2) [Arabidopsis thaliana]
MQGKSVPHEIRCVKRNFLLETLENELPEGTIRYSSKMVAIEIEEEGNVKLLHMADGSTIRANVLVGCDGVNSVVARWLGLPKPILSGRSATRGLAEYPDGHGFGPEMLQFIGQGFRSGVLPCSDTSVYWNFTWYPSPADGDADESVAKMRRHVLARLTAAKIPAEALDVVERSEMSEVVSSPLRFRSPLALVRGSICRGGVCVAGDAFLPMTPELGQGGCAALEDGVVLARCLGEAFAVGGHGSAEAALEKYAQERRWRAVRLVTAAYVVGFVQQSSNPAIKFLREKFLSGLLARVMVDMADYDCGKL

SEQ ID NO: 52834 - protein, 272 aa, Glycine max
  peptide (1)..(272): Ceres Seq. ID no. 15176316
  misc_feature (24)..(232): Pfam Name: Monooxygenase Pfam Description: Monooxygenase
  misc_feature (1)..(256): Homolog of NCBI NO: 25408045 NR Description: probable monooxygenase [imported] - Arabidopsis
  misc_feature (1)..(272): Homolog of NCBI NO: 4164576 NR Description: CTF2A [Arabidopsis thaliana]
  misc_feature (1)..(272): Homolog of NCBI NO: 11358512 NR Description: monooxygenase 1 [imported] - Arabidopsis thaliana
  misc_feature (1)..(272): Homolog of NCBI NO: 21536869 NR Description: putative monooxygenase [Arabidopsis thaliana]
  misc_feature (1)..(272): Homolog of NCBI NO: 18403916 NR Description: monooxygenase family [Arabidopsis thaliana]
  misc_feature (1)..(272): Homolog of NCBI NO: 34393624 NR Description: putative monooxygenase 2 [Oryza sativa (japonica
  misc_feature (1)..(258): Homolog of NCBI NO: 21537119 NR Description: monooxygenase [Arabidopsis thaliana]
  misc_feature (1)..(272): Homolog of NCBI NO: 24745927 NR Description: monooxygenase [Solanum tuberosum]
  misc_feature (1)..(272): Homolog of NCBI NO: 15239070 NR Description: monooxygenase 2 (MO2), putative [Arabidopsis
  misc_feature (1)..(272): Homolog of NCBI NO: 15233923 NR Description: monooxygenase 2 (MO2) [Arabidopsis thaliana]
MVAIEIEEEGNVKLLHMADGSTIRANVLVGCDGVNSVVARWLGLPKPILSGRSATRGLAEYPDGHGFGPEMLQFIGQGFRSGVLPCSDTSVYWNFTWYPSPADGDADESVAKMRRHVLARLTAAKIPAEALDVVERSEMSEVVSSPLRFRSPLALVRGSICRGGVCVAGDAFLPMTPELGQGGCAALEDGVVLARCLGEAFAVGGHGSAEAALEKYAQERRWRAVRLVTAAYVVGFVQQSSNPAIKFLREKFLSGLLARVMVDMADYDCGKL

SEQ ID NO: 52835 - DNA, 1583 bp, Glycine max
  misc_feature (1)..(1583): Ceres Seq. ID no. 15170479
aactcacctgggtgctgcgtgtgaagaaaagaaaagagagaaaaaccgaaacagaaacataaaaagtagctgccaatttcacgttctcattcttccaaattgaaacctcattcctcaatccacgagtttctcgtgacccttctctcatcatcgtcatcttcgtgccctaatcgattatctcgttgcgggtgctgatgattgattgattgggctataaaacgctgccaccgaccatgatcaaccattcataaacaaagagagaaaaaaagcttttttttgctgggtggttttttgtgtgcccaataattttggattgttttgttgtttttttgcattttccgatgacgtattacgagaatgacggtggtggtcggagagaagaggtggtgccggacgttactctcaccatccaatccgatgatagcaatggggactatgtgaaattgagggccaacaacaacgacggttctcctccgggtgcggcggcggagccttctccgccgacgataagagccgccgtgtggtattgggtgaaattggtggtgttgtttctattcctggggtttttggctgtggtagtgcttgtctgggtcggaccctatttcatagacaaggagattattccgattataaattgggagacagagactttcagtactccagtgttaactgttttggtgtttacatctgtggcagtattccccaccctacttttgccttctaccccttccatgtgggtggctggaatgacatttggttatggctttgggttcttgctaattatatctgcagcagctattggtgtatcactcccttttgtcattggcaaactcttccaccataaaattgaagggtggctggagaagtatccgaaaaaggcttctattctaagatctgctggtggagggagctggtttcatcagttccgggctgttgcctttatcagaatttccccattcccttacttaatcttcaactattgtgctgtggcaacaaatgttaagtatgggccttatatggtaggatccttggtaggaatggtgccggaaatatttgttgcaatctatactggaattttgattcggacattggctgatgcttcacatgaaaagcattctctatctgccccacaaattattctcaacgtcgccggcttctgtataacggtggcgacaaccatctttttcacagcttatgctaggagacggcttgatgagttacaaagagaggaggagccattgttgcagtaagtccagaagttttagtctggcttcgttcgttgtttccttatatgaagcagttccttactatgggagtggttttatgaggaaacattattccattggaagagttgaccgtcaaatgtattgtaactagtgggaattggttgaccaaggaaaaggatattggaggaacaagctaacatgaccgaaacctatgtttagttcagcatttccattccttattccttatatatggttcacagaaattgttttatttgttagtgcttctatctcgtttatcattgtatatgaatgaaatgaaattcccggtttactatatagcattgatttgattccaat

SEQ ID NO: 52836 - protein, 302 aa, Glycine max
  peptide (1)..(302): Ceres Seq. ID no. 15170480
  misc_feature (142)..(243): Homolog of NCBI NO: 8778630 NR Description: F5O11.19 [Arabidopsis thaliana]
  misc_feature (145)..(302): Homolog of NCBI NO: 7486891 NR Description: hypothetical protein T12H17.240 - Arabidopsis
  misc_feature (44)..(297): Homolog of NCBI NO: 34913316 NR Description: P0519E12.36 [Oryza sativa (japonica
  misc_feature (237)..(302): Homolog of NCBI NO: 8778630 NR Description: F5O11.19 [Arabidopsis thaliana]
  misc_feature (16)..(170): Homolog of NCBI NO: 8778630 NR Description: F5O11.19 [Arabidopsis thaliana]
  misc_feature (29)..(297): Homolog of NCBI NO: 18395356 NR Description: expressed protein [Arabidopsis thaliana]
  misc_feature (51)..(297): Homolog of NCBI NO: 31249711 NR Description: hypothetical protein [Oryza sativa (japonica
  misc_feature (1)..(301): Homolog of NCBI NO: 15234386 NR Description: expressed protein [Arabidopsis thaliana]
  misc_feature (13)..(302): Homolog of NCBI NO: 30685958 NR Description: expressed protein [Arabidopsis thaliana]
  misc_feature (16)..(302): Homolog of NCBI NO: 15221330 NR Description: expressed protein [Arabidopsis thaliana]
MTYYENDGGGRREEVVPDVTLTIQSDDSNGDYVKLRANNNDGSPPGAAAEPSPPTIRAAVWYWVKLVVLFLFLGFLAVVVLVWVGPYFIDKEIIPIINWETETFSTPVLTVLVFTSVAVFPTLLLPSTPSMWVAGMTFGYGFGFLLIISAAAIGVSLPFVIGKLFHHKIEGWLEKYPKKASILRSAGGGSWFHQFRAVAFIRISPFPYLIFNYCAVATNVKYGPYMVGSLVGMVPEIFVAIYTGILIRTLADASHEKHSLSAPQIILNVAGFCITVATTIFFTAYARRRLDELQREEEPLLQ

SEQ ID NO: 52837 - protein, 172 aa, Glycine max
  peptide (1)..(172): Ceres Seq. ID no. 15170481
  misc_feature (12)..(113): Homolog of NCBI NO: 8778630 NR Description: F5O11.19 [Arabidopsis thaliana]
  misc_feature (15)..(172): Homolog of NCBI NO: 7486891 NR Description: hypothetical protein T12H17.240 - Arabidopsis
  misc_feature (1)..(167): Homolog of NCBI NO: 34913316 NR Description: P0519E12.36 [Oryza sativa (japonica
  misc_feature (107)..(172): Homolog of NCBI NO: 8778630 NR Description: F5O11.19 [Arabidopsis thaliana]
  misc_feature (1)..(40): Homolog of NCBI NO: 8778630 NR Description: F5O11.19 [Arabidopsis thaliana]
  misc_feature (1)..(167): Homolog of NCBI NO: 18395356 NR Description: expressed protein [Arabidopsis thaliana]
  misc_feature (1)..(167): Homolog of NCBI NO: 31249711 NR Description: hypothetical protein [Oryza sativa (japonica
  misc_feature (1)..(171): Homolog of NCBI NO: 15234386 NR Description: expressed protein [Arabidopsis thaliana]
  misc_feature (1)..(172): Homolog of NCBI NO: 30685958 NR Description: expressed protein [Arabidopsis thaliana]
  misc_feature (1)..(172): Homolog of NCBI NO: 15221330 NR Description: expressed protein [Arabidopsis thaliana]
MWVAGMTFGYGFGFLLIISAAAIGVSLPFVIGKLFHHKIEGWLEKYPKKASILRSAGGGSWFHQFRAVAFIRISPFPYLIFNYCAVATNVKYGPYMVGSLVGMVPEIFVAIYTGILIRTLADASHEKHSLSAPQIILNVAGFCITVATTIFFTAYARRRLDELQREEEPLLQ

SEQ ID NO: 52838 - protein, 167 aa, Glycine max
  peptide (1)..(167): Ceres Seq. ID no. 15170482
  misc_feature (7)..(108): Homolog of NCBI NO: 8778630 NR Description: F5O11.19 [Arabidopsis thaliana]
  misc_feature (10)..(167): Homolog of NCBI NO: 7486891 NR Description: hypothetical protein T12H17.240 - Arabidopsis
  misc_feature (1)..(162): Homolog of NCBI NO: 34913316 NR Description: P0519E12.36 [Oryza sativa (japonica
  misc_feature (102)..(167): Homolog of NCBI NO: 8778630 NR Description: F5O11.19 [Arabidopsis thaliana]
  misc_feature (1)..(35): Homolog of NCBI NO: 8778630 NR Description: F5O11.19 [Arabidopsis thaliana]
  misc_feature (1)..(162): Homolog of NCBI NO: 18395356 NR Description: expressed protein [Arabidopsis thaliana]
  misc_feature (1)..(162): Homolog of NCBI NO: 31249711 NR Description: hypothetical protein [Oryza sativa (japonica
  misc_feature (1)..(166): Homolog of NCBI NO: 15234386 NR Description: expressed protein [Arabidopsis thaliana]
  misc_feature (1)..(167): Homolog of NCBI NO: 30685958 NR Description: expressed protein [Arabidopsis thaliana]
  misc_feature (1)..(167): Homolog of NCBI NO: 15221330 NR Description: expressed protein [Arabidopsis thaliana]
MTFGYGFGFLLIISAAAIGVSLPFVIGKLFHHKIEGWLEKYPKKASILRSAGGGSWFHQFRAVAFIRISPFPYLIFNYCAVATNVKYGPYMVGSLVGMVPEIFVAIYTGILIRTLADASHEKHSLSAPQIILNVAGFCITVATTIFFTAYARRRLDELQREEEPLLQ

SEQ ID NO: 52839 - DNA, 1073 bp, Glycine max
  misc_feature (1)..(1073): Ceres Seq. ID no. 15169809
gtgcgggagagacgagcgatggctcgataggcatcctccccaggttcagatcccgacggcatcctccccaggttccagaaccgctgacgtggcgctcctcttcctcctcctcccgcctctcccatcaccgcctcgtctgcctcaccgccggcgaccgtcgctcccgtacccacactccggcgcagggatggctcaatgaggtgtgtgtgagccgcgttgatctggcttctggtggagtgtgaaatggtggatttcccggaagggttgcgacggctcgctgctctcctgctcaagtgctgcgatctcgacataccaaatcgtcccaagggcctcgaggatcctgagcgtctggcaagggaaacagtttttagcgtaaatgagattgaggcattgtatgagctgttcaagaagatcagcagtgctgtggttgatgatggtgtgattaataaggaagaattccaactggcgctgtttaagactaacaggaaagatagcatgtttgctgaccgggtgtttgatttgttcgacacaaagcacaatgggattctagaatttgaagaatttgtgcgagctctttctgtattccatcctaatgcaccagttgatgacaaaattgattttgctttcaaactctatgatctcaaacaacaaggtttcattgaaaagcaagaggtgaagcaaatggtggttgccacacttgctgaatcaggaatgaacctttctgatgaggttatagagggtattatcgacaagacatttgaggaagcagatacaaagcacgatggtaaaatcgacaaggaggaatggcgcaatcttgtcttgaggcatccatctttgttgaagaatatgacactcccatatctaagggatattaccacaacatttccaagctttgtcttcaactctcaggtcgaggatgcttgagaatccagtttctaggttaccactgaagcttgtgaaaggccacggcagaccatgtcgtaggtggaccttgtgtatttttatttctttattcctttttggcgatatccttcttgtgcttggaacaattcttgtaattttttcacttcttt

SEQ ID NO: 52840 - protein, 226 aa, Glycine max
  peptide (1)..(226): Ceres Seq. ID no. 15169810
  misc_feature (167)..(195): Pfam Name: EF hand Pfam Description: EF hand
  misc_feature (31)..(225): Homolog of NCBI NO: 15238015 NR Description: calcineurin B-like protein 9 (CBL9) [Arabidopsis
  misc_feature (1)..(225): Homolog of NCBI NO: 13448027 NR Description: SOS3-like calcium binding protein [Arabidopsis
  misc_feature (1)..(225): Homolog of NCBI NO: 18414640 NR Description: calcineurin B-like protein 6 (CBL6) [Arabidopsis
  misc_feature (32)..(220): Homolog of NCBI NO: 38493047 NR Description: Chain A, The Crystal Structure Of The Calcium
  misc_feature (6)..(225): Homolog of NCBI NO: 30687272 NR Description: calcineurin B-like protein 3 (CBL3) [Arabidopsis
  misc_feature (6)..(225): Homolog of NCBI NO: 21593228 NR Description: calcineurin B-like protein 2 [Arabidopsis
  misc_feature (6)..(225): Homolog of NCBI NO: 15241101 NR Description: calcineurin B-like protein 2 (gb|AAC26009.1)
  misc_feature (6)..(225): Homolog of NCBI NO: 15236778 NR Description: calcineurin B-like protein 3 (CBL3) [Arabidopsis
  misc_feature (1)..(225): Homolog of NCBI NO: 22137326 NR Description: calcineurin B [Pisum sativum]
  misc_feature (1)..(225): Homolog of NCBI NO: 16924116 NR Description: putative calcineurin B-like protein [Oryza sativa]
MVDFPEGLRRLAALLLKCCDLDIPNRPKGLEDPERLARETVFSVNEIEALYELFKKISSAVVDDGVINKEEFQLALFKTNRKDSMFADRVFDLFDTKHNGILEFEEFVRALSVFHPNAPVDDKIDFAFKLYDLKQQGFIEKQEVKQMVVATLAESGMNLSDEVIEGIIDKTFEEADTKHDGKIDKEEWRNLVLRHPSLLKNMTLPYLRDITTTFPSFVFNSQVEDA

SEQ ID NO: 52841 - protein, 142 aa, Glycine max
  peptide (1)..(142): Ceres Seq. ID no. 15169811
  misc_feature (83)..(111): Pfam Name: EF hand Pfam Description: EF hand
  misc_feature (1)..(141): Homolog of NCBI NO: 15238015 NR Description: calcineurin B-like protein 9 (CBL9) [Arabidopsis
  misc_feature (1)..(141): Homolog of NCBI NO: 13448027 NR Description: SOS3-like calcium binding protein [Arabidopsis
  misc_feature (1)..(141): Homolog of NCBI NO: 18414640 NR Description: calcineurin B-like protein 6 (CBL6) [Arabidopsis
  misc_feature (1)..(136): Homolog of NCBI NO: 38493047 NR Description: Chain A, The Crystal Structure Of The Calcium
  misc_feature (1)..(141): Homolog of NCBI NO: 30687272 NR Description: calcineurin B-like protein 3 (CBL3) [Arabidopsis
  misc_feature (1)..(141): Homolog of NCBI NO: 21593228 NR Description: calcineurin B-like protein 2 [Arabidopsis
  misc_feature (1)..(141): Homolog of NCBI NO: 15241101 NR Description: calcineurin B-like protein 2 (gb|AAC26009.1)
  misc_feature (1)..(141): Homolog of NCBI NO: 15236778 NR Description: calcineurin B-like protein 3 (CBL3) [Arabidopsis
  misc_feature (1)..(141): Homolog of NCBI NO: 22137326 NR Description: calcineurin B [Pisum sativum]
  misc_feature (1)..(141): Homolog of NCBI NO: 16924116 NR Description: putative calcineurin B-like protein [Oryza sativa]
MFADRVFDLFDTKHNGILEFEEFVRALSVFHPNAPVDDKIDFAFKLYDLKQQGFIEKQEVKQMVVATLAESGMNLSDEVIEGIIDKTFEEADTKHDGKIDKEEWRNLVLRHPSLLKNMTLPYLRDITTTFPSFVFNSQVEDA

SEQ ID NO: 52842 - DNA, 1192 bp, Glycine max
  misc_feature (1)..(1192): Ceres Seq. ID no. 15170458
atgaagtatcggatatcttaataaataaacaaataaaaaaagtatcggatatctcaaaggtttatccttcagtgaagagaaatggcagctgaggcaaattttgatagcaaaagcagcaggtggtctttgcaggggatgacagctctcgttaccggtggttccaaaggaatcggatatgctatcgtggaggagttggcacaacttggagccactgtacacacttgcgctcgcaacgaagctgaactcaataaatccttaaatgaatggaacacaaaaggatacagagtaactggttcggtctgtgacgtggcgtctcgtgcagaaagacaagacctcatagctagagtctcaaatgagtttaatggcaaactcaatatccttgtaaacaatgtgggaacaaacatacagaaagagaccctggatttcacagaggaagatttcacatttctggtgaatacgaatcttgaatcttgtttccacctaagccagcttgcacatcctctcctaaaagcttcagaagctgcaaacatcattctcatatcctccattgctggtgtggtagcttcaaatatagtatccgttgtgtatggtgcaacaaaaggagcaatgaaccaaatgacaaaacatttggcatgtgaatgggccaaagacaatataaggactaattgcgttgcaccagggccaattagaacccctcttggtgacaagcactttaaagaggaaaaacttaataatagtctgattgcgcgaacccctcttggacggattggagaggcagaggaggtttcttcgttggtggcattcctctgcttacctgcagcatcttacataacaggacaaaccatttgtgttgatggcggcttcaccgtgaacggtctctacataagctaggcttattgtgacagtttcaatgttttgtttagtctgttacactctacttgtattagtttctgtttaagttgtggagagtggagaccctatatctgtttttaaggacgtgataataacagtactcagtgataagtttgtttttcttgttttgatttagtcacatgtcccatgattctaggagcagtataatcgtgggcagtttatcctatttcccgttggttgtaaggctttcagtaataataataataatagccatgtttgcttttcaattcaatgcaaatgctcctcagttcactagtac

SEQ ID NO: 52843 - protein, 269 aa, Glycine max
  peptide (1)..(269): Ceres Seq. ID no. 15170459
  misc_feature (9)..(267): Homolog of NCBI NO: 15227060 NR Description: short-chain dehydrogenase/reductase family
  misc_feature (13)..(265): Homolog of NCBI NO: 15239327 NR Description: short-chain dehydrogenase/reductase family
  misc_feature (13)..(265): Homolog of NCBI NO: 30684202 NR Description: short-chain dehydrogenase/reductase family
  misc_feature (10)..(265): Homolog of NCBI NO: 15222399 NR Description: short-chain dehydrogenase/reductase family
  misc_feature (13)..(265): Homolog of NCBI NO: 21554716 NR Description: putative tropinone reductase [Arabidopsis
  misc_feature (3)..(265): Homolog of NCBI NO: 15227040 NR Description: short-chain dehydrogenase/reductase family
  misc_feature (8)..(265): Homolog of NCBI NO: 25406975 NR Description: protein F22G5.20 [imported] - Arabidopsis
  misc_feature (13)..(265): Homolog of NCBI NO: 15227076 NR Description: short-chain dehydrogenase/reductase family
  misc_feature (3)..(264): Homolog of NCBI NO: 15227043 NR Description: short-chain dehydrogenase/reductase family
  misc_feature (1)..(265): Homolog of NCBI NO: 15227075 NR Description: short-chain dehydrogenase/reductase family
MAAEANFDSKSSRWSLQGMTALVTGGSKGIGYAIVEELAQLGATVHTCARNEAELNKSLNEWNTKGYRVTGSVCDVASRAERQDLIARVSNEFNGKLNILVNNVGTNIQKETLDFTEEDFTFLVNTNLESCFHLSQLAHPLLKASEAANIILISSIAGVVASNIVSVVYGATKGAMNQMTKHLACEWAKDNIRTNCVAPGPIRTPLGDKHFKEEKLNNSLIARTPLGRIGEAEEVSSLVAFLCLPAASYITGQTICVDGGFTVNGLYIS

SEQ ID NO: 52844 - protein, 251 aa, Glycine max
  peptide (1)..(251): Ceres Seq. ID no. 15170460
  misc_feature (1)..(249): Homolog of NCBI NO: 15227060 NR Description: short-chain dehydrogenase/reductase family
  misc_feature (1)..(247): Homolog of NCBI NO: 15239327 NR Description: short-chain dehydrogenase/reductase family
  misc_feature (1)..(247): Homolog of NCBI NO: 30684202 NR Description: short-chain dehydrogenase/reductase family
  misc_feature (1)..(247): Homolog of NCBI NO: 15222399 NR Description: short-chain dehydrogenase/reductase family
  misc_feature (1)..(247): Homolog of NCBI NO: 21554716 NR Description: putative tropinone reductase [Arabidopsis
  misc_feature (1)..(247): Homolog of NCBI NO: 15227040 NR Description: short-chain dehydrogenase/reductase family
  misc_feature (1)..(247): Homolog of NCBI NO: 25406975 NR Description: protein F22G5.20 [imported] - Arabidopsis
  misc_feature (1)..(247): Homolog of NCBI NO: 15227076 NR Description: short-chain dehydrogenase/reductase family
  misc_feature (1)..(246): Homolog of NCBI NO: 15227043 NR Description: short-chain dehydrogenase/reductase family
  misc_feature (1)..(247): Homolog of NCBI NO: 15227075 NR Description: short-chain dehydrogenase/reductase family
MTALVTGGSKGIGYAIVEELAQLGATVHTCARNEAELNKSLNEWNTKGYRVTGSVCDVASRAERQDLIARVSNEFNGKLNILVNNVGTNIQKETLDFTEEDFTFLVNTNLESCFHLSQLAHPLLKASEAANIILISSIAGVVASNIVSVVYGATKGAMNQMTKHLACEWAKDNIRTNCVAPGPIRTPLGDKHFKEEKLNNSLIARTPLGRIGEAEEVSSLVAFLCLPAASYITGQTICVDGGFTVNGLYIS

SEQ ID NO: 52845 - DNA, 1215 bp, Glycine max
  misc_feature (1)..(1215): Ceres Seq. ID no. 15170438
acgactcgacttcgtttaaacccaaaccctaatctcgacagagcctaaaccctagctcgggcggcggcggcggcggtcatggacggcggcggaggcgtcggaggaggcatggggcccgtaggcggcggggtgggaggcatggtgggacccgtcggcgtcggcggcgggggcggcgggagcgacgtggagctcgtcagcaaaacgctgcagttcgagcacaagctcttctacttcgatctgaaggagaacccgcgggggaggtacctcaagatctccgagaagacgtccaccacgcgctccaccatcatcgtgcccatcgccggcgtcgcctggttcctcgacctcttcgactattacatccgcaccgacgagcgcgacgtcttcagcaaggagctacgcctcgataccaaggtgttctacttcgatattggggagaacaagagaggccgctaccttaaggtttcggaggcatctgtcaatagaaaccgtagcacgataattgttccggctggtagctctggcgaagaaggttgggaagcatttaggaatgtactgttagaaatcaatgacgaagcttcccgactctacgttcttccaaatcatccaagtcagcaacacctggaacctccagagcgccttcctggcctttctgacgatgttggtgctggatttatagctgggcatggcagccaatctgcatctgtaccctaggtagatgttgatgggcctcctattgaagaatttagtggcatggggctgtctaaggtgataagggcagatcagaaaaggtttttctttgacctgggcagcaacaacaggggccattatttgaggatttccgaggtcgctggagctgatcgttcgtcgataatcttgccgctttctggtttgaagcagttccatgagatggtgggacactttgtagatataatgaaggacagacttgaaggaatgacgggcgcgaacgtgcgcactgtcgagcccagccagagatgattagctcgaccttgtggcacttactgctgttatgcctctaggatttgtgtaagcgatgtgctgtgtggttgcgtagatcacgcagtattaattcatctgatggggataataatgtttgatgtttagttttttctttcttctgaattccgtggcgaggattgatttgcttgggaccttttctgttgaggaataataagcagtataatgttcgtgggtggt

SEQ ID NO: 52846 - protein, 210 aa, Glycine max
  peptide (1)..(210): Ceres Seq. ID no. 15170439
  misc_feature (35)..(210): Pfam Name: PurA ssDNA and RNA-binding protein Pfam Description: PurA ssDNA and RNA-binding protein
  misc_feature (1)..(94): Homolog of NCBI NO: 9652255 NR Description: DNA binding protein pur-alpha [Ovis aries]
  misc_feature (30)..(165): Homolog of NCBI NO: 2460293 NR Description: Pur-alpha [Drosophila melanogaster]
  misc_feature (30)..(165): Homolog of NCBI NO: 24638636 NR Description: Purine-rich binding protein-alpha CG1507-PB
  misc_feature (30)..(165): Homolog of NCBI NO: 24638638 NR Description: Purine-rich binding protein-alpha CG1507-PA
  misc_feature (30)..(165): Homolog of NCBI NO: 24638642 NR Description: Purine-rich binding protein-alpha CG1507-PD
  misc_feature (2)..(165): Homolog of NCBI NO: 31211141 NR Description: ENSANGP00000016990 [Anopheles gambiae]
  misc_feature (15)..(210): Homolog of NCBI NO: 25408208 NR Description: hypothetical protein At2g32080 [imported] -
  misc_feature (15)..(210): Homolog of NCBI NO: 30685174 NR Description: purine-rich single-stranded DNA-binding protein
  misc_feature (15)..(210): Homolog of NCBI NO: 18402871 NR Description: purine-rich single-stranded DNA-binding protein
  misc_feature (1)..(210): Homolog of NCBI NO: 34902984 NR Description: unnamed protein product [Oryza sativa (japonica
MDGGGGVGGGMGPVGGGVGGMVGPVGVGGGGGGSDVELVSKTLQFEHKLFYFDLKENPRGRYLKISEKTSTTRSTIIVPIAGVAWFLDLFDYYIRTDERDVFSKELRLDTKVFYFDIGENKRGRYLKVSEASVNRNRSTIIVPAGSSGEEGWEAFRNVLLEINDEASRLYVLPNHPSQQHLEPPERLPGLSDDVGAGFIAGHGSQSASVP

SEQ ID NO: 52847 - protein, 200 aa, Glycine max
  peptide (1)..(200): Ceres Seq. ID no. 15170440
  misc_feature (25)..(200): Pfam Name: PurA ssDNA and RNA-binding protein Pfam Description: PurA ssDNA and RNA-binding protein
  misc_feature (1)..(84): Homolog of NCBI NO: 9652255 NR Description: DNA binding protein pur-alpha [Ovis aries]
  misc_feature (20)..(155): Homolog of NCBI NO: 2460293 NR Description: Pur-alpha [Drosophila melanogaster]
  misc_feature (20)..(155): Homolog of NCBI NO: 24638636 NR Description: Purine-rich binding protein-alpha CG1507-PB
  misc_feature (20)..(155): Homolog of NCBI NO: 24638638 NR Description: Purine-rich binding protein-alpha CG1507-PA
  misc_feature (20)..(155): Homolog of NCBI NO: 24638642 NR Description: Purine-rich binding protein-alpha CG1507-PD
  misc_feature (1)..(155): Homolog of NCBI NO: 31211141 NR Description: ENSANGP00000016990 [Anopheles gambiae]
  misc_feature (5)..(200): Homolog of NCBI NO: 25408208 NR Description: hypothetical protein At2g32080 [imported] -
  misc_feature (5)..(200): Homolog of NCBI NO: 30685174 NR Description: purine-rich single-stranded DNA-binding protein
  misc_feature (5)..(200): Homolog of NCBI NO: 18402871 NR Description: purine-rich single-stranded DNA-binding protein
  misc_feature (1)..(200): Homolog of NCBI NO: 34902984 NR Description: unnamed protein product [Oryza sativa (japonica
MGPVGGGVGGMVGPVGVGGGGGGSDVELVSKTLQFEHKLFYFDLKENPRGRYLKISEKTSTTRSTIIVPIAGVAWFLDLFDYYIRTDERDVFSKELRLDTKVFYFDIGENKRGRYLKVSEASVNRNRSTIIVPAGSSGEEGWEAFRNVLLEINDEASRLYVLPNHPSQQHLEPPERLPGLSDDVGAGFIAGHGSQSASVP

SEQ ID NO: 52848 - protein, 190 aa, Glycine max
  peptide (1)..(190): Ceres Seq. ID no. 15170441
  misc_feature (15)..(190): Pfam Name: PurA ssDNA and RNA-binding protein Pfam Description: PurA ssDNA and RNA-binding protein
  misc_feature (1)..(74): Homolog of NCBI NO: 9652255 NR Description: DNA binding protein pur-alpha [Ovis aries]
  misc_feature (10)..(145): Homolog of NCBI NO: 2460293 NR Description: Pur-alpha [Drosophila melanogaster]
  misc_feature (10)..(145): Homolog of NCBI NO: 24638636 NR Description: Purine-rich binding protein-alpha CG1507-PB
  misc_feature (10)..(145): Homolog of NCBI NO: 24638638 NR Description: Purine-rich binding protein-alpha CG1507-PA
  misc_feature (10)..(145): Homolog of NCBI NO: 24638642 NR Description: Purine-rich binding protein-alpha CG1507-PD
  misc_feature (1)..(145): Homolog of NCBI NO: 31211141 NR Description: ENSANGP00000016990 [Anopheles gambiae]
  misc_feature (1)..(190): Homolog of NCBI NO: 25408208 NR Description: hypothetical protein At2g32080 [imported] -
  misc_feature (1)..(190): Homolog of NCBI NO: 30685174 NR Description: purine-rich single-stranded DNA-binding protein
  misc_feature (1)..(190): Homolog of NCBI NO: 18402871 NR Description: purine-rich single-stranded DNA-binding protein
  misc_feature (1)..(190): Homolog of NCBI NO: 34902984 NR Description: unnamed protein product [Oryza sativa (japonica
MVGPVGVGGGGGGSDVELVSKTLQFEHKLFYFDLKENPRGRYLKISEKTSTTRSTIIVPIAGVAWFLDLFDYYIRTDERDVFSKELRLDTKVFYFDIGENKRGRYLKVSEASVNRNRSTIIVPAGSSGEEGWEAFRNVLLEINDEASRLYVLPNHPSQQHLEPPERLPGLSDDVGAGFIAGHGSQSASVP

SEQ ID NO: 52849 - DNA, 1368 bp, Glycine max
  misc_feature (1)..(1368): Ceres Seq. ID no. 15170447
ttgccaacaaagctctctcctttcctcatcatcacagctcagcctgaccccaactctctctcaggcttccgatctcagatctctgcgatccggtgagatctctctcttcttccgaggaaaaaaaaagggagttcagtagaatcaagatgaaggctctcattctcgttggagggttcgggactcggttgagaccattgactctcagtttcccaaagccccttgttgacttcgccaacaaacccatgatccttcatcagatagaggcgctcaaggcagttggagttgatgaagttgttttggccatcaattaccaaccagaggtgatgcttaacttcttgaaagactttgaggcaaagctcgaaatcaaaatcacttgctcacaagagactgagcctatgggtacggctggtcctctggctctagctagagacaaactggttgacggatctggagagcccttttttgtccttaacagtgatgtgattagtgagtacccactcaaagagatgattgaatttcacaaagctcacggtggggaagcctccattatggtgacaaaggttgatgaaccgtccaagtatggagttgtggtcatggatgaaactacaggaaaagtggagaagtttgtggaaaagccaaaactgtttgtaggcaacaagatcaacgctgggatataccttctgaacccatctgttctcgacaagatcgagctaagaccgacatcgatcgagaaagaaaccttccccaagattgcagcagctcaaggactctacgcgatggtgttaccaggattctggatggacatcgggcaaccccgtgattacataacgggcctgagactctacttagactctctgagaaagaaatctcccgccaagctaaccactggtgcacacattgttgggaacgttctggtggatgaaaccgctaagattggggaagggtgtttgataggtccagacgtggccattggtccaggctgcgttgttgagtcaggggtgaggctttcacggtgcacggtcatgcgtggggcgaggatcaagaaacatgcgtgtatctcgagcagtatcatagggtggcactcgacggttgggcagtgggctaggattgagaacatgacgatcttgggggaagatgttcatgtgtgtgatgagatatacaccaatggaggagttgttttgccacacaaggagatcaaatccaacatcttgaagccagagatagttatgtgattatctatgttggaacctttttttgttttttttttttgtgtatttttatctctcaaactttgtgtttctgttattcttctttggctttgaataaaatataaacaaaatgatgtataaaaaaaaaaaaaaaaaaacc

SEQ ID NO: 52850 - protein, 361 aa, Glycine max
  peptide (1)..(361): Ceres Seq. ID no. 15170448
  misc_feature (2)..(236): Pfam Name: Nucleotidyl transferase Pfam Description: Nucleotidyl transferase
  misc_feature (1)..(184): Homolog of NCBI NO: 7022005 NR Description: unnamed protein product [Homo sapiens]
  misc_feature (1)..(328): Homolog of NCBI NO: 19074869 NR Description: MANNOSE-1-PHOSPHATE GUANYLYLTRANSFERASE
  misc_feature (1)..(345): Homolog of NCBI NO: 25317396 NR Description: GDP-mannose pyrophosphorylase like protein
  misc_feature (1)..(361): Homolog of NCBI NO: 15233308 NR Description: GDP-mannose pyrophosphorylase, putative
  misc_feature (1)..(361): Homolog of NCBI NO: 34908274 NR Description: putative GDP-mannose pyrophosphorylase
  misc_feature (1)..(361): Homolog of NCBI NO: 14971013 NR Description: GDP-D-mannose pyrophosphorylase [Nicotiana
  misc_feature (1)..(361): Homolog of NCBI NO: 4103324 NR Description: GDP-mannose pyrophosphorylase [Solanum tuberosum]
  misc_feature (1)..(361): Homolog of NCBI NO: 34902046 NR Description: COG1208, GCD1, Nucleoside-diphosphate-sugar involved in lipopolysaccharide biosynthesis/translation
  misc_feature (1)..(361): Homolog of NCBI NO: 13509287 NR Description: GDP-mannose pyrophosphorylase [Arabidopsis
  misc_feature (1)..(361): Homolog of NCBI NO: 15225553 NR Description: GDP-mannose pyrophosphorylase [Arabidopsis
MKALILVGGFGTRLRPLTLSFPKPLVDFANKPMILHQIEALKAVGVDEVVLAINYQPEVMLNFLKDFEAKLEIKITCSQETEPMGTAGPLALARDKLVDGSGEPFFVLNSDVISEYPLKEMIEFHKAHGGEASIMVTKVDEPSKYGVVVMDETTGKVEKFVEKPKLFVGNKINAGIYLLNPSVLDKIELRPTSIEKETFPKIAAAQGLYAMVLPGFWMDIGQPRDYITGLRLYLDSLRKKSPAKLTTGAHIVGNVLVDETAKIGEGCLIGPDVAIGPGCVVESGVRLSRCTVMRGARIKKHACISSSIIGWHSTVGQWARIENMTILGEDVHVCDEIYTNGGVVLPHKEIKSNILKPEIVM

SEQ ID NO: 52851 - protein, 329 aa, Glycine max
  peptide (1)..(329): Ceres Seq. ID no. 15170449
  misc_feature (1)..(204): Pfam Name: Nucleotidyl transferase Pfam Description: Nucleotidyl transferase
  misc_feature (1)..(152): Homolog of NCBI NO: 7022005 NR Description: unnamed protein product [Homo sapiens]
  misc_feature (1)..(296): Homolog of NCBI NO: 19074869 NR Description: MANNOSE-1-PHOSPHATE GUANYLYLTRANSFERASE
  misc_feature (1)..(313): Homolog of NCBI NO: 25317396 NR Description: GDP-mannose pyrophosphorylase like protein
  misc_feature (1)..(329): Homolog of NCBI NO: 15233308 NR Description: GDP-mannose pyrophosphorylase, putative
  misc_feature (1)..(329): Homolog of NCBI NO: 34908274 NR Description: putative GDP-mannose pyrophosphorylase
  misc_feature (1)..(329): Homolog of NCBI NO: 14971013 NR Description: GDP-D-mannose pyrophosphorylase [Nicotiana
  misc_feature (1)..(329): Homolog of NCBI NO: 4103324 NR Description: GDP-mannose pyrophosphorylase [Solanum tuberosum]
  misc_feature (1)..(329): Homolog of NCBI NO: 34902046 NR Description: COG1208, GCD1, Nucleoside-diphosphate-sugar involved in lipopolysaccharide biosynthesis/translation
  misc_feature (1)..(329): Homolog of NCBI NO: 13509287 NR Description: GDP-mannose pyrophosphorylase [Arabidopsis
  misc_feature (1)..(329): Homolog of NCBI NO: 15225553 NR Description: GDP-mannose pyrophosphorylase [Arabidopsis
MILHQIEALKAVGVDEVVLAINYQPEVMLNFLKDFEAKLEIKITCSQETEPMGTAGPLALARDKLVDGSGEPFFVLNSDVISEYPLKEMIEFHKAHGGEASIMVTKVDEPSKYGVVVMDETTGKVEKFVEKPKLFVGNKINAGIYLLNPSVLDKIELRPTSIEKETFPKIAAAQGLYAMVLPGFWMDIGQPRDYITGLRLYLDSLRKKSPAKLTTGAHIVGNVLVDETAKIGEGCLIGPDVAIGPGCVVESGVRLSRCTVMRGARIKKHACISSSIIGWHSTVGQWARIENMTILGEDVHVCDEIYTNGGVVLPHKEIKSNILKPEIVM

SEQ ID NO: 52852 - protein, 302 aa, Glycine max
  peptide (1)..(302): Ceres Seq. ID no. 15170450
  misc_feature (1)..(177): Pfam Name: Nucleotidyl transferase Pfam Description: Nucleotidyl transferase
  misc_feature (1)..(125): Homolog of NCBI NO: 7022005 NR Description: unnamed protein product [Homo sapiens]
  misc_feature (1)..(269): Homolog of NCBI NO: 19074869 NR Description: MANNOSE-1-PHOSPHATE GUANYLYLTRANSFERASE
  misc_feature (1)..(286): Homolog of NCBI NO: 25317396 NR Description: GDP-mannose pyrophosphorylase like protein
  misc_feature (1)..(302): Homolog of NCBI NO: 15233308 NR Description: GDP-mannose pyrophosphorylase, putative
  misc_feature (1)..(302): Homolog of NCBI NO: 34908274 NR Description: putative GDP-mannose pyrophosphorylase
  misc_feature (1)..(302): Homolog of NCBI NO: 14971013 NR Description: GDP-D-mannose pyrophosphorylase [Nicotiana
  misc_feature (1)..(302): Homolog of NCBI NO: 4103324 NR Description: GDP-mannose pyrophosphorylase [Solanum tuberosum]
  misc_feature (1)..(302): Homolog of NCBI NO: 34902046 NR Description: COG1208, GCD1, Nucleoside-diphosphate-sugar involved in lipopolysaccharide biosynthesis/translation
  misc_feature (1)..(302): Homolog of NCBI NO: 13509287 NR Description: GDP-mannose pyrophosphorylase [Arabidopsis
  misc_feature (1)..(302): Homolog of NCBI NO: 15225553 NR Description: GDP-mannose pyrophosphorylase [Arabidopsis
MLNFLKDFEAKLEIKITCSQETEPMGTAGPLALARDKLVDGSGEPFFVLNSDVISEYPLKEMIEFHKAHGGEASIMVTKVDEPSKYGVVVMDETTGKVEKFVEKPKLFVGNKINAGIYLLNPSVLDKIELRPTSIEKETFPKIAAAQGLYAMVLPGFWMDIGQPRDYITGLRLYLDSLRKKSPAKLTTGAHIVGNVLVDETAKIGEGCLIGPDVAIGPGCVVESGVRLSRCTVMRGARIKKHACISSSIIGWHSTVGQWARIENMTILGEDVHVCDEIYTNGGVVLPHKEIKSNILKPEIVM

SEQ ID NO: 52853 - DNA, 1440 bp, Glycine max
  misc_feature (1)..(1440): Ceres Seq. ID no. 15170461
agtttcatttatgactttctcgtacttctacgagaaataatctcggtggaaattgtcaggttcttgttgccgcaggcatattattaactttatttatgaagacacaacaaaggactagagtgagtgaatagagacaagacaaagaacaacaaaattaccctgatcagtaaatgcatcatgcatgaatgaatttgataagtcaacttcatttcttttctttaatctctcctttcctctcaggaatacgcttcccaggattacacagcgtcttatgattcagatattattttcgtccctgaccggagttacaggaaatcagatgctttattttgtggggctgaaatattcatccgctacaattgcatgtgcactgacaaatttgctcccagctttcactttcatccttgcagttctcttcagacaagagaatttgggaatcaagaagagggctggtctagcaaaggtattcgggacaatattgtgtgtgagtggagccttgcttttgtcattttaccatggaaaaaccattggtttaggccaatcaagtattcactggagatatgctgagaaaatggaaggaactagctcttctggcaaaggaaacatgttcctaggccctttggtcgtaattcttagcacccttgtttgggcagcatggttcataattcaaaaagacataagcaagacatttccagctccttacacgagcactggcttaatgtgtttcatggcaagctttcaatgcgtgatcattgccgtgtgtgtcgaccacagggcctcagcttggtcactccacaatgctatgagactttcctctgccctttatgcgggaatattttgcactggattagcctattgcctcatgtcgtggaccattgagagaaaaggtcctctttatgtctctgtatttacccctttgcagcttgtcctcactgccattttgagctgggctttgcttcgggagaaattatatgttggaactgccgtagggtctctcttgatagttttgggactctattctgttctctggggaaagagtgaagaggtgaataagggagacggtattgaagaagatgcagttaaagaagcagtcaaggattcgaagaatgacatggaattgcaatcatatgtgccatccaatggtaataatggtcgggttattgcatgaagaagggacgaggcagagtgagattcctcgcaagatgctagtagctaaggattgagaaagtttcggttatttgtctttattttatttttgctctctaccagtaaatttgaattttgatatgtgtaatcttgtgtcacatttgaaaggggttcacaactctttgcagttgcattgaagacatgtattaatattattattattattatttatatattaatcaacccggaatcagttattccattaatgtgtcatcaatgttaaactatgatttc

SEQ ID NO: 52854 - protein, 328 aa, Glycine max
  peptide (1)..(328): Ceres Seq. ID no. 15170462
  misc_feature (156)..(283): Pfam Name: Integral membrane protein DUF6 Pfam Description: Integral membrane protein DUF6
  misc_feature (8)..(288): Homolog of NCBI NO: 30689857 NR Description: nodulin N21 family protein [Arabidopsis thaliana]
  misc_feature (20)..(312): Homolog of NCBI NO: 34908998 NR Description: nodulin-like protein [Oryza sativa (japonica
  misc_feature (20)..(304): Homolog of NCBI NO: 38605909 NR Description: OSJNBb0088C09.3 [Oryza sativa (japonica
  misc_feature (43)..(325): Homolog of NCBI NO: 34894436 NR Description: putative CAA303720.1 protein
  misc_feature (26)..(296): Homolog of NCBI NO: 34894456 NR Description: putative MtN21 [Oryza sativa (japonica
  misc_feature (20)..(314): Homolog of NCBI NO: 28932732 NR Description: putative nodulin protein [Gossypium hirsutum]
  misc_feature (22)..(322): Homolog of NCBI NO: 25402543 NR Description: hypothetical protein [imported] - Arabidopsis
  misc_feature (20)..(315): Homolog of NCBI NO: 28932880 NR Description: nodulin-like protein [Gossypium hirsutum]
  misc_feature (13)..(322): Homolog of NCBI NO: 21593499 NR Description: putative nodulin protein, N21 [Arabidopsis
  misc_feature (13)..(322): Homolog of NCBI NO: 15217505 NR Description: nodulin N21 family protein [Arabidopsis thaliana]
MNEFDKSTSFLFFNLSFPLRNTLPRITQRLMIQILFSSLTGVTGNQMLYFVGLKYSSATIACALTNLLPAFTFILAVLFRQENLGIKKRAGLAKVFGTILCVSGALLLSFYHGKTIGLGQSSIHWRYAEKMEGTSSSGKGNMFLGPLVVILSTLVWAAWFIIQKDISKTFPAPYTSTGLMCFMASFQCVIIAVCVDHRASAWSLHNAMRLSSALYAGIFCTGLAYCLMSWTIERKGPLYVSVFTPLQLVLTAILSWALLREKLYVGTAVGSLLIVLGLYSVLWGKSEEVNKGDGIEEDAVKEAVKDSKNDMELQSYVPSNGNNGRVIA

SEQ ID NO: 52855 - protein, 298 aa, Glycine max
  peptide (1)..(298): Ceres Seq. ID no. 15170463
  misc_feature (126)..(253): Pfam Name: Integral membrane protein DUF6 Pfam Description: Integral membrane protein DUF6
  misc_feature (1)..(258): Homolog of NCBI NO: 30689857 NR Description: nodulin N21 family protein [Arabidopsis thaliana]
  misc_feature (1)..(282): Homolog of NCBI NO: 34908998 NR Description: nodulin-like protein [Oryza sativa (japonica
  misc_feature (1)..(274): Homolog of NCBI NO: 38605909 NR Description: OSJNBb0088C09.3 [Oryza sativa (japonica
  misc_feature (13)..(295): Homolog of NCBI NO: 34894436 NR Description: putative CAA303720.1 protein
  misc_feature (1)..(266): Homolog of NCBI NO: 34894456 NR Description: putative MtN21 [Oryza sativa (japonica
  misc_feature (1)..(284): Homolog of NCBI NO: 28932732 NR Description: putative nodulin protein [Gossypium hirsutum]
  misc_feature (1)..(292): Homolog of NCBI NO: 25402543 NR Description: hypothetical protein [imported] - Arabidopsis
  misc_feature (1)..(285): Homolog of NCBI NO: 28932880 NR Description: nodulin-like protein [Gossypium hirsutum]
  misc_feature (1)..(292): Homolog of NCBI NO: 21593499 NR Description: putative nodulin protein, N21 [Arabidopsis
  misc_feature (1)..(292): Homolog of NCBI NO: 15217505 NR Description: nodulin N21 family protein [Arabidopsis thaliana]
MIQILFSSLTGVTGNQMLYFVGLKYSSATIACALTNLLPAFTFILAVLFRQENLGIKKRAGLAKVFGTILCVSGALLLSFYHGKTIGLGQSSIHWRYAEKMEGTSSSGKGNMFLGPLVVILSTLVWAAWFIIQKDISKTFPAPYTSTGLMCFMASFQCVIIAVCVDHRASAWSLHNAMRLSSALYAGIFCTGLAYCLMSWTIERKGPLYVSVFTPLQLVLTAILSWALLREKLYVGTAVGSLLIVLGLYSVLWGKSEEVNKGDGIEEDAVKEAVKDSKNDMELQSYVPSNGNNGRVIA

SEQ ID NO: 52856 - protein, 282 aa, Glycine max
  peptide (1)..(282): Ceres Seq. ID no. 15170464
  misc_feature (110)..(237): Pfam Name: Integral membrane protein DUF6 Pfam Description: Integral membrane protein DUF6
  misc_feature (1)..(242): Homolog of NCBI NO: 30689857 NR Description: nodulin N21 family protein [Arabidopsis thaliana]
  misc_feature (1)..(266): Homolog of NCBI NO: 34908998 NR Description: nodulin-like protein [Oryza sativa (japonica
  misc_feature (1)..(258): Homolog of NCBI NO: 38605909 NR Description: OSJNBb0088C09.3 [Oryza sativa (japonica
  misc_feature (1)..(279): Homolog of NCBI NO: 34894436 NR Description: putative CAA303720.1 protein
  misc_feature (1)..(250): Homolog of NCBI NO: 34894456 NR Description: putative MtN21 [Oryza sativa (japonica
  misc_feature (1)..(268): Homolog of NCBI NO: 28932732 NR Description: putative nodulin protein [Gossypium hirsutum]
  misc_feature (1)..(276): Homolog of NCBI NO: 25402543 NR Description: hypothetical protein [imported] - Arabidopsis
  misc_feature (1)..(269): Homolog of NCBI NO: 28932880 NR Description: nodulin-like protein [Gossypium hirsutum]
  misc_feature (1)..(276): Homolog of NCBI NO: 21593499 NR Description: putative nodulin protein, N21 [Arabidopsis
  misc_feature (1)..(276): Homolog of NCBI NO: 15217505 NR Description: nodulin N21 family protein [Arabidopsis thaliana]
MLYFVGLKYSSATIACALTNLLPAFTFILAVLFRQENLGIKKRAGLAKVFGTILCVSGALLLSFYHGKTIGLGQSSIHWRYAEKMEGTSSSGKGNMFLGPLVVILSTLVWAAWFIIQKDISKTFPAPYTSTGLMCFMASFQCVIIAVCVDHRASAWSLHNAMRLSSALYAGIFCTGLAYCLMSWTIERKGPLYVSVFTPLQLVLTAILSWALLREKLYVGTAVGSLLIVLGLYSVLWGKSEEVNKGDGIEEDAVKEAVKDSKNDMELQSYVPSNGNNGRVIA

SEQ ID NO: 52857 - DNA, 1987 bp, Glycine max
  misc_feature (1)..(1987): Ceres Seq. ID no. 15176499
attattttgagtgtttgtgagtttgtctgtgacactctctctttctctctctctacgcttcacttttccgtaataaacccttcaaaagcgaaagcggtttctcgtttttggaccttatctctctttctaaggttcgattctgcgtactttgggaggaacagacacacatgaaggattcgaattcgaattcggatctgtttgacccggtcatggcgatggagtccgagtggtctcgcggcggcaccacctccgatgccgatttcgccttcgccttcaacgacagcaacttctccgacagggttctccggatcgagatcatgcacgaccccgtcgacgcccgccctgattccgacgcctgcgccaccattgccgactgggcccgccaccgcaagcgccgccgcgaggatatcaaaaaggataacggtgcggatcttgcttcggtgccagacgagcaagttttgaacgggcatcaatctgaagcggatgagtgtgagaatcaagatgaagaggctgatgcaatggttgaagaaccccattctggtgatgaagctacacatagtaatgattcagactggagcatggactgctctgcaggtgcagttgttagagttaaaacgctgcatatcagttctcctatcttggctgcaaaaagtccttttttctataagcttttctcaaatgggatgagggagtctgagcagagacatgtcaccctcagaattaatgcctctgaagaggctgctctcatggagctactgaattttatgtacagcactaccttgaccactactacagcacctgcattgctagatgtgttgatggctgctgataaatttgaagttgcttcatgcatgagatactgtagccggttattgcggaatatgcctatgacacctgactctgcattgctttatctggagcttccttctagtgtcttaatggctgatgcagtccaaccattgactgatgctgcgaagcagtatcttgctggtcgatacaaggatataaccaagttccaggaagaggttattgccttgcccctagctggagtagaggcaatactgtctagtgatgatctccaggtcgcatcagaagatgctgtatatgattttgtgttgaaatggtctcgacagcagtacactaaactggaagacaggcgagaagtcctgggtacccggcttgcacaattaattcgctttccttacatgacctgccgaaagcttaagaaggtcttgacctgttctgactttgaccatgacgttgcatccaagcttgtacttgagggcctatttttcaaggccgaggctccacaccgtcaacggtcgctggcagcagaagatactgcatcttcaaaccgtcgttttgtggagagagcatacaagtaccgccccgtgaaggtggtagaatttgaacttccccggcagcagtgtgtggtgtacttggatctgaagcgggaggagtgtaacaacctcttcccatccgggcgggtttattcccaggcgttccatttgggtggacaaggtttcttcctatcagcacattgcaacatggaccaacaaagctctttccattgctttgggctgtttttgggaatgcaggaaaagggctcagtgagctttgccgtcgactatgagtttgctgcgaggtctaggccgacagaggaatttgttagcaagtacaaaggcaactacgtgttcactgggggaaaggccgttggctatagaaacttgtttgccattccatggacttcgttcatagctgaggatagtctttactttatcaatggtgtccttcaccttagagctgagctcaccatcaaacactgacccccatttctagttgtaaactttctatctattccagttggtagccttgaccttttttttagatctcaaattctcattttctgttaacactagtaatctatcaaaagcttaaatatacagcatgtgcactaaagtggatagtgttgcatgtgattgagaag

SEQ ID NO: 52858 - protein, 552 aa, Glycine max
  peptide (1)..(552): Ceres Seq. ID no. 15176500
  misc_feature (131)..(240): Pfam Name: BTB/POZ domain Pfam Description: BTB/POZ domain
  misc_feature (140)..(348): Homolog of NCBI NO: 38194229 NR Description: actinfilin [Homo sapiens]
  misc_feature (140)..(348): Homolog of NCBI NO: 21728394 NR Description: actinfilin [Rattus norvegicus]
  misc_feature (278)..(522): Homolog of NCBI NO: 27948452 NR Description: GAMYB-binding protein [Hordeum vulgare subsp.
  misc_feature (28)..(551): Homolog of NCBI NO: 15234082 NR Description: POZ domain protein family [Arabidopsis thaliana]
  misc_feature (17)..(551): Homolog of NCBI NO: 21536778 NR Description: unknown [Arabidopsis thaliana]
  misc_feature (17)..(551): Homolog of NCBI NO: 25352317 NR Description: hypothetical protein At2g46260 [imported] -
  misc_feature (17)..(551): Homolog of NCBI NO: 11282344 NR Description: hypothetical protein F2A19.200 - Arabidopsis
  misc_feature (1)..(551): Homolog of NCBI NO: 18407023 NR Description: POZ domain protein family [Arabidopsis thaliana]
  misc_feature (1)..(551): Homolog of NCBI NO: 30695452 NR Description: POZ domain protein family [Arabidopsis thaliana]
  misc_feature (1)..(551): Homolog of NCBI NO: 18412063 NR Description: POZ domain protein family [Arabidopsis thaliana]
MKDSNSNSDLFDPVMAMESEWSRGGTTSDADFAFAFNDSNFSDRVLRIEIMHDPVDARPDSDACATIADWARHRKRRREDIKKDNGADLASVPDEQVLNGHQSEADECENQDEEADAMVEEPHSGDEATHSNDSDWSMDCSAGAVVRVKTLHISSPILAAKSPFFYKLFSNGMRESEQRHVTLRINASEEAALMELLNFMYSTTLTTTTAPALLDVLMAADKFEVASCMRYCSRLLRNMPMTPDSALLYLELPSSVLMADAVQPLTDAAKQYLAGRYKDITKFQEEVIALPLAGVEAILSSDDLQVASEDAVYDFVLKWSRQQYTKLEDRREVLGTRLAQLIRFPYMTCRKLKKVLTCSDFDHDVASKLVLEGLFFKAEAPHRQRSLAAEDTASSNRRFVERAYKYRPVKVVEFELPRQQCVVYLDLKREECNNLFPSGRVYSQAFHLGGQGFFLSAHCNMDQQSSFHCFGLFLGMQEKGSVSFAVDYEFAARSRPTEEFVSKYKGNYVFTGGKAVGYRNLFAIPWTSFIAEDSLYFINGVLHLRAELTIKH

SEQ ID NO: 52859 - protein, 538 aa, Glycine max
  peptide (1)..(538): Ceres Seq. ID no. 15176501
  misc_feature (117)..(226): Pfam Name: BTB/POZ domain Pfam Description: BTB/POZ domain
  misc_feature (126)..(334): Homolog of NCBI NO: 38194229 NR Description: actinfilin [Homo sapiens]
  misc_feature (126)..(334): Homolog of NCBI NO: 21728394 NR Description: actinfilin [Rattus norvegicus]
  misc_feature (264)..(508): Homolog of NCBI NO: 27948452 NR Description: GAMYB-binding protein [Hordeum vulgare subsp.
  misc_feature (14)..(537): Homolog of NCBI NO: 15234082 NR Description: POZ domain protein family [Arabidopsis thaliana]
  misc_feature (3)..(537): Homolog of NCBI NO: 21536778 NR Description: unknown [Arabidopsis thaliana]
  misc_feature (3)..(537): Homolog of NCBI NO: 25352317 NR Description: hypothetical protein At2g46260 [imported] -
  misc_feature (3)..(537): Homolog of NCBI NO: 11282344 NR Description: hypothetical protein F2A19.200 - Arabidopsis
  misc_feature (1)..(537): Homolog of NCBI NO: 18407023 NR Description: POZ domain protein family [Arabidopsis thaliana]
  misc_feature (1)..(537): Homolog of NCBI NO: 30695452 NR Description: POZ domain protein family [Arabidopsis thaliana]
  misc_feature (1)..(537): Homolog of NCBI NO: 18412063 NR Description: POZ domain protein family [Arabidopsis thaliana]
MAMESEWSRGGTTSDADFAFAFNDSNFSDRVLRIEIMHDPVDARPDSDACATIADWARHRKRRREDIKKDNGADLASVPDEQVLNGHQSEADECENQDEEADAMVEEPHSGDEATHSNDSDWSMDCSAGAVVRVKTLHISSPILAAKSPFFYKLFSNGMRESEQRHVTLRINASEEAALMELLNFMYSTTLTTTTAPALLDVLMAADKFEVASCMRYCSRLLRNMPMTPDSALLYLELPSSVLMADAVQPLTDAAKQYLAGRYKDITKFQEEVIALPLAGVEAILSSDDLQVASEDAVYDFVLKWSRQQYTKLEDRREVLGTRLAQLIRFPYMTCRKLKKVLTCSDFDHDVASKLVLEGLFFKAEAPHRQRSLAAEDTASSNRRFVERAYKYRPVKVVEFELPRQQCVVYLDLKREECNNLFPSGRVYSQAFHLGGQGFFLSAHCNMDQQSSFHCFGLFLGMQEKGSVSFAVDYEFAARSRPTEEFVSKYKGNYVFTGGKAVGYRNLFAIPWTSFIAEDSLYFINGVLHLRAELTIKH

SEQ ID NO: 52860 - protein, 536 aa, Glycine max
  peptide (1)..(536): Ceres Seq. ID no. 15176502
  misc_feature (115)..(224): Pfam Name: BTB/POZ domain Pfam Description: BTB/POZ domain
  misc_feature (124)..(332): Homolog of NCBI NO: 38194229 NR Description: actinfilin [Homo sapiens]
  misc_feature (124)..(332): Homolog of NCBI NO: 21728394 NR Description: actinfilin [Rattus norvegicus]
  misc_feature (262)..(506): Homolog of NCBI NO: 27948452 NR Description: GAMYB-binding protein [Hordeum vulgare subsp.
  misc_feature (12)..(535): Homolog of NCBI NO: 15234082 NR Description: POZ domain protein family [Arabidopsis thaliana]
  misc_feature (1)..(535): Homolog of NCBI NO: 21536778 NR Description: unknown [Arabidopsis thaliana]
  misc_feature (1)..(535): Homolog of NCBI NO: 25352317 NR Description: hypothetical protein At2g46260 [imported] -
  misc_feature (1)..(535): Homolog of NCBI NO: 11282344 NR Description: hypothetical protein F2A19.200 - Arabidopsis
  misc_feature (1)..(535): Homolog of NCBI NO: 18407023 NR Description: POZ domain protein family [Arabidopsis thaliana]
  misc_feature (1)..(535): Homolog of NCBI NO: 30695452 NR Description: POZ domain protein family [Arabidopsis thaliana]
  misc_feature (1)..(535): Homolog of NCBI NO: 18412063 NR Description: POZ domain protein family [Arabidopsis thaliana]
MESEWSRGGTTSDADFAFAFNDSNFSDRVLRIEIMHDPVDARPDSDACATIADWARHRKRRREDIKKDNGADLASVPDEQVLNGHQSEADECENQDEEADAMVEEPHSGDEATHSNDSDWSMDCSAGAVVRVKTLHISSPILAAKSPFFYKLFSNGMRESEQRHVTLRINASEEAALMELLNFMYSTTLTTTTAPALLDVLMAADKFEVASCMRYCSRLLRNMPMTPDSALLYLELPSSVLMADAVQPLTDAAKQYLAGRYKDITKFQEEVIALPLAGVEAILSSDDLQVASEDAVYDFVLKWSRQQYTKLEDRREVLGTRLAQLIRFPYMTCRKLKKVLTCSDFDHDVASKLVLEGLFFKAEAPHRQRSLAAEDTASSNRRFVERAYKYRPVKVVEFELPRQQCVVYLDLKREECNNLFPSGRVYSQAFHLGGQGFFLSAHCNMDQQSSFHCFGLFLGMQEKGSVSFAVDYEFAARSRPTEEFVSKYKGNYVFTGGKAVGYRNLFAIPWTSFIAEDSLYFINGVLHLRAELTIKH

SEQ ID NO: 52861 - DNA, 1305 bp, Glycine max
  misc_feature (1)..(1305): Ceres Seq. ID no. 15170517
taaattccaaacaattccattcctcctttattactttgttttcaaccatctgccccaccttttcccctccctctcttcttgcttgcaccctcctacacaccatgtctcctttctcaaaccctctctttctttgtttctcacacacttcacatagtatataaatatgcatatatttttattcacatgatgacttgcacacgaaagacctttttctccaaagagcactcaccatctctagtttatgatatcttcatttctctctagctgttgcaaaggaagaacaagtcttatttgggaaccacattgaagaagaagtaagaaagaggaagtagtaccaaagcagaagaaaaacaagactgaagatggaaagaagtgtatattactatgtgctacttcttgtatttggtcatttcctttgttcaggttcaagtaggacacagaaggaagcagcaagacatatgaatgtactaaggcataatgaagagaaacaacatgaatttacagcctcaaagtccaccactcaaagggacatcaccacaccaatcactacaattcccaacttagttcccatcacttcaacaaatccaatcctgaatcctaattccaaccctgatacagtctctccagcctccacactcccaatcacaactcctaccatgccaaacaactctccagtgtcctcttcaggtgcaagctggtgcactgcaagcccaacatcctcacaaagagccttacaagtgggattggactatgcttgtggatatggtggcactgattgttctgcaattcaacctggtgggagctgctacttcccaaactctgtcagagaccatgcttcttatgccttcaataagtattatcagaagaatcctgttcctaatagctgcaattttggtggagctgctgtcatcactagcaccaatccaagtactggggcatgtcaatatgcatccactagtattagttcatcagtcttgaacacaacaaacacaagtggtgcaaatgtatttggttcagtacctgtgcccaagaacccctctgcctctgttgctgcagctgccacatcagctagatttgtacaattttgccttattctatggtcattagcaatgttggacaagaattatctataacaataatattgagagttagattttgcttggatttggtctttattttatttgggggatggggagaagggttgtgtactagaaaagcacataggtacaaaaccatcatcaatatgacatacatgatagaacactttgtagaaaagtagcaataatatgaagggtttcagtagat

SEQ ID NO: 52862 - protein, 256 aa, Glycine max
  peptide (1)..(256): Ceres Seq. ID no. 15170518
  misc_feature (58)..(189): Homolog of NCBI NO: 37533178 NR Description: hypothetical protein [Oryza sativa (japonica
  misc_feature (69)..(195): Homolog of NCBI NO: 18700155 NR Description: AT5g55180/MCO15_13 [Arabidopsis thaliana]
  misc_feature (69)..(195): Homolog of NCBI NO: 18423719 NR Description: glycosyl hydrolase family 17 [Arabidopsis
  misc_feature (107)..(199): Homolog of NCBI NO: 34909796 NR Description: P0403C05.4 [Oryza sativa (japonica
  misc_feature (109)..(205): Homolog of NCBI NO: 34393393 NR Description: putative glycosyl hydrolase
  misc_feature (108)..(189): Homolog of NCBI NO: 15218919 NR Description: beta-1,3 glucanase -related [Arabidopsis
  misc_feature (51)..(221): Homolog of NCBI NO: 40714691 NR Description: putative glucanase [Oryza sativa (japonica
  misc_feature (60)..(189): Homolog of NCBI NO: 25402549 NR Description: hypothetical protein [imported] - Arabidopsis
  misc_feature (38)..(199): Homolog of NCBI NO: 34912962 NR Description: beta-1,3 glucanase-like protein
  misc_feature (60)..(225): Homolog of NCBI NO: 22329437 NR Description: expressed protein [Arabidopsis thaliana]
MERSVYYYVLLLVFGHFLCSGSSRTQKEAARHMNVLRHNEEKQHEFTASKSTTQRDITTPITTIPNLVPITSTNPILNPNSNPDTVSPASTLPITTPTMPNNSPVSSSGASWCTASPTSSQRALQVGLDYACGYGGTDCSAIQPGGSCYFPNSVRDHASYAFNKYYQKNPVPNSCNFGGAAVITSTNPSTGACQYASTSISSSVLNTTNTSGANVFGSVPVPKNPSASVAAAATSARFVQFCLILWSLAMLDKNYL

SEQ ID NO: 52863 - protein, 224 aa, Glycine max
  peptide (1)..(224): Ceres Seq. ID no. 15170519
  misc_feature (26)..(157): Homolog of NCBI NO: 37533178 NR Description: hypothetical protein [Oryza sativa (japonica
  misc_feature (37)..(163): Homolog of NCBI NO: 18700155 NR Description: AT5g55180/MCO15_13 [Arabidopsis thaliana]
  misc_feature (37)..(163): Homolog of NCBI NO: 18423719 NR Description: glycosyl hydrolase family 17 [Arabidopsis
  misc_feature (75)..(167): Homolog of NCBI NO: 34909796 NR Description: P0403C05.4 [Oryza sativa (japonica
  misc_feature (77)..(173): Homolog of NCBI NO: 34393393 NR Description: putative glycosyl hydrolase
  misc_feature (76)..(157): Homolog of NCBI NO: 15218919 NR Description: beta-1,3 glucanase -related [Arabidopsis
  misc_feature (19)..(189): Homolog of NCBI NO: 40714691 NR Description: putative glucanase [Oryza sativa (japonica
  misc_feature (28)..(157): Homolog of NCBI NO: 25402549 NR Description: hypothetical protein [imported] - Arabidopsis
  misc_feature (6)..(167): Homolog of NCBI NO: 34912962 NR Description: beta-1,3 glucanase-like protein
  misc_feature (28)..(193): Homolog of NCBI NO: 22329437 NR Description: expressed protein [Arabidopsis thaliana]
MNVLRHNEEKQHEFTASKSTTQRDITTPITTIPNLVPITSTNPILNPNSNPDTVSPASTLPITTPTMPNNSPVSSSGASWCTASPTSSQRALQVGLDYACGYGGTDCSAIQPGGSCYFPNSVRDHASYAFNKYYQKNPVPNSCNFGGAAVITSTNPSTGACQYASTSISSSVLNTTNTSGANVFGSVPVPKNPSASVAAAATSARFVQFCLILWSLAMLDKNYL

SEQ ID NO: 52864 - protein, 158 aa, Glycine max
  peptide (1)..(158): Ceres Seq. ID no. 15170520
  misc_feature (1)..(91): Homolog of NCBI NO: 37533178 NR Description: hypothetical protein [Oryza sativa (japonica
  misc_feature (1)..(97): Homolog of NCBI NO: 18700155 NR Description: AT5g55180/MCO15_13 [Arabidopsis thaliana]
  misc_feature (1)..(97): Homolog of NCBI NO: 18423719 NR Description: glycosyl hydrolase family 17 [Arabidopsis
  misc_feature (9)..(101): Homolog of NCBI NO: 34909796 NR Description: P0403C05.4 [Oryza sativa (japonica
  misc_feature (11)..(107): Homolog of NCBI NO: 34393393 NR Description: putative glycosyl hydrolase
  misc_feature (10)..(91): Homolog of NCBI NO: 15218919 NR Description: beta-1,3 glucanase -related [Arabidopsis
  misc_feature (1)..(123): Homolog of NCBI NO: 40714691 NR Description: putative glucanase [Oryza sativa (japonica
  misc_feature (1)..(91): Homolog of NCBI NO: 25402549 NR Description: hypothetical protein [imported] - Arabidopsis
  misc_feature (1)..(101): Homolog of NCBI NO: 34912962 NR Description: beta-1,3 glucanase-like protein
  misc_feature (1)..(127): Homolog of NCBI NO: 22329437 NR Description: expressed protein [Arabidopsis thaliana]
MPNNSPVSSSGASWCTASPTSSQRALQVGLDYACGYGGTDCSAIQPGGSCYFPNSVRDHASYAFNKYYQKNPVPNSCNFGGAAVITSTNPSTGACQYASTSISSSVLNTTNTSGANVFGSVPVPKNPSASVAAAATSARFVQFCLILWSLAMLDKNYL

SEQ ID NO: 52865 - DNA, 1330 bp, Glycine max
  misc_feature (1)..(1330): Ceres Seq. ID no. 15176317
ataaccatcaagcagtagtggccccttcttccagctcttcttggctgctaaggtgacactctctgtggaatagatacacctcgcgatgaaaatggcgagggccctgcttgtcgcccttcttcttgtctcgtgctttgtggcgcttggcctgtccggccgcgccgatgcggcggccgagaggaagaccgtcggtgtctacgagctcaacaagggggatttctccatcaaggtcaccaactggggtgccaccctcatgtccgtgattctcctcgactcgagaggaaactttggggatgtgatcctgggctacgatacggttgctgaatacatgaatggcaccgcctacttcggagggctgatcggccgcgtcgccaacagaatcgccaacgcccggttcacgctggacgggaaaacctaccggctggttcccaacgacggcaacaacacgctgcacggtggtcaccggggattcgacaaggtcgtgtggacggtgaaggagcatgtcgccggcggcagctcgcccttcatcactctctactaccatagcttcgacggagagcaagggtttccgggcgacgtggacgtgcacgtgacgtaccaactctcgagcccgcacgtgctgagcgtgcgcatgaacgcgacggcacggggcaaggccaccccagtgaacctggcgcaccacgcctactggaacctcggcggcgacggcagcggcaacgtccttggcgaggaggtccgcctcttcgcctcccggtacacgcctgtggatgcctcgctcatcccgacgggccgcatggcgtccgtggctggcacaccctacgacttccgcacgccggccgccgtgggctcgcgcatcggcggcctcctgagccggggcgtcaacgggtacgacatcaactacgtcgtcgacggcaggggcctgcgcccggtagcggtcgtccgggacggcgcgtccggcagggcgatggagctgtgggcggaccagcccggggtgcagttctacacggccaacgggctcagcggggtgagggggaagggtggcaaggtctacggccactacggcgcgctctgcctggagacgcaggggttccccgacgccgtgaaccgcccgagcttcccgtcgcagatcgtccggccggggaaggtgtacaagcatgacatggtgttcaagttctccttctagtaactactagctggtggtatccaaggtcccgtggttggtcgtttgtcaggcaacacagccactcttgtgttttgtgtactgtgtgaatttgatcggctgagcttcaaggggaggaataaaagcatgttgctggttcaaggttttttc

SEQ ID NO: 52866 - protein, 365 aa, Glycine max
  peptide (1)..(365): Ceres Seq. ID no. 15176318
  misc_feature (36)..(361): Pfam Name: Aldose 1-epimerase Pfam Description: Aldose 1-epimerase
  misc_feature (31)..(364): Homolog of NCBI NO: 15242223 NR Description: aldose 1-epimerase family [Arabidopsis thaliana]
  misc_feature (35)..(364): Homolog of NCBI NO: 15228261 NR Description: aldose 1-epimerase family [Arabidopsis thaliana]
  misc_feature (35)..(364): Homolog of NCBI NO: 21537069 NR Description: aldose 1-epimerase-like protein [Arabidopsis
  misc_feature (1)..(364): Homolog of NCBI NO: 7430313 NR Description: probable aldose 1-epimerase (EC 5.1.3.3) - common
  misc_feature (1)..(364): Homolog of NCBI NO: 40882679 NR Description: putative aldose 1-epimerase
  misc_feature (13)..(364): Homolog of NCBI NO: 15824565 NR Description: non-cell-autonomous protein pathway1;
  misc_feature (9)..(364): Homolog of NCBI NO: 15824567 NR Description: non-cell-autonomous protein pathway2;
  misc_feature (1)..(365): Homolog of NCBI NO: 38567884 NR Description: OSJNBa0036B21.19 [Oryza sativa (japonica
  misc_feature (3)..(132): Homolog of NCBI NO: 38567883 NR Description: OSJNBa0036B21.18 [Oryza sativa (japonica
  misc_feature (123)..(365): Homolog of NCBI NO: 38567883 NR Description: OSJNBa0036B21.18 [Oryza sativa (japonica
MKMARALLVALLLVSCFVALGLSGRADAAAERKTVGVYELNKGDFSIKVTNWGATLMSVILLDSRGNFGDVILGYDTVAEYMNGTAYFGGLIGRVANRIANARFTLDGKTYRLVPNDGNNTLHGGHRGFDKVVWTVKEHVAGGSSPFITLYYHSFDGEQGFPGDVDVHVTYQLSSPHVLSVRMNATARGKATPVNLAHHAYWNLGGDGSGNVLGEEVRLFASRYTPVDASLIPTGRMASVAGTPYDFRTPAAVGSRIGGLLSRGVNGYDINYVVDGRGLRPVAVVRDGASGRAMELWADQPGVQFYTANGLSGVRGKGGKVYGHYGALCLETQGFPDAVNRPSFPSQIVRPGKVYKHDMVFKFSF

SEQ ID NO: 52867 - protein, 363 aa, Glycine max
  peptide (1)..(363): Ceres Seq. ID no. 15176319
  misc_feature (34)..(359): Pfam Name: Aldose 1-epimerase Pfam Description: Aldose 1-epimerase
  misc_feature (29)..(362): Homolog of NCBI NO: 15242223 NR Description: aldose 1-epimerase family [Arabidopsis thaliana]
  misc_feature (33)..(362): Homolog of NCBI NO: 15228261 NR Description: aldose 1-epimerase family [Arabidopsis thaliana]
  misc_feature (33)..(362): Homolog of NCBI NO: 21537069 NR Description: aldose 1-epimerase-like protein [Arabidopsis
  misc_feature (1)..(362): Homolog of NCBI NO: 7430313 NR Description: probable aldose 1-epimerase (EC 5.1.3.3) - common
  misc_feature (1)..(362): Homolog of NCBI NO: 40882679 NR Description: putative aldose 1-epimerase
  misc_feature (11)..(362): Homolog of NCBI NO: 15824565 NR Description: non-cell-autonomous protein pathway1;
  misc_feature (7)..(362): Homolog of NCBI NO: 15824567 NR Description: non-cell-autonomous protein pathway2;
  misc_feature (1)..(363): Homolog of NCBI NO: 38567884 NR Description: OSJNBa0036B21.19 [Oryza sativa (japonica
  misc_feature (1)..(130): Homolog of NCBI NO: 38567883 NR Description: OSJNBa0036B21.18 [Oryza sativa (japonica
  misc_feature (121)..(363): Homolog of NCBI NO: 38567883 NR Description: OSJNBa0036B21.18 [Oryza sativa (japonica
MARALLVALLLVSCFVALGLSGRADAAAERKTVGVYELNKGDFSIKVTNWGATLMSVILLDSRGNFGDVILGYDTVAEYMNGTAYFGGLIGRVANRIANARFTLDGKTYRLVPNDGNNTLHGGHRGFDKVVWTVKEHVAGGSSPFITLYYHSFDGEQGFPGDVDVHVTYQLSSPHVLSVRMNATARGKATPVNLAHHAYWNLGGDGSGNVLGEEVRLFASRYTPVDASLIPTGRMASVAGTPYDFRTPAAVGSRIGGLLSRGVNGYDINYVVDGRGLRPVAVVRDGASGRAMELWADQPGVQFYTANGLSGVRGKGGKVYGHYGALCLETQGFPDAVNRPSFPSQIVRPGKVYKHDMVFKFSF

SEQ ID NO: 52868 - protein, 309 aa, Glycine max
  peptide (1)..(309): Ceres Seq. ID no. 15176320
  misc_feature (1)..(305): Pfam Name: Aldose 1-epimerase Pfam Description: Aldose 1-epimerase
  misc_feature (1)..(308): Homolog of NCBI NO: 15242223 NR Description: aldose 1-epimerase family [Arabidopsis thaliana]
  misc_feature (1)..(308): Homolog of NCBI NO: 15228261 NR Description: aldose 1-epimerase family [Arabidopsis thaliana]
  misc_feature (1)..(308): Homolog of NCBI NO: 21537069 NR Description: aldose 1-epimerase-like protein [Arabidopsis
  misc_feature (1)..(308): Homolog of NCBI NO: 7430313 NR Description: probable aldose 1-epimerase (EC 5.1.3.3) - common
  misc_feature (1)..(308): Homolog of NCBI NO: 40882679 NR Description: putative aldose 1-epimerase
  misc_feature (1)..(308): Homolog of NCBI NO: 15824565 NR Description: non-cell-autonomous protein pathway1;
  misc_feature (1)..(308): Homolog of NCBI NO: 15824567 NR Description: non-cell-autonomous protein pathway2;
  misc_feature (1)..(309): Homolog of NCBI NO: 38567884 NR Description: OSJNBa0036B21.19 [Oryza sativa (japonica
  misc_feature (1)..(76): Homolog of NCBI NO: 38567883 NR Description: OSJNBa0036B21.18 [Oryza sativa (japonica
  misc_feature (67)..(309): Homolog of NCBI NO: 38567883 NR Description: OSJNBa0036B21.18 [Oryza sativa (japonica
MSVILLDSRGNFGDVILGYDTVAEYMNGTAYFGGLIGRVANRIANARFTLDGKTYRLVPNDGNNTLHGGHRGFDKVVWTVKEHVAGGSSPFITLYYHSFDGEQGFPGDVDVHVTYQLSSPHVLSVRMNATARGKATPVNLAHHAYWNLGGDGSGNVLGEEVRLFASRYTPVDASLIPTGRMASVAGTPYDFRTPAAVGSRIGGLLSRGVNGYDINYVVDGRGLRPVAVVRDGASGRAMELWADQPGVQFYTANGLSGVRGKGGKVYGHYGALCLETQGFPDAVNRPSFPSQIVRPGKVYKHDMVFKFSF

SEQ ID NO: 52869 - DNA, 1429 bp, Glycine max
  misc_feature (1)..(1429): Ceres Seq. ID no. 15176611
accgtcgattcgcagctcgctcgccaatccaaccaatccataacccggctgcccctcgcccgtctccgccgcacccccaaaaccctagctcccctccccaccccaccccgtccccccaccgcctccggccgccgccgccgcccgcgaagatgccgccgaacctcgagtgccggatgtacgagccgcggttcccggaggtggacgcggcggtgatgatccaggtgaagcacatcgccgacatgggcgcctacgtctccctcctcgagtacaacaacatcgagggcatgatcctcttctccgagctctcccgccgccgcatccgctccatctcctccctcatcaaggtcggccgccaggagccctccatggtgctccgcgtcgaccgcgacaagggctacatcgacctctccaagcgccgcgtctccgaggaggaggccgccacctgcgaggaccgctacaacaagtccaagctcgtccactccatcatgcgccacgccgccgacaccctcggcgtcgacctcgagcccctctaccagcgcatcggctggcccctctaccgcaggtacggccacgccttcgaggccttcaagctcatcgtcaccgaccccgacgccgtgctcgacgtcctcacctacgaggagaccgtcgtcggtcccgatggtgtggaggtgactaacactgtgccggctgtcacccctgaggttaaggatgccctggtcaagaacataaggaggagaatgacaccacagccactcaagattcgtgctgatgttgagatgaaatgcttccagtttgatggtgttctccacattaaggaagccatgaggaaagctgaagctgctggaaatgctgattgccctgtgaagattaagctagttgctcctccgctttatgttctgaccacacagacacttgacaaagaccaggggatagcagttctgacaaatgcaaccaaagtttgtgcagaggcaattgaaaagcacaaggggaaattggtggtgaaggaagcagccagagctgtgagcgagagagacgacaagctgtttgcggacacgattgagaagctgaagctagcaggcgaggaggtcgacggcgacgacgacagcgaggaggaggacaatggcatgggggacgtggacttcacaaaggctggcgctggcacggactgagcgagtctcctcccaagtgggatgaggtcacttgtacagcgccagcaacgaaatgaaggggaagaatgtttggctcctctttgaggaggcacgttggatggatggatgagttttttttactctgttactgatattgatcagttgtaggctacccgtagttttacagattgatttgcttttctctgagcactgatgctgaatactgttaattgcgctttttggtacctgttttcatcaacatttatacatggattttcctc

SEQ ID NO: 52870 - protein, 388 aa, Glycine max
  peptide (1)..(388): Ceres Seq. ID no. 15176612
  misc_feature (63)..(138): Pfam Name: S1 RNA binding domain Pfam Description: S1 RNA binding domain
  misc_feature (56)..(215): Homolog of NCBI NO: 40744551 NR Description: hypothetical protein AN3156.2 [Aspergillus
  misc_feature (211)..(375): Homolog of NCBI NO: 40744551 NR Description: hypothetical protein AN3156.2 [Aspergillus
  misc_feature (56)..(215): Homolog of NCBI NO: 32417010 NR Description: hypothetical protein [Neurospora crassa]
  misc_feature (211)..(373): Homolog of NCBI NO: 32417010 NR Description: hypothetical protein [Neurospora crassa]
  misc_feature (48)..(313): Homolog of NCBI NO: 4588003 NR Description: hypothetical EIF-2-Alpha [Arabidopsis thaliana]
  misc_feature (48)..(386): Homolog of NCBI NO: 13549160 NR Description: protein synthesis initiation factor eIF2 alpha
  misc_feature (48)..(386): Homolog of NCBI NO: 15239135 NR Description: eukaryotic translation initiation factor 2 alpha
  misc_feature (48)..(386): Homolog of NCBI NO: 21537411 NR Description: putative eukaryotic translation initiation factor
  misc_feature (48)..(386): Homolog of NCBI NO: 18405334 NR Description: eukaryotic translation initiation factor 2 alpha
  misc_feature (52)..(387): Homolog of NCBI NO: 34898218 NR Description: putative eukaryotic translation initiation factor
RRFAARSPIQPIHNPAAPRPSPPHPQNPSSPPHPTPSPHRLRPPPPPAKMPPNLECRMYEPRFPEVDAAVMIQVKHIADMGAYVSLLEYNNIEGMILFSELSRRRIRSISSLIKVGRQEPSMVLRVDRDKGYIDLSKRRVSEEEAATCEDRYNKSKLVHSIMRHAADTLGVDLEPLYQRIGWPLYRRYGHAFEAFKLIVTDPDAVLDVLTYEETVVGPDGVEVTNTVPAVTPEVKDALVKNIRRRMTPQPLKIRADVEMKCFQFDGVLHIKEAMRKAEAAGNADCPVKIKLVAPPLYVLTTQTLDKDQGIAVLTNATKVCAEAIEKHKGKLVVKEAARAVSERDDKLFADTIEKLKLAGEEVDGDDDSEEEDNGMGDVDFTKAGAGTD

SEQ ID NO: 52871 - protein, 339 aa, Glycine max
  peptide (1)..(339): Ceres Seq. ID no. 15176613
  misc_feature (14)..(89): Pfam Name: S1 RNA binding domain Pfam Description: S1 RNA binding domain
  misc_feature (7)..(166): Homolog of NCBI NO: 40744551 NR Description: hypothetical protein AN3156.2 [Aspergillus
  misc_feature (162)..(326): Homolog of NCBI NO: 40744551 NR Description: hypothetical protein AN3156.2 [Aspergillus
  misc_feature (7)..(166): Homolog of NCBI NO: 32417010 NR Description: hypothetical protein [Neurospora crassa]
  misc_feature (162)..(324): Homolog of NCBI NO: 32417010 NR Description: hypothetical protein [Neurospora crassa]
  misc_feature (1)..(264): Homolog of NCBI NO: 4588003 NR Description: hypothetical EIF-2-Alpha [Arabidopsis thaliana]
  misc_feature (1)..(337): Homolog of NCBI NO: 13549160 NR Description: protein synthesis initiation factor eIF2 alpha
  misc_feature (1)..(337): Homolog of NCBI NO: 15239135 NR Description: eukaryotic translation initiation factor 2 alpha
  misc_feature (1)..(337): Homolog of NCBI NO: 21537411 NR Description: putative eukaryotic translation initiation factor
  misc_feature (1)..(337): Homolog of NCBI NO: 18405334 NR Description: eukaryotic translation initiation factor 2 alpha
  misc_feature (3)..(338): Homolog of NCBI NO: 34898218 NR Description: putative eukaryotic translation initiation factor
MPPNLECRMYEPRFPEVDAAVMIQVKHIADMGAYVSLLEYNNIEGMILFSELSRRRIRSISSLIKVGRQEPSMVLRVDRDKGYIDLSKRRVSEEEAATCEDRYNKSKLVHSIMRHAADTLGVDLEPLYQRIGWPLYRRYGHAFEAFKLIVTDPDAVLDVLTYEETVVGPDGVEVTNTVPAVTPEVKDALVKNIRRRMTPQPLKIRADVEMKCFQFDGVLHIKEAMRKAEAAGNADCPVKIKLVAPPLYVLTTQTLDKDQGIAVLTNATKVCAEAIEKHKGKLVVKEAARAVSERDDKLFADTIEKLKLAGEEVDGDDDSEEEDNGMGDVDFTKAGAGTD

SEQ ID NO: 52872 - protein, 331 aa, Glycine max
  peptide (1)..(331): Ceres Seq. ID no. 15176614
  misc_feature (6)..(81): Pfam Name: S1 RNA binding domain Pfam Description: S1 RNA binding domain
  misc_feature (1)..(158): Homolog of NCBI NO: 40744551 NR Description: hypothetical protein AN3156.2 [Aspergillus
  misc_feature (154)..(318): Homolog of NCBI NO: 40744551 NR Description: hypothetical protein AN3156.2 [Aspergillus
  misc_feature (1)..(158): Homolog of NCBI NO: 32417010 NR Description: hypothetical protein [Neurospora crassa]
  misc_feature (154)..(316): Homolog of NCBI NO: 32417010 NR Description: hypothetical protein [Neurospora crassa]
  misc_feature (1)..(256): Homolog of NCBI NO: 4588003 NR Description: hypothetical EIF-2-Alpha [Arabidopsis thaliana]
  misc_feature (1)..(329): Homolog of NCBI NO: 13549160 NR Description: protein synthesis initiation factor eIF2 alpha
  misc_feature (1)..(329): Homolog of NCBI NO: 15239135 NR Description: eukaryotic translation initiation factor 2 alpha
  misc_feature (1)..(329): Homolog of NCBI NO: 21537411 NR Description: putative eukaryotic translation initiation factor
  misc_feature (1)..(329): Homolog of NCBI NO: 18405334 NR Description: eukaryotic translation initiation factor 2 alpha
  misc_feature (1)..(330): Homolog of NCBI NO: 34898218 NR Description: putative eukaryotic translation initiation factor
MYEPRFPEVDAAVMIQVKHIADMGAYVSLLEYNNIEGMILFSELSRRRIRSISSLIKVGRQEPSMVLRVDRDKGYIDLSKRRVSEEEAATCEDRYNKSKLVHSIMRHAADTLGVDLEPLYQRIGWPLYRRYGHAFEAFKLIVTDPDAVLDVLTYEETVVGPDGVEVTNTVPAVTPEVKDALVKNIRRRMTPQPLKIRADVEMKCFQFDGVLHIKEAMRKAEAAGNADCPVKIKLVAPPLYVLTTQTLDKDQGIAVLTNATKVCAEAIEKHKGKLVVKEAARAVSERDDKLFADTIEKLKLAGEEVDGDDDSEEEDNGMGDVDFTKAGAGTD

SEQ ID NO: 52873 - DNA, 804 bp, Glycine max
  misc_feature (1)..(804): Ceres Seq. ID no. 15170444
actaacacaacaatattggttaaaaatctccactcattcattttgatatctctctctcttttaaatcaaaactccaaaaaagaactatggaacgtaactccctcttaacggttgcattgctctgcattgtcgtcgccggtgtcggtggccagtctcctgcctcctctccaactagctctcccgccgctccttctgctccaactacttcccctgccaaccctcccgccgctactccttcctctcccatggctaaaacgcctgcttcttcacccgtggaagcacctaagtctccggctcctgtagtatcctctccaccgccgacaccagttcccgagagctctccaccgtctccttcacccaaggcttccgctccggtgagctctccaccggctccaacaccagaagcagttactcctcctgctccagtagccgctccagccgctgatgtaccggctccggctccaaaaaagcataagaagtccaagaagcatcaagcaccggccccggctcctgaacttgacagtccacctgcaccaccgacagaagctcccggccctagctccgaagacgcaagctctcccggtccagccacatccgccgacgatcagagcggagcagagagcacaagggtgttgcggaatgtagcggtgggcgcggctgcaaccgcctgggccgttctcgttatggccttttaagttatttgtatttattttttcgcccttagttctttagttttgttcttttaactctacgattgtctctttcttttttcacatttgagtaatgagtattatttcattgatt

SEQ ID NO: 52874 - protein, 202 aa, Glycine max
  peptide (1)..(202): Ceres Seq. ID no. 15170445
  misc_feature (24)..(175): Pfam Name: Glycoprotein GG/GX Pfam Description: Glycoprotein GG/GX
  misc_feature (1)..(198): Homolog of NCBI NO: 7441828 NR Description: extensin-like cell wall protein - sea-island
  misc_feature (1)..(198): Homolog of NCBI NO: 7441829 NR Description: proline-rich cell wall protein - upland cotton
  misc_feature (9)..(198): Homolog of NCBI NO: 15226024 NR Description: arabinogalactan-protein (AGP9) [Arabidopsis
  misc_feature (24)..(195): Homolog of NCBI NO: 10945615 NR Description: arabinogalactan protein [Nicotiana alata]
  misc_feature (23)..(198): Homolog of NCBI NO: 5139695 NR Description: expressed in cucumber hypocotyls [Cucumis
  misc_feature (94)..(202): Homolog of NCBI NO: 15724156 NR Description: AT4g37450/F6G17_100 [Arabidopsis thaliana]
  misc_feature (1)..(195): Homolog of NCBI NO: 1362097 NR Description: probable arabinogalactan protein precursor -
  misc_feature (1)..(202): Homolog of NCBI NO: 15227783 NR Description: arabinogalactan-protein (AGP17) [Arabidopsis
  misc_feature (1)..(174): Homolog of NCBI NO: 7486500 NR Description: hypothetical protein F6G17.100 - Arabidopsis
  misc_feature (1)..(202): Homolog of NCBI NO: 18420042 NR Description: arabinogalactan-protein (AGP18) [Arabidopsis
MERNSLLTVALLCIVVAGVGGQSPASSPTSSPAAPSAPTTSPANPPAATPSSPMAKTPASSPVEAPKSPAPVVSSPPPTPVPESSPPSPSPKASAPVSSPPAPTPEAVTPPAPVAAPAADVPAPAPKKHKKSKKHQAPAPAPELDSPPAPPTEAPGPSSEDASSPGPATSADDQSGAESTRVLRNVAVGAAATAWAVLVMAF

SEQ ID NO: 52875 - protein, 149 aa, Glycine max
  peptide (1)..(149): Ceres Seq. ID no. 15170446
  misc_feature (1)..(122): Pfam Name: Glycoprotein GG/GX Pfam Description: Glycoprotein GG/GX
  misc_feature (1)..(145): Homolog of NCBI NO: 7441828 NR Description: extensin-like cell wall protein - sea-island
  misc_feature (1)..(145): Homolog of NCBI NO: 7441829 NR Description: proline-rich cell wall protein - upland cotton
  misc_feature (1)..(145): Homolog of NCBI NO: 15226024 NR Description: arabinogalactan-protein (AGP9) [Arabidopsis
  misc_feature (1)..(142): Homolog of NCBI NO: 10945615 NR Description: arabinogalactan protein [Nicotiana alata]
  misc_feature (1)..(145): Homolog of NCBI NO: 5139695 NR Description: expressed in cucumber hypocotyls [Cucumis
  misc_feature (41)..(149): Homolog of NCBI NO: 15724156 NR Description: AT4g37450/F6G17_100 [Arabidopsis thaliana]
  misc_feature (1)..(142): Homolog of NCBI NO: 1362097 NR Description: probable arabinogalactan protein precursor -
  misc_feature (1)..(149): Homolog of NCBI NO: 15227783 NR Description: arabinogalactan-protein (AGP17) [Arabidopsis
  misc_feature (1)..(121): Homolog of NCBI NO: 7486500 NR Description: hypothetical protein F6G17.100 - Arabidopsis
  misc_feature (1)..(149): Homolog of NCBI NO: 18420042 NR Description: arabinogalactan-protein (AGP18) [Arabidopsis
MAKTPASSPVEAPKSPAPVVSSPPPTPVPESSPPSPSPKASAPVSSPPAPTPEAVTPPAPVAAPAADVPAPAPKKHKKSKKHQAPAPAPELDSPPAPPTEAPGPSSEDASSPGPATSADDQSGAESTRVLRNVAVGAAATAWAVLVMAF

SEQ ID NO: 52876 - DNA, 1019 bp, Glycine max
  misc_feature (1)..(1019): Ceres Seq. ID no. 14309484
ctccaatcttcttctcttcttttctcgttctctttctcttgtgctgcgtgccaagccagacccatacatacacccacccagcccaccaatcactgccagcagcgacggagtgagggaagcaagcaaggaaggaagggacgctcggatggcgatgggagcggctgtgcgggaggcggcggcggacggcgtcgtgaccttcctctgggtgctctgcgtctccacgctcggcgcctccacggccgccgtcaccacctacctcagcctgcacgaggggatccactacgccctcctcgtcaccgtctccatcctcgccctcctcctcttcgccttcaacctcctctgcgacgccctcggcggcgccagcttcaaccccaccggcgtcgccgccttctacgccgccggcctcaccagcccctcgctcttctccatcgcgctccgcctaccagcgcaggccgccggagccgtgggcggagctctggccatctccgagctgatgccggagcagtacaagcacatgctcggcgggccctcgctcaaggtggatccccacaccggcgccgtcgccgaaggtgtgctcaccttcgtcatcacctttgccgtcctctgcatcatcgtcaagggaccccgcaaccccatcgtcaagacagcgatgctctccgtcaccaccgtcagcctcgtcctcaccggcgccgcatacaccggcccctccatgaaccctgccaacgcctttggttgggcgtatgttaacaatctgcacaacacctgggagcagctgtacgtgtactggatatgccccttcatcggtgccattctcgctgcgtggaccttcagggccgtgttcccgccaccggcccctaagcccaagaccaagaaagcatgatgaactcaagcacaaactttgacttagcaatttggggacctgaagaagcgaacatggtttgctagggaataatttgaaattgtatttaatcacctcaatgttacaccgatgtttaacttaaaagtgatcatttatcagt

SEQ ID NO: 52877 - protein, 292 aa, Glycine max
  peptide (1)..(292): Ceres Seq. ID no. 14309485
  misc_feature (49)..(276): Pfam Name: Major intrinsic protein Pfam Description: Major intrinsic protein
  misc_feature (121)..(285): Homolog of NCBI NO: 15811692 NR Description: aquaporin [Pyrocoelia rufa]
  misc_feature (95)..(291): Homolog of NCBI NO: 13447817 NR Description: small basic membrane integral protein ZmSIP2-1
  misc_feature (61)..(290): Homolog of NCBI NO: 15230175 NR Description: expressed protein [Arabidopsis thaliana]
  misc_feature (53)..(292): Homolog of NCBI NO: 15238785 NR Description: expressed protein [Arabidopsis thaliana]
  misc_feature (51)..(292): Homolog of NCBI NO: 15229225 NR Description: major intrinsic protein (MIP) family [Arabidopsis
  misc_feature (49)..(292): Homolog of NCBI NO: 13447813 NR Description: small basic membrane integral protein ZmSIP1-1
  misc_feature (49)..(292): Homolog of NCBI NO: 13447815 NR Description: small basic membrane integral protein ZmSIP1-2
  misc_feature (49)..(292): Homolog of NCBI NO: 34906220 NR Description: P0666G04.16 [Oryza sativa (japonica
SNLLLFFSRSLSLVLRAKPDPYIHPPSPPITASSDGVREASKEGRDARMAMGAAVREAAADGVVTFLWVLCVSTLGASTAAVTTYLSLHEGIHYALLVTVSILALLLFAFNLLCDALGGASFNPTGVAAFYAAGLTSPSLFSIALRLPAQAAGAVGGALAISELMPEQYKHMLGGPSLKVDPHTGAVAEGVLTFVITFAVLCIIVKGPRNPIVKTAMLSVTTVSLVLTGAAYTGPSMNPANAFGWAYVNNLHNTWEQLYVYWICPFIGAILAAWTFRAVFPPPAPKPKTKKA

SEQ ID NO: 52878 - protein, 248 aa, Glycine max
  peptide (1)..(248): Ceres Seq. ID no. 14309486
LQSSSLLFSFSFSCAACQARPIHTPTQPTNHCQQRRSEGSKQGRKGRSDGDGSGCAGGGGGRRRDLPLGALRLHARRLHGRRHHLPQPARGDPLRPPRHRLHPRPPPLRLQPPLRRPRRRQLQPHRRRRLLRRRPHQPLALLHRAPPTSAGRRSRGRSSGHLRADAGAVQAHARRALAQGGSPHRRRRRRCAHLRHHLCRPLHHRQGTPQPHRQDSDALRHHRQPRPHRRRIHRPLHEPCQRLWLGVC

SEQ ID NO: 52879 - protein, 244 aa, Glycine max
  peptide (1)..(244): Ceres Seq. ID no. 14309487
  misc_feature (1)..(228): Pfam Name: Major intrinsic protein Pfam Description: Major intrinsic protein
  misc_feature (73)..(237): Homolog of NCBI NO: 15811692 NR Description: aquaporin [Pyrocoelia rufa]
  misc_feature (47)..(243): Homolog of NCBI NO: 13447817 NR Description: small basic membrane integral protein ZmSIP2-1
  misc_feature (13)..(242): Homolog of NCBI NO: 15230175 NR Description: expressed protein [Arabidopsis thaliana]
  misc_feature (5)..(244): Homolog of NCBI NO: 15238785 NR Description: expressed protein [Arabidopsis thaliana]
  misc_feature (3)..(244): Homolog of NCBI NO: 15229225 NR Description: major intrinsic protein (MIP) family [Arabidopsis
  misc_feature (1)..(244): Homolog of NCBI NO: 13447813 NR Description: small basic membrane integral protein ZmSIP1-1
  misc_feature (1)..(244): Homolog of NCBI NO: 13447815 NR Description: small basic membrane integral protein ZmSIP1-2
  misc_feature (1)..(244): Homolog of NCBI NO: 34906220 NR Description: P0666G04.16 [Oryza sativa (japonica
MAMGAAVREAAADGVVTFLWVLCVSTLGASTAAVTTYLSLHEGIHYALLVTVSILALLLFAFNLLCDALGGASFNPTGVAAFYAAGLTSPSLFSIALRLPAQAAGAVGGALAISELMPEQYKHMLGGPSLKVDPHTGAVAEGVLTFVITFAVLCIIVKGPRNPIVKTAMLSVTTVSLVLTGAAYTGPSMNPANAFGWAYVNNLHNTWEQLYVYWICPFIGAILAAWTFRAVFPPPAPKPKTKKA

SEQ ID NO: 52880 - DNA, 594 bp, Glycine max
  misc_feature (1)..(594): Ceres Seq. ID no. 14309458
atcccacagagccaactccaaataaattaaatatataaataaaataaattgaactcctatctggggtttcttttacaaatttatttatttaatttatttggaaaataacaaatcattagtaataaatgaggatgtctaaaaatgtcaaagtgttggtctctctagttcttgtagtgttattggctcttgcagcaaccaatattgaggcaagatacataaattatcgcgatcttcgtagtggagatcacagtttggcttgcgataaggcgaatcctagcacctgcacgaagcaagaagtcaatcgttaccaaagaggatgcgagacggccgatcggtgccgtgaatctcgttaatttatacagatgataaccgaagagcataatcatgcatcaaattagtttcctaattactataatagattgacaggcttctaacttggagaacaaatcttggttagtttatagaaatgcaatcctcgtattgatttgagatgatcaaattgatttcctttattatttaattagtctgttattggttttgtattattttaacacgatgatgttacgatcaaacaaatataaatatattgttccc

SEQ ID NO: 52881 - protein, 75 aa, Glycine max
  peptide (1)..(75): Ceres Seq. ID no. 14309459
  misc_feature (11)..(72): Pfam Name: Rapid ALkalinization Factor (RALF) Pfam Description: Rapid ALkalinization Factor (RALF)
  misc_feature (1)..(74): Homolog of NCBI NO: 21592764 NR Description: unknown [Arabidopsis thaliana]
  misc_feature (1)..(74): Homolog of NCBI NO: 18407236 NR Description: expressed protein [Arabidopsis thaliana]
  misc_feature (1)..(72): Homolog of NCBI NO: 21592626 NR Description: unknown [Arabidopsis thaliana]
  misc_feature (1)..(72): Homolog of NCBI NO: 18407238 NR Description: expressed protein [Arabidopsis thaliana]
MRMSKNVKVLVSLVLVVLLALAATNIEARYINYRDLRSGDHSLACDKANPSTCTKQEVNRYQRGCETADRCRESR

SEQ ID NO: 52882 - protein, 73 aa, Glycine max
  peptide (1)..(73): Ceres Seq. ID no. 14309460
  misc_feature (9)..(70): Pfam Name: Rapid ALkalinization Factor (RALF) Pfam Description: Rapid ALkalinization Factor (RALF)
  misc_feature (1)..(72): Homolog of NCBI NO: 21592764 NR Description: unknown [Arabidopsis thaliana]
  misc_feature (1)..(72): Homolog of NCBI NO: 18407236 NR Description: expressed protein [Arabidopsis thaliana]
  misc_feature (1)..(70): Homolog of NCBI NO: 21592626 NR Description: unknown [Arabidopsis thaliana]
  misc_feature (1)..(70): Homolog of NCBI NO: 18407238 NR Description: expressed protein [Arabidopsis thaliana]
MSKNVKVLVSLVLVVLLALAATNIEARYINYRDLRSGDHSLACDKANPSTCTKQEVNRYQRGCETADRCRESR

SEQ ID NO: 52883 - DNA, 1318 bp, Glycine max
  misc_feature (1)..(1318): Ceres Seq. ID no. 15170451
ccccactttcccctccccccgactgcgaatcattccgttcgtcgctcgacatggcgacggaacctgtagagtttcaggttgtggtgctcagggtgtccatccattgtgaagggtgcaaaaagaaggtgaagaaggtgctcctacatattgatggcgtgtacagatgcgacatcgacgcccggagaaacagggtggcggtcacagtctctccaaagatcgacgccgggatcctcgtcgcgaggctgcgcaagtccggcaagctggcggagccttggccggaggagcccaagcagcagcaggagccgcctccgcctgcagagagccaaagccaagaaaccaagaaccaagcagatgatgccagcaagcctaacgaggccgccgagaagcccgctgccgagccaagcaccgcccagcctccggcgccggagcccgagaagaccgccgaagagaccccaccgccggccgaagaaaacaaagggcccgacgaggccaaggcggagacagggccgcaacaacaacccagcgaggcgaacgagaaagccaagcagcagcagcagcaggagcagcatgatcatcatgataagccgatggacgccagggtgacgatggagtacgacgacgcccgcagcagaggcgtctacggctacgggggcccccaccagtacatgccagcgacacggcagccgccggtgcacgtcatgagctacaacgtggcgcggccgatggcgagctcgtcctactacgccgccgcgccaacgccggcggcgatgccgatgcccacgcccatggcgaggccagggccgtcgcacggcggctacatagacgagtacgcgcctccgaactactacagccggccggcgccatcggcgtacgagccctactactaccccgattcccagccatcaccatacggacagcatcagcgttctgcggccgaggactactactacggagcgcccccgccgcctacgcagaggagcgccttctcgccgccgcgggaggcttacggcgacatgttcaacgacgagaatgccaattcttgcagcgtgatgtgaaggggatccattcggcaggcttagctagttaattcaaagttttttaagtgaggacctctccatgtgttagagccgagattttagtagtagcaaccgatgtattagcagtattgctcaaagttccaagctagtactagaataaaccggtgcatgcatgagaggaagaacgggagggactcatggaacagctctgatggatgcttactggagcaattttgtaatatacttcctctgtgtttgaactgcaaaaacgtcttatattt

SEQ ID NO: 52884 - protein, 350 aa, Glycine max
  peptide (1)..(350): Ceres Seq. ID no. 15170452
  misc_feature (90)..(322): Pfam Name: Extensin-like region Pfam Description: Extensin-like region
  misc_feature (89)..(331): Homolog of NCBI NO: 20259488 NR Description: unknown protein [Arabidopsis thaliana]
  misc_feature (20)..(123): Homolog of NCBI NO: 15241025 NR Description: heavy-metal-associated domain-containing protein
  misc_feature (93)..(350): Homolog of NCBI NO: 33146848 NR Description: copper chaperone (CCH)-related protein-like
  misc_feature (22)..(212): Homolog of NCBI NO: 15219992 NR Description: heavy-metal-associated domain-containing protein
  misc_feature (20)..(171): Homolog of NCBI NO: 12083536 NR Description: hypothetical protein [Oryza sativa]
  misc_feature (21)..(350): Homolog of NCBI NO: 27754505 NR Description: putative copper chaperone (CCH) protein
  misc_feature (21)..(350): Homolog of NCBI NO: 21536659 NR Description: unknown [Arabidopsis thaliana]
  misc_feature (21)..(350): Homolog of NCBI NO: 18405728 NR Description: copper chaperone (CCH)-related [Arabidopsis
  misc_feature (20)..(302): Homolog of NCBI NO: 33146848 NR Description: copper chaperone (CCH)-related protein-like
  misc_feature (72)..(337): Homolog of NCBI NO: 34907156 NR Description: P0506E04.29 [Oryza sativa (japonica
PLSPPPDCESFRSSLDMATEPVEFQVVVLRVSIHCEGCKKKVKKVLLHIDGVYRCDIDARRNRVAVTVSPKIDAGILVARLRKSGKLAEPWPEEPKQQQEPPPPAESQSQETKNQADDASKPNEAAEKPAAEPSTAQPPAPEPEKTAEETPPPAEENKGPDEAKAETGPQQQPSEANEKAKQQQQQEQHDHHDKPMDARVTMEYDDARSRGVYGYGGPHQYMPATRQPPVHVMSYNVARPMASSSYYAAAPTPAAMPMPTPMARPGPSHGGYIDEYAPPNYYSRPAPSAYEPYYYPDSQPSPYGQHQRSAAEDYYYGAPPPPTQRSAFSPPREAYGDMFNDENANSCSVM

SEQ ID NO: 52885 - protein, 334 aa, Glycine max
  peptide (1)..(334): Ceres Seq. ID no. 15170453
  misc_feature (74)..(306): Pfam Name: Extensin-like region Pfam Description: Extensin-like region
  misc_feature (73)..(315): Homolog of NCBI NO: 20259488 NR Description: unknown protein [Arabidopsis thaliana]
  misc_feature (4)..(107): Homolog of NCBI NO: 15241025 NR Description: heavy-metal-associated domain-containing protein
  misc_feature (77)..(334): Homolog of NCBI NO: 33146848 NR Description: copper chaperone (CCH)-related protein-like
  misc_feature (6)..(196): Homolog of NCBI NO: 15219992 NR Description: heavy-metal-associated domain-containing protein
  misc_feature (4)..(155): Homolog of NCBI NO: 12083536 NR Description: hypothetical protein [Oryza sativa]
  misc_feature (5)..(334): Homolog of NCBI NO: 27754505 NR Description: putative copper chaperone (CCH) protein
  misc_feature (5)..(334): Homolog of NCBI NO: 21536659 NR Description: unknown [Arabidopsis thaliana]
  misc_feature (5)..(334): Homolog of NCBI NO: 18405728 NR Description: copper chaperone (CCH)-related [Arabidopsis
  misc_feature (4)..(286): Homolog of NCBI NO: 33146848 NR Description: copper chaperone (CCH)-related protein-like
  misc_feature (56)..(321): Homolog of NCBI NO: 34907156 NR Description: P0506E04.29 [Oryza sativa (japonica
MATEPVEFQVVVLRVSIHCEGCKKKVKKVLLHIDGVYRCDIDARRNRVAVTVSPKIDAGILVARLRKSGKLAEPWPEEPKQQQEPPPPAESQSQETKNQADDASKPNEAAEKPAAEPSTAQPPAPEPEKTAEETPPPAEENKGPDEAKAETGPQQQPSEANEKAKQQQQQEQHDHHDKPMDARVTMEYDDARSRGVYGYGGPHQYMPATRQPPVHVMSYNVARPMASSSYYAAAPTPAAMPMPTPMARPGPSHGGYIDEYAPPNYYSRPAPSAYEPYYYPDSQPSPYGQHQRSAAEDYYYGAPPPPTQRSAFSPPREAYGDMFNDENANSCSVM

SEQ ID NO: 52886 - DNA, 1420 bp, Glycine max
  misc_feature (1)..(1420): Ceres Seq. ID no. 15176309
atagagatcgttagagtgagtgattgaaattcttgagacccacatcgtgtgtgtttgttttcattcctcggaggatattctaaagatggttgcgagaaccccaccaaagcagaagaagctgttggctgctctcaaccctgttctgattaaagaaacactcaacaaggtggatcagtgcgtggctcggctgcaggaacttcagtacactgtgactggtggaaccaaggtggtgtcaggggtgactctcagccctcgcagcaccagaggctatctcagaaccagtctcaggtgcaagcaagaatcactcaggatcaagaatggtgcctcaaggagatctcctgtggggaagtttccagcaaacacaggtgaatggaagagaatgtcattgcctgcaatgcttgtaggcgaaactgttggagaaattttgcaggcaagtcagtttgccagagaaatagtctcagcagttggtaagaaaactgacccagaggatccaaaaactccaatgtctcaacgcagcaacaaaaaagtagaacttgaaaacacacaactcagggccagaaggaagaaagagaagcaaaccaaagcacagaacgatggttccccatcacttcaaagggctcgttccagaatcaacttcaaggtttctcctcctaaggttagagaatttgataaagaaaggaacaggtatatggcaaatagggtgtctccaagaaataggccatggactagaaaaacagtactattccccaaccctttgttcctctccactcattcctcttcacagcaacagttttgcaagacaaggtcacctatcataacaagaaatagaggaacaacatcacacaagtttttgatcaagtctccatcttcgccatcagggccacaacagtttagcaagaccaggtctcctgtcataacaagaaataggggtggaacaccacacaagtttttgatcaagtctccatcttcagcttccaaatttcaagtccagatcaaaaaaagtccaccaactgtgtctatttcaccaacaaaacctgcaaggttgagcagaagtcctcccaagagatccacttccactgcatccaaattccgtcgatctttctctccttcaagaatagcatccagattagtatcactctcaccattaaggaccaggaaaactgtacagaaaaatgatgggtttgtaagtggactcaaacagcgcccgctatcatcagtgcaataccctgcttgaggaatttaataacacattaatagtgctatgctctctggctactttgtcactttgttgtattttttagtcaccatgtccattcttgatgtccataactgtgctgtgctcttgtggtttttcctttttggtggtttcaggttgtgtgaggatttctctttaatgtccatagcattttttttcccattc

SEQ ID NO: 52887 - protein, 382 aa, Glycine max
  peptide (1)..(382): Ceres Seq. ID no. 15176310
  misc_feature (1)..(374): Homolog of NCBI NO: 11228986 NR Description: microtubule-binding protein TANGLED1 [Zea mays]
  misc_feature (1)..(355): Homolog of NCBI NO: 30679470 NR Description: cyclin-related [Arabidopsis thaliana]
  misc_feature (1)..(355): Homolog of NCBI NO: 6729043 NR Description: hypothetical protein [Arabidopsis thaliana]
MVARTPPKQKKLLAALNPVLIKETLNKVDQCVARLQELQYTVTGGTKVVSGVTLSPRSTRGYLRTSLRCKQESLRIKNGASRRSPVGKFPANTGEWKRMSLPAMLVGETVGEILQASQFAREIVSAVGKKTDPEDPKTPMSQRSNKKVELENTQLRARRKKEKQTKAQNDGSPSLQRARSRINFKVSPPKVREFDKERNRYMANRVSPRNRPWTRKTVLFPNPLFLSTHSSSQQQFCKTRSPIITRNRGTTSHKFLIKSPSSPSGPQQFSKTRSPVITRNRGGTPHKFLIKSPSSASKFQVQIKKSPPTVSISPTKPARLSRSPPKRSTSTASKFRRSFSPSRIASRLVSLSPLRTRKTVQKNDGFVSGLKQRPLSSVQYPA

SEQ ID NO: 52888 - protein, 284 aa, Glycine max
  peptide (1)..(284): Ceres Seq. ID no. 15176311
  misc_feature (1)..(276): Homolog of NCBI NO: 11228986 NR Description: microtubule-binding protein TANGLED1 [Zea mays]
  misc_feature (1)..(257): Homolog of NCBI NO: 30679470 NR Description: cyclin-related [Arabidopsis thaliana]
  misc_feature (1)..(257): Homolog of NCBI NO: 6729043 NR Description: hypothetical protein [Arabidopsis thaliana]
MSLPAMLVGETVGEILQASQFAREIVSAVGKKTDPEDPKTPMSQRSNKKVELENTQLRARRKKEKQTKAQNDGSPSLQRARSRINFKVSPPKVREFDKERNRYMANRVSPRNRPWTRKTVLFPNPLFLSTHSSSQQQFCKTRSPIITRNRGTTSHKFLIKSPSSPSGPQQFSKTRSPVITRNRGGTPHKFLIKSPSSASKFQVQIKKSPPTVSISPTKPARLSRSPPKRSTSTASKFRRSFSPSRIASRLVSLSPLRTRKTVQKNDGFVSGLKQRPLSSVQYPA

SEQ ID NO: 52889 - protein, 279 aa, Glycine max
  peptide (1)..(279): Ceres Seq. ID no. 15176312
  misc_feature (1)..(271): Homolog of NCBI NO: 11228986 NR Description: microtubule-binding protein TANGLED1 [Zea mays]
  misc_feature (1)..(252): Homolog of NCBI NO: 30679470 NR Description: cyclin-related [Arabidopsis thaliana]
  misc_feature (1)..(252): Homolog of NCBI NO: 6729043 NR Description: hypothetical protein [Arabidopsis thaliana]
MLVGETVGEILQASQFAREIVSAVGKKTDPEDPKTPMSQRSNKKVELENTQLRARRKKEKQTKAQNDGSPSLQRARSRINFKVSPPKVREFDKERNRYMANRVSPRNRPWTRKTVLFPNPLFLSTHSSSQQQFCKTRSPIITRNRGTTSHKFLIKSPSSPSGPQQFSKTRSPVITRNRGGTPHKFLIKSPSSASKFQVQIKKSPPTVSISPTKPARLSRSPPKRSTSTASKFRRSFSPSRIASRLVSLSPLRTRKTVQKNDGFVSGLKQRPLSSVQYPA

SEQ ID NO: 52890 - DNA, 563 bp, Glycine max
  misc_feature (1)..(563): Ceres Seq. ID no. 12595786
gctctggcaaaagtagtgacacccgaatgttatgagggagatgtcatagcaaacccattaggttttgctgctcaaaacataagggaagcagcatcaaatggttacggatgagtctataaggtcacaactacatgctagtttaggccaagggcaactgaatcacataagggcttttttcacgggacatgcacacagtattaatattccttttgatgtgaatcatagcattttcctcacaagctggatgaacatgccagtgtatgaatcagattttggttgggaaaagcctttgcattttggtatagtaagtcgggctcaagtaaatagggcaaccatttttccaagccctgatggggatggtgttgttatccctatatttttccagacagcccttatggagctttttttaaagtttttttttgaggatatggataatatggagatatgaaatatcctgtgtttgggatatgcttttgaacatttcaaattctgtttggtgtttttagagtgggaatggtaatanttattttaagaataaggacatgactttggtgatctgttgt

SEQ ID NO: 52891 - protein, 116 aa, Glycine max
  peptide (1)..(116): Ceres Seq. ID no. 12595787
  misc_feature (4)..(109): Pfam Name: Transferase family Pfam Description: Transferase family
  misc_feature (4)..(109): Homolog of NCBI NO: 21536883 NR Description: anthranilate N-benzoyltransferase [Arabidopsis
  misc_feature (4)..(109): Homolog of NCBI NO: 15239747 NR Description: anthranilate N-benzoyltransferase
MVTDESIRSQLHASLGQGQLNHIRAFFTGHAHSINIPFDVNHSIFLTSWMNMPVYESDFGWEKPLHFGIVSRAQVNRATIFPSPDGDGVVIPIFFQTALMELFLKFFFEDMDNMEI

SEQ ID NO: 52892 - protein, 67 aa, Glycine max
  peptide (1)..(67): Ceres Seq. ID no. 12595788
  misc_feature (1)..(60): Pfam Name: Transferase family Pfam Description: Transferase family
  misc_feature (1)..(60): Homolog of NCBI NO: 21536883 NR Description: anthranilate N-benzoyltransferase [Arabidopsis
  misc_feature (1)..(60): Homolog of NCBI NO: 15239747 NR Description: anthranilate N-benzoyltransferase
MNMPVYESDFGWEKPLHFGIVSRAQVNRATIFPSPDGDGVVIPIFFQTALMELFLKFFFEDMDNMEI

SEQ ID NO: 52893 - protein, 65 aa, Glycine max
  peptide (1)..(65): Ceres Seq. ID no. 12595789
  misc_feature (1)..(58): Pfam Name: Transferase family Pfam Description: Transferase family
  misc_feature (1)..(58): Homolog of NCBI NO: 21536883 NR Description: anthranilate N-benzoyltransferase [Arabidopsis
  misc_feature (1)..(58): Homolog of NCBI NO: 15239747 NR Description: anthranilate N-benzoyltransferase
MPVYESDFGWEKPLHFGIVSRAQVNRATIFPSPDGDGVVIPIFFQTALMELFLKFFFEDMDNMEI

SEQ ID NO: 52894 - DNA, 1549 bp, Glycine max
  misc_feature (1)..(1549): Ceres Seq. ID no. 15176963
tttcaccaaacaatttaaccttttgggattgttggtgatacaactattttttcaaacacatccctccattggtagtttggtacttctattttcacttcaatgtagcttgcagttgcagtgtttaatattccaactatttgcaattaccatttcctttcctacatttagtatccttaggatttagtccatgtatgctatacctttccaaccaacattagtggtgtgttgaaaatcagaatataatctgtatttattgtaataatagcggtttataggcatgtgatatctgatttagaggaaacaaaatatcctctatttatgtatgagtaatgtaacaagcctatatgaactcgcatttgttgtgtattcaaacacacggtattcaacctagtcatgtctttgttttctctctcttaacatggtattcagagcctgacagaggcattcctcgaaaatcagaaccgtgactacccagtggacccactgtccccggagacaaattttttttgcccaccgtgttcttccctggtctataataatacatgttcatctctgaaatgtttcaattttgtatttcatgacaggaaaatcaaccattcttagattgctattcagattctttgatcctcattctggaagtataaagatagatgatcaaaatattcgggaggtaacccttgagagtttgcggaagtccattggtgttgttccacaagatactgtacttttcaatgatacaatatttcataacattcactatggtcggctatcagcaacaaaagaggaggtctatgaagctgctcaacaagcagcaattcataacactatcatgaattttcctgataaatattcaactgttgtgggagagcgaggactaaagttaagtggtggtgagaagcaacgtgttgccctagctcgtgcgttcttaaaagcacctgcaatactgttgtgtgatgaagctacaagtgctcttgacagcacaacagaagcagagattttaagtgcattaaagtcagtagcaaataatcggacttccatattcattgctcacaggcttaccacagcaatgcagtgtgacgagatcattgttttggaaaatgggaaggtgattgagcaaggaccccatgaagtgctcttatcaaaagcaggaagatatgcacagctgtggggacagcaaaataacactgttgatgcaattgatacagccatcaagctagaagcataaaatgatagaaacctttctcccttcctcttgctgagaaaaaaaaatgcataatacaatgttaatagcccattattacaattttgaaatttaatgattcctagcctgttgtgagctttctttagtctgtatattattacaatcgtattgttagctagaccaattaatgcatagatcctttgccgggttatgcagtttgatacattctttgtaaccacatataagttctcggccatgatgaatgaggcttgatgagctttctgcaaagagcaagagtttgtattattggaattcaattatagattgtgtgggtatgtattgttgcac

SEQ ID NO: 52895 - protein, 215 aa, Glycine max
  peptide (1)..(215): Ceres Seq. ID no. 15176964
  misc_feature (2)..(175): Pfam Name: ABC transporter Pfam Description: ABC transporter
  misc_feature (3)..(200): Homolog of NCBI NO: 19075871 NR Description: heavy metal tolerance protein precursor
  misc_feature (3)..(200): Homolog of NCBI NO: 6166206 NR Description: Heavy metal tolerance protein precursor
  misc_feature (3)..(200): Homolog of NCBI NO: 283074 NR Description: vacuolar membrane protein HMT1 - fission yeast
  misc_feature (3)..(206): Homolog of NCBI NO: 21357907 NR Description: CG4225-PA [Drosophila melanogaster]
  misc_feature (2)..(205): Homolog of NCBI NO: 18417233 NR Description: ABC transporter family protein [Arabidopsis
  misc_feature (2)..(205): Homolog of NCBI NO: 7445997 NR Description: probable ABC-type transport protein T5F17.80 -
  misc_feature (2)..(205): Homolog of NCBI NO: 15235382 NR Description: ABC transporter family protein [Arabidopsis
  misc_feature (2)..(214): Homolog of NCBI NO: 34898046 NR Description: ESTs AU067992(C11433),AU077424(C11433) correspond a region of the predicted gene.~Similar to ABC transporter-7
  misc_feature (2)..(214): Homolog of NCBI NO: 15237155 NR Description: ABC transporter family protein [Arabidopsis
  misc_feature (2)..(214): Homolog of NCBI NO: 9187883 NR Description: mitochondrial half-ABC transporter [Arabidopsis
MTGKSTILRLLFRFFDPHSGSIKIDDQNIREVTLESLRKSIGVVPQDTVLFNDTIFHNIHYGRLSATKEEVYEAAQQAAIHNTIMNFPDKYSTVVGERGLKLSGGEKQRVALARAFLKAPAILLCDEATSALDSTTEAEILSALKSVANNRTSIFIAHRLTTAMQCDEIIVLENGKVIEQGPHEVLLSKAGRYAQLWGQQNNTVDAIDTAIKLEA

SEQ ID NO: 52896 - protein, 131 aa, Glycine max
  peptide (1)..(131): Ceres Seq. ID no. 15176965
  misc_feature (1)..(91): Pfam Name: ABC transporter Pfam Description: ABC transporter
  misc_feature (1)..(116): Homolog of NCBI NO: 19075871 NR Description: heavy metal tolerance protein precursor
  misc_feature (1)..(116): Homolog of NCBI NO: 6166206 NR Description: Heavy metal tolerance protein precursor
  misc_feature (1)..(116): Homolog of NCBI NO: 283074 NR Description: vacuolar membrane protein HMT1 - fission yeast
  misc_feature (1)..(122): Homolog of NCBI NO: 21357907 NR Description: CG4225-PA [Drosophila melanogaster]
  misc_feature (1)..(121): Homolog of NCBI NO: 18417233 NR Description: ABC transporter family protein [Arabidopsis
  misc_feature (1)..(121): Homolog of NCBI NO: 7445997 NR Description: probable ABC-type transport protein T5F17.80 -
  misc_feature (1)..(121): Homolog of NCBI NO: 15235382 NR Description: ABC transporter family protein [Arabidopsis
  misc_feature (1)..(130): Homolog of NCBI NO: 34898046 NR Description: ESTs AU067992(C11433),AU077424(C11433) correspond a region of the predicted gene.~Similar to ABC transporter-7
  misc_feature (1)..(130): Homolog of NCBI NO: 15237155 NR Description: ABC transporter family protein [Arabidopsis
  misc_feature (1)..(130): Homolog of NCBI NO: 9187883 NR Description: mitochondrial half-ABC transporter [Arabidopsis
MNFPDKYSTVVGERGLKLSGGEKQRVALARAFLKAPAILLCDEATSALDSTTEAEILSALKSVANNRTSIFIAHRLTTAMQCDEIIVLENGKVIEQGPHEVLLSKAGRYAQLWGQQNNTVDAIDTAIKLEA

SEQ ID NO: 52897 - DNA, 1683 bp, Glycine max
  misc_feature (1)..(1683): Ceres Seq. ID no. 14311103
gaacaatccatccttgaacgtgcctttagatctgcaaacttcagcttagagcaaaacaataaataaaaaatccaccttttctatcaacctctagctatatccatttttatccaaatgacagaaaaactttccaacaatccatccttgaacgtgcctttactatccgagtggaatcaccatgatgaggagaaagccatagcctctcatccttctaccaaaaatactgtgtccttctttcgcacatgccttaatggactcaatgcaatatcaggtgttggaatactgtcagttccatatgctcttgcatctggagggtggttaagcttggttcttctatttgctattgccgctgcagcattttacacaggcacgttgattaaaagatgtatggacaagaattcgaacattaaaacctacccagatataggtgagcttgcatttggaaagataggaaggctaataatatcagtgtccatgtacacggagctctacttggtttcaatagggttcttgattctggaaggcgataacttgaataacttgtgccccattgaagaggttcagatagctggcttcgtaattggtgggaagcaactgtttgtgatattggttgcccttatcatcttgcccacagtttggttggacaacttgagtatgctttcttatgtatctgcaagtggagtgtttgcttctgctgtaatcatcctatcaatatcatggactggaacatttgatggagttggttttcatcaaaagggaactcttgttaattggcgcggaatccccacagctgttagcttgtatgccttttgctattgtgcacatcccgtcttccccaccttgtacaattccatgactaacaaacatcagttctctaatgtcctattagtatgctttctgttaaccactgtgggttatgcatccatggctataattggttatctaatgtttggtgctgacgttgaatcacaagtaacattaaacctgccactgaacaaagtaagctcaaaattagcaatatatacaaccttggtcaatcccatatccaagttcgctttgatggcaacaccaattaccaatgcgttgaaagatttacttccaagggcgtacaagaatagagcgaccaacatcttagtcagcactgtcttggtaataagcgctaccattgttgccctcagtgttcctttctttggggatctcatgtctctggttggagcgtttttaagtgtcacagcttctattctgcttccatgcttgtgttacttgaagatttcaggcacttacaatgaatttgggtgtgagaccatagccatagtgacaataatagtagcagctatagcaatgggaatatctggaacatatacctctgtcatggaaatagtacatcatttgtaatagacaatgcagtggtccattctattgactgtaaatttcctcaaaaaaggatttttttttttctttcactcatgtgactgtatgtcttacgaggaaaaggagaggtaaatactgatgaagaagtaagatatggttggtgaaaaagaggaaaaggaaaatatatgatacagatcatatatgctatcctatatctagagagagaaagaaaaagagagaaagaaaaagagagaaaaatataaatattataaaatttatgatgtaataaaaaaatattgatgatgtgtttat

SEQ ID NO: 52898 - protein, 426 aa, Glycine max
  peptide (1)..(426): Ceres Seq. ID no. 14311104
  misc_feature (23)..(426): Homolog of NCBI NO: 30687791 NR Description: amino acid transporter family [Arabidopsis
  misc_feature (39)..(423): Homolog of NCBI NO: 20521331 NR Description: B1103C09.36 [Oryza sativa (japonica
  misc_feature (39)..(423): Homolog of NCBI NO: 34912160 NR Description: P0712E02.23 [Oryza sativa (japonica
  misc_feature (14)..(423): Homolog of NCBI NO: 15290054 NR Description: P0025A05.3 [Oryza sativa (japonica
  misc_feature (42)..(426): Homolog of NCBI NO: 38344961 NR Description: OSJNBa0072F16.6 [Oryza sativa (japonica
  misc_feature (298)..(423): Homolog of NCBI NO: 15228542 NR Description: amino acid transporter family [Arabidopsis
  misc_feature (39)..(271): Homolog of NCBI NO: 15228542 NR Description: amino acid transporter family [Arabidopsis
  misc_feature (24)..(424): Homolog of NCBI NO: 38344962 NR Description: OSJNBa0072F16.7 [Oryza sativa (japonica
  misc_feature (23)..(422): Homolog of NCBI NO: 15242252 NR Description: amino acid transporter family [Arabidopsis
  misc_feature (39)..(426): Homolog of NCBI NO: 7939546 NR Description: gb|AAC79623.2~gene_id:K5K13.9~similar to unknown
MTEKLSNNPSLNVPLLSEWNHHDEEKAIASHPSTKNTVSFFRTCLNGLNAISGVGILSVPYALASGGWLSLVLLFAIAAAAFYTGTLIKRCMDKNSNIKTYPDIGELAFGKIGRLIISVSMYTELYLVSIGFLILEGDNLNNLCPIEEVQIAGFVIGGKQLFVILVALIILPTVWLDNLSMLSYVSASGVFASAVIILSISWTGTFDGVGFHQKGTLVNWRGIPTAVSLYAFCYCAHPVFPTLYNSMTNKHQFSNVLLVCFLLTTVGYASMAIIGYLMFGADVESQVTLNLPLNKVSSKLAIYTTLVNPISKFALMATPITNALKDLLPRAYKNRATNILVSTVLVISATIVALSVPFFGDLMSLVGAFLSVTASILLPCLCYLKISGTYNEFGCETIAIVTIIVAAIAMGISGTYTSVMEIVHHL

SEQ ID NO: 52899 - protein, 335 aa, Glycine max
  peptide (1)..(335): Ceres Seq. ID no. 14311105
  misc_feature (1)..(335): Homolog of NCBI NO: 30687791 NR Description: amino acid transporter family [Arabidopsis
  misc_feature (1)..(332): Homolog of NCBI NO: 20521331 NR Description: B1103C09.36 [Oryza sativa (japonica
  misc_feature (1)..(332): Homolog of NCBI NO: 34912160 NR Description: P0712E02.23 [Oryza sativa (japonica
  misc_feature (1)..(332): Homolog of NCBI NO: 15290054 NR Description: P0025A05.3 [Oryza sativa (japonica
  misc_feature (1)..(335): Homolog of NCBI NO: 38344961 NR Description: OSJNBa0072F16.6 [Oryza sativa (japonica
  misc_feature (207)..(332): Homolog of NCBI NO: 15228542 NR Description: amino acid transporter family [Arabidopsis
  misc_feature (1)..(180): Homolog of NCBI NO: 15228542 NR Description: amino acid transporter family [Arabidopsis
  misc_feature (1)..(333): Homolog of NCBI NO: 38344962 NR Description: OSJNBa0072F16.7 [Oryza sativa (japonica
  misc_feature (1)..(331): Homolog of NCBI NO: 15242252 NR Description: amino acid transporter family [Arabidopsis
  misc_feature (1)..(335): Homolog of NCBI NO: 7939546 NR Description: gb|AAC79623.2~gene_id:K5K13.9~similar to unknown
MDKNSNIKTYPDIGELAFGKIGRLIISVSMYTELYLVSIGFLILEGDNLNNLCPIEEVQIAGFVIGGKQLFVILVALIILPTVWLDNLSMLSYVSASGVFASAVIILSISWTGTFDGVGFHQKGTLVNWRGIPTAVSLYAFCYCAHPVFPTLYNSMTNKHQFSNVLLVCFLLTTVGYASMAIIGYLMFGADVESQVTLNLPLNKVSSKLAIYTTLVNPISKFALMATPITNALKDLLPRAYKNRATNILVSTVLVISATIVALSVPFFGDLMSLVGAFLSVTASILLPCLCYLKISGTYNEFGCETIAIVTIIVAAIAMGISGTYTSVMEIVHHL

SEQ ID NO: 52900 - protein, 306 aa, Glycine max
  peptide (1)..(306): Ceres Seq. ID no. 14311106
  misc_feature (1)..(306): Homolog of NCBI NO: 30687791 NR Description: amino acid transporter family [Arabidopsis
  misc_feature (1)..(303): Homolog of NCBI NO: 20521331 NR Description: B1103C09.36 [Oryza sativa (japonica
  misc_feature (1)..(303): Homolog of NCBI NO: 34912160 NR Description: P0712E02.23 [Oryza sativa (japonica
  misc_feature (1)..(303): Homolog of NCBI NO: 15290054 NR Description: P0025A05.3 [Oryza sativa (japonica
  misc_feature (1)..(306): Homolog of NCBI NO: 38344961 NR Description: OSJNBa0072F16.6 [Oryza sativa (japonica
  misc_feature (178)..(303): Homolog of NCBI NO: 15228542 NR Description: amino acid transporter family [Arabidopsis
  misc_feature (1)..(151): Homolog of NCBI NO: 15228542 NR Description: amino acid transporter family [Arabidopsis
  misc_feature (1)..(304): Homolog of NCBI NO: 38344962 NR Description: OSJNBa0072F16.7 [Oryza sativa (japonica
  misc_feature (1)..(302): Homolog of NCBI NO: 15242252 NR Description: amino acid transporter family [Arabidopsis
  misc_feature (1)..(306): Homolog of NCBI NO: 7939546 NR Description: gb|AAC79623.2~gene_id:K5K13.9~similar to unknown
MYTELYLVSIGFLILEGDNLNNLCPIEEVQIAGFVIGGKQLFVILVALIILPTVWLDNLSMLSYVSASGVFASAVIILSISWTGTFDGVGFHQKGTLVNWRGIPTAVSLYAFCYCAHPVFPTLYNSMTNKHQFSNVLLVCFLLTTVGYASMAIIGYLMFGADVESQVTLNLPLNKVSSKLAIYTTLVNPISKFALMATPITNALKDLLPRAYKNRATNILVSTVLVISATIVALSVPFFGDLMSLVGAFLSVTASILLPCLCYLKISGTYNEFGCETIAIVTIIVAAIAMGISGTYTSVMEIVHHL

SEQ ID NO: 52901 - DNA, 1560 bp, Glycine max
  misc_feature (1)..(1560): Ceres Seq. ID no. 14310736
atatttcaacctcctcagatttctttcttagcaaaccaattttcaaccacatgggtatccctcactttctcgttataccatatccagttctgggtcatgtgaatccccttatgcaattgtctgaggctctaaccaagcatggctgcaaaatcacatttctgaacacagagttcagccacaaaagagcaaacaacgctggtgctggactagacaaccttaaggaatcaggaatcaagtttgtgacactcccagatggcttggaacctgaagatgatagaagtgaccatgagaaagttattttgtctatccaaagcaacatgccttctttgcttccaaagctcatagaagatatcaatgctttggatgctgagaatagcataacttgcatagttgctactatgaatatgggttgggccttggaaattggacacaaacttggaattgaaggagctcttctttggactgcatctgcaacttccttggctgcatgctattgcattccaaggctgattgatgatggaattatagactcagaaggagtagcaaccaagaaacaagaattccagctttccctaaatatgcctatgatggaccctgcagaccttccatggggtggcctacgtaaggttttcttccctcaaatagttaaagagatgaaaatcttggagttaggagaatggtggctttgcaacaccacttgtgatcttgagcctggagcacttgccatatctccaaggttcctcccaattggcccattgatggaaagtgacaccaacaaaaattcattctgggaagaggacataacttgcctagattggttggatcagcagccacctcaatctgttgtgtatgtttcttttggtagtttagcaatagttgaacctaaccaattcaaagaactagctctaggacttgatctccttaacatgccttttctttgggttgtacgttccgacaataataacaaggtaaatagtgcataccctgatgaattccatggaagtaaaggtaaaattgtcaattgggtgcctcagaggaagatattgaaccaccctgccatagcttgcttcattagtcactgtggttggaattcaactatagaaggtgtatgcagtggcatacctttcttgtgttggccatttttctctgaccaatttgttaataggtcgtatatttgtgacgtgtggaaggttggattgaaattagacaaggatggaaatggattaatactgaagggagagataaggaagaaggtggaccaattgcttgggaatgaagacatcaaagctagatcgttgaaactgaaggaattgactgtgaataactcagttaatggtgatcaatcttcaaagaatctagaaaagtttattaactgggcaaagtagtactacctcctgctatagtttggattggaagttgtctctctttaatttttctcaatttttatgtctgaaattcgtttactatagctaaacagcagattgcatctccctgttgggtccaaagatactcaaaagaatcttttccaatttcaaaagaatagaagttaagtccaatgac

SEQ ID NO: 52902 - protein, 460 aa, Glycine max
  peptide (1)..(460): Ceres Seq. ID no. 14310737
  misc_feature (67)..(460): Pfam Name: UDP-glucoronosyl and UDP-glucosyl transferase Pfam Description: UDP-glucoronosyl and UDP-glucosyl transferase
  misc_feature (21)..(457): Homolog of NCBI NO: 13236659 NR Description: putative glucosyltransferase [Oryza sativa]
  misc_feature (17)..(457): Homolog of NCBI NO: 21326125 NR Description: putative glucosyl transferase [Sorghum bicolor]
  misc_feature (17)..(457): Homolog of NCBI NO: 21326123 NR Description: putative glucosyl transferase [Sorghum bicolor]
  misc_feature (17)..(460): Homolog of NCBI NO: 15232846 NR Description: glycosyltransferase family [Arabidopsis thaliana]
  misc_feature (20)..(457): Homolog of NCBI NO: 13236653 NR Description: putative glucosyltransferase [Oryza sativa]
  misc_feature (20)..(457): Homolog of NCBI NO: 13236650 NR Description: putative glucosyltransferase [Oryza sativa]
  misc_feature (20)..(457): Homolog of NCBI NO: 21326128 NR Description: putative glucosyl transferase [Sorghum bicolor]
  misc_feature (17)..(460): Homolog of NCBI NO: 21326124 NR Description: putative glucosyl transferase [Sorghum bicolor]
  misc_feature (20)..(457): Homolog of NCBI NO: 21326127 NR Description: putative glucosyl transferase [Sorghum bicolor]
  misc_feature (67)..(460): Homolog of NCBI NO: 10953887 NR Description: UDP-glucosyltransferase HRA25 [Phaseolus vulgaris]
ISTSSDFFLSKPIFNHMGIPHFLVIPYPVLGHVNPLMQLSEALTKHGCKITFLNTEFSHKRANNAGAGLDNLKESGIKFVTLPDGLEPEDDRSDHEKVILSIQSNMPSLLPKLIEDINALDAENSITCIVATMNMGWALEIGHKLGIEGALLWTASATSLAACYCIPRLIDDGIIDSEGVATKKQEFQLSLNMPMMDPADLPWGGLRKVFFPQIVKEMKILELGEWWLCNTTCDLEPGALAISPRFLPIGPLMESDTNKNSFWEEDITCLDWLDQQPPQSVVYVSFGSLAIVEPNQFKELALGLDLLNMPFLWVVRSDNNNKVNSAYPDEFHGSKGKIVNWVPQRKILNHPAIACFISHCGWNSTIEGVCSGIPFLCWPFFSDQFVNRSYICDVWKVGLKLDKDGNGLILKGEIRKKVDQLLGNEDIKARSLKLKELTVNNSVNGDQSSKNLEKFINWAK

SEQ ID NO: 52903 - protein, 444 aa, Glycine max
  peptide (1)..(444): Ceres Seq. ID no. 14310738
  misc_feature (51)..(444): Pfam Name: UDP-glucoronosyl and UDP-glucosyl transferase Pfam Description: UDP-glucoronosyl and UDP-glucosyl transferase
  misc_feature (5)..(441): Homolog of NCBI NO: 13236659 NR Description: putative glucosyltransferase [Oryza sativa]
  misc_feature (1)..(441): Homolog of NCBI NO: 21326125 NR Description: putative glucosyl transferase [Sorghum bicolor]
  misc_feature (1)..(441): Homolog of NCBI NO: 21326123 NR Description: putative glucosyl transferase [Sorghum bicolor]
  misc_feature (1)..(444): Homolog of NCBI NO: 15232846 NR Description: glycosyltransferase family [Arabidopsis thaliana]
  misc_feature (4)..(441): Homolog of NCBI NO: 13236653 NR Description: putative glucosyltransferase [Oryza sativa]
  misc_feature (4)..(441): Homolog of NCBI NO: 13236650 NR Description: putative glucosyltransferase [Oryza sativa]
  misc_feature (4)..(441): Homolog of NCBI NO: 21326128 NR Description: putative glucosyl transferase [Sorghum bicolor]
  misc_feature (1)..(444): Homolog of NCBI NO: 21326124 NR Description: putative glucosyl transferase [Sorghum bicolor]
  misc_feature (4)..(441): Homolog of NCBI NO: 21326127 NR Description: putative glucosyl transferase [Sorghum bicolor]
  misc_feature (51)..(444): Homolog of NCBI NO: 10953887 NR Description: UDP-glucosyltransferase HRA25 [Phaseolus vulgaris]
MGIPHFLVIPYPVLGHVNPLMQLSEALTKHGCKITFLNTEFSHKRANNAGAGLDNLKESGIKFVTLPDGLEPEDDRSDHEKVILSIQSNMPSLLPKLIEDINALDAENSITCIVATMNMGWALEIGHKLGIEGALLWTASATSLAACYCIPRLIDDGIIDSEGVATKKQEFQLSLNMPMMDPADLPWGGLRKVFFPQIVKEMKILELGEWWLCNTTCDLEPGALAISPRFLPIGPLMESDTNKNSFWEEDITCLDWLDQQPPQSVVYVSFGSLAIVEPNQFKELALGLDLLNMPFLWVVRSDNNNKVNSAYPDEFHGSKGKIVNWVPQRKILNHPAIACFISHCGWNSTIEGVCSGIPFLCWPFFSDQFVNRSYICDVWKVGLKLDKDGNGLILKGEIRKKVDQLLGNEDIKARSLKLKELTVNNSVNGDQSSKNLEKFINWAK

SEQ ID NO: 52904 - protein, 424 aa, Glycine max
  peptide (1)..(424): Ceres Seq. ID no. 14310739
  misc_feature (31)..(424): Pfam Name: UDP-glucoronosyl and UDP-glucosyl transferase Pfam Description: UDP-glucoronosyl and UDP-glucosyl transferase
  misc_feature (1)..(421): Homolog of NCBI NO: 13236659 NR Description: putative glucosyltransferase [Oryza sativa]
  misc_feature (1)..(421): Homolog of NCBI NO: 21326125 NR Description: putative glucosyl transferase [Sorghum bicolor]
  misc_feature (1)..(421): Homolog of NCBI NO: 21326123 NR Description: putative glucosyl transferase [Sorghum bicolor]
  misc_feature (1)..(424): Homolog of NCBI NO: 15232846 NR Description: glycosyltransferase family [Arabidopsis thaliana]
  misc_feature (1)..(421): Homolog of NCBI NO: 13236653 NR Description: putative glucosyltransferase [Oryza sativa]
  misc_feature (1)..(421): Homolog of NCBI NO: 13236650 NR Description: putative glucosyltransferase [Oryza sativa]
  misc_feature (1)..(421): Homolog of NCBI NO: 21326128 NR Description: putative glucosyl transferase [Sorghum bicolor]
  misc_feature (1)..(424): Homolog of NCBI NO: 21326124 NR Description: putative glucosyl transferase [Sorghum bicolor]
  misc_feature (1)..(421): Homolog of NCBI NO: 21326127 NR Description: putative glucosyl transferase [Sorghum bicolor]
  misc_feature (31)..(424): Homolog of NCBI NO: 10953887 NR Description: UDP-glucosyltransferase HRA25 [Phaseolus vulgaris]
MQLSEALTKHGCKITFLNTEFSHKRANNAGAGLDNLKESGIKFVTLPDGLEPEDDRSDHEKVILSIQSNMPSLLPKLIEDINALDAENSITCIVATMNMGWALEIGHKLGIEGALLWTASATSLAACYCIPRLIDDGIIDSEGVATKKQEFQLSLNMPMMDPADLPWGGLRKVFFPQIVKEMKILELGEWWLCNTTCDLEPGALAISPRFLPIGPLMESDTNKNSFWEEDITCLDWLDQQPPQSVVYVSFGSLAIVEPNQFKELALGLDLLNMPFLWVVRSDNNNKVNSAYPDEFHGSKGKIVNWVPQRKILNHPAIACFISHCGWNSTIEGVCSGIPFLCWPFFSDQFVNRSYICDVWKVGLKLDKDGNGLILKGEIRKKVDQLLGNEDIKARSLKLKELTVNNSVNGDQSSKNLEKFINWAK

SEQ ID NO: 52905 - DNA, 1259 bp, Glycine max
  misc_feature (1)..(1259): Ceres Seq. ID no. 15174740
gacgtacctcattattcttaaacctccttttctattctattcaattcaataccagtggtggtgactcacttgttgttggagcaaagctgctcgtgatcaattttcgtgttccttcttcgttcccaccgaatgaggattaattatcaattatatatcatatattaggtttgtttgacttgttttcgtttatgtgaaaaacgatttctctattgtatacaacttcggatgcgcatatcgagctttttcggttatcaatgacgttattgcagaatctgagatgttgctttgatcgctactgtggacatactttcacgaacaaccgaagatgctcgctgttgtttaactagaatattctattttgtagcaaatatgttctacgcgttggattggcggagcatggttaacgttttggaccttgaagattttgttgctccggaagatatgaggagcaattgcgacatgttcatttgttggtaaaagagaggttgatcttccgccatgtcttcccttcaactgttccaactaactcagcatggccggagttttctggcttcaaggagaaaaactttgctacttgcaactggtatcttagttgctggtggaactgcagcatatgtgcaatcgaggtttagaggtaatagagatgatttattaggtgattcctatgagcgcaataatgataaagaactcacaaaggaggaggtcatgaaaggaacttctgcaccaaagaataaacaaaagaaaggagggttgaagtcacttcaagtccttgctgcaattcttttatctgagatgggccaattaggtgcaaagaaccttttatctttggtttctatagtggtgctgcgaaccactttgagcaacaggctagcaaaagtgcaaggtttcctatttcgcgccgcttttcttcgacgtgtgccattgtttctgcggctaatttcagaaaatattcttttgtgtttcctcttatcaaccatgcagtctacatctaagtacattactgggactttgagtctgcacttccgtaaaatattgactaaacttatccattctcgctattttgaggtagatattgctgatttgtatgtaaaagcttactatatttgattgtctgtattgagcttgttatccatttatgcattcctactgtcatatgaagtgtctgtatatttacttgtgaactaaaatctttccgagttatttttacctgtttataaggcttgtctgttttcttctttatttgcaatgtatgaaagttc

SEQ ID NO: 52906 - protein, 202 aa, Glycine max
  peptide (1)..(202): Ceres Seq. ID no. 15174741
  misc_feature (1)..(189): Homolog of NCBI NO: 28195114 NR Description: putative ABC transporter [Oryza sativa (indica
  misc_feature (1)..(189): Homolog of NCBI NO: 27368893 NR Description: peroxisomal membrane protein ABC transporter
  misc_feature (1)..(189): Homolog of NCBI NO: 14719310 NR Description: hypothetical protein [Oryza sativa]
  misc_feature (1)..(189): Homolog of NCBI NO: 34905890 NR Description: simiar to ATP-binding cassette, sub-family D,
  misc_feature (1)..(189): Homolog of NCBI NO: 7487703 NR Description: hypothetical protein T5J17.20 - Arabidopsis
  misc_feature (1)..(189): Homolog of NCBI NO: 18478510 NR Description: peroxisomal ABC transporter [Arabidopsis
  misc_feature (1)..(189): Homolog of NCBI NO: 18420546 NR Description: peroxisomal ABC transporter PXA1 [Arabidopsis
MSSLQLFQLTQHGRSFLASRRKTLLLATGILVAGGTAAYVQSRFRGNRDDLLGDSYERNNDKELTKEEVMKGTSAPKNKQKKGGLKSLQVLAAILLSEMGQLGAKNLLSLVSIVVLRTTLSNRLAKVQGFLFRAAFLRRVPLFLRLISENILLCFLLSTMQSTSKYITGTLSLHFRKILTKLIHSRYFEVDIADLYVKAYYI

SEQ ID NO: 52907 - protein, 133 aa, Glycine max
  peptide (1)..(133): Ceres Seq. ID no. 15174742
  misc_feature (1)..(120): Homolog of NCBI NO: 28195114 NR Description: putative ABC transporter [Oryza sativa (indica
  misc_feature (1)..(120): Homolog of NCBI NO: 27368893 NR Description: peroxisomal membrane protein ABC transporter
  misc_feature (1)..(120): Homolog of NCBI NO: 14719310 NR Description: hypothetical protein [Oryza sativa]
  misc_feature (1)..(120): Homolog of NCBI NO: 34905890 NR Description: simiar to ATP-binding cassette, sub-family D,
  misc_feature (1)..(120): Homolog of NCBI NO: 7487703 NR Description: hypothetical protein T5J17.20 - Arabidopsis
  misc_feature (1)..(120): Homolog of NCBI NO: 18478510 NR Description: peroxisomal ABC transporter [Arabidopsis
  misc_feature (1)..(120): Homolog of NCBI NO: 18420546 NR Description: peroxisomal ABC transporter PXA1 [Arabidopsis
MKGTSAPKNKQKKGGLKSLQVLAAILLSEMGQLGAKNLLSLVSIVVLRTTLSNRLAKVQGFLFRAAFLRRVPLFLRLISENILLCFLLSTMQSTSKYITGTLSLHFRKILTKLIHSRYFEVDIADLYVKAYYI

SEQ ID NO: 52908 - protein, 104 aa, Glycine max
  peptide (1)..(104): Ceres Seq. ID no. 15174743
  misc_feature (1)..(91): Homolog of NCBI NO: 28195114 NR Description: putative ABC transporter [Oryza sativa (indica
  misc_feature (1)..(91): Homolog of NCBI NO: 27368893 NR Description: peroxisomal membrane protein ABC transporter
  misc_feature (1)..(91): Homolog of NCBI NO: 14719310 NR Description: hypothetical protein [Oryza sativa]
  misc_feature (1)..(91): Homolog of NCBI NO: 34905890 NR Description: simiar to ATP-binding cassette, sub-family D,
  misc_feature (1)..(91): Homolog of NCBI NO: 7487703 NR Description: hypothetical protein T5J17.20 - Arabidopsis
  misc_feature (1)..(91): Homolog of NCBI NO: 18478510 NR Description: peroxisomal ABC transporter [Arabidopsis
  misc_feature (1)..(91): Homolog of NCBI NO: 18420546 NR Description: peroxisomal ABC transporter PXA1 [Arabidopsis
MGQLGAKNLLSLVSIVVLRTTLSNRLAKVQGFLFRAAFLRRVPLFLRLISENILLCFLLSTMQSTSKYITGTLSLHFRKILTKLIHSRYFEVDIADLYVKAYYI

SEQ ID NO: 52909 - DNA, 1326 bp, Glycine max
  misc_feature (1)..(1326): Ceres Seq. ID no. 14304623
gagggacaacacaacagagaagaaaggggccaaaaccaaaagacaaatcagaaactgaaaaggaactgcacataagcattcacaaaagcaccaaccaacgtaacgcctcaacctcaatctcttcaaactcgcgcgttcttcccccttcgcctcgcagtatatgtattgcaatcctcccaatttggttgagactccacatacgcgacaaggactgccttgtttccgtctctgcactctattctggaactttgtttgaaattaaacgatttacattaactttggtcattgatgtggcccatttgcttgctattcaacaagattctcaaggcaggggatgaaggagaattaaaaggggataatttgaatgcgatagatccgtacctgtttcagcaaccatcaattaacatagattcccatcctccctccttgcgctgttcacacttcattgaagtaccacacataaaccaaatatatacatgggattgtggccttgcttgtgtcttgatggttttgaaaactattggcgtcaacaactgtgatattcaaacactggctgaactatgctgcacaactagcatttggactgttgatttggcatatttattacagagatttgctgttgctttttcctacttcacagttacatttggggcaaacccaaactatagcattgaatcattctacaaggaggaactgcctaatgatctagtgagagtggatttgctatttcaaaaagcagtggaggctggcattgatatacagtgcaggtcaattagtgaagaagagatttctattctcatattgtctgggaaatatattgcaattgtattagttgatcacaacaaattgagtcatgttttgcaagaagatgttcccatgcctggtcttttcagcaacaaccctggctacacaggtcactatgtgttgatatgtggctatgatgctggagcagatatgtttgagattagagatcctgccagctctaagaaacataagaggatttcttcaaagtctttagaagaagctcgcaacacctttggaactgatgaggatcttctgttgatatctttggagaaaagcagtaaccatcatcaaccttttctgcaactttccaatgatgtcaataccgattcttgattttctttacctgttttgaaataattatgttgctgcttttttttttctgcatccttgtgtattttagttgctacactaggcctattatttatttatattcccagtataaacctcttaaaatggttttgtctgggctgtatgtaccgtgtaggtttactcaaaactgtatagtaaatataaattcatttc

SEQ ID NO: 52910 - protein, 282 aa, Glycine max
  peptide (1)..(282): Ceres Seq. ID no. 14304624
  misc_feature (201)..(262): Homolog of NCBI NO: 31565754 NR Description: MGC1842 protein [Homo sapiens]
  misc_feature (45)..(150): Homolog of NCBI NO: 31565754 NR Description: MGC1842 protein [Homo sapiens]
  misc_feature (53)..(262): Homolog of NCBI NO: 33877361 NR Description: Unknown (protein for IMAGE:3956179) [Homo sapiens]
  misc_feature (45)..(262): Homolog of NCBI NO: 16549275 NR Description: unnamed protein product [Homo sapiens]
  misc_feature (53)..(262): Homolog of NCBI NO: 27695043 NR Description: 1110038D17Rik protein [Mus musculus]
  misc_feature (53)..(262): Homolog of NCBI NO: 26329995 NR Description: unnamed protein product [Mus musculus]
  misc_feature (41)..(268): Homolog of NCBI NO: 10177566 NR Description: gene_id:K18J17.8~unknown protein [Arabidopsis
  misc_feature (1)..(268): Homolog of NCBI NO: 21537032 NR Description: unknown [Arabidopsis thaliana]
  misc_feature (1)..(268): Homolog of NCBI NO: 18415044 NR Description: guanylate cyclase -related [Arabidopsis thaliana]
MWPICLLFNKILKAGDEGELKGDNLNAIDPYLFQQPSINIDSHPPSLRCSHFIEVPHINQIYTWDCGLACVLMVLKTIGVNNCDIQTLAELCCTTSIWTVDLAYLLQRFAVAFSYFTVTFGANPNYSIESFYKEELPNDLVRVDLLFQKAVEAGIDIQCRSISEEEISILILSGKYIAIVLVDHNKLSHVLQEDVPMPGLFSNNPGYTGHYVLICGYDAGADMFEIRDPASSKKHKRISSKSLEEARNTFGTDEDLLLISLEKSSNHHQPFLQLSNDVNTDS

SEQ ID NO: 52911 - protein, 210 aa, Glycine max
  peptide (1)..(210): Ceres Seq. ID no. 14304625
  misc_feature (129)..(190): Homolog of NCBI NO: 31565754 NR Description: MGC1842 protein [Homo sapiens]
  misc_feature (1)..(78): Homolog of NCBI NO: 31565754 NR Description: MGC1842 protein [Homo sapiens]
  misc_feature (1)..(190): Homolog of NCBI NO: 33877361 NR Description: Unknown (protein for IMAGE:3956179) [Homo sapiens]
  misc_feature (1)..(190): Homolog of NCBI NO: 16549275 NR Description: unnamed protein product [Homo sapiens]
  misc_feature (1)..(190): Homolog of NCBI NO: 27695043 NR Description: 1110038D17Rik protein [Mus musculus]
  misc_feature (1)..(190): Homolog of NCBI NO: 26329995 NR Description: unnamed protein product [Mus musculus]
  misc_feature (1)..(196): Homolog of NCBI NO: 10177566 NR Description: gene_id:K18J17.8~unknown protein [Arabidopsis
  misc_feature (1)..(196): Homolog of NCBI NO: 21537032 NR Description: unknown [Arabidopsis thaliana]
  misc_feature (1)..(196): Homolog of NCBI NO: 18415044 NR Description: guanylate cyclase -related [Arabidopsis thaliana]
MVLKTIGVNNCDIQTLAELCCTTSIWTVDLAYLLQRFAVAFSYFTVTFGANPNYSIESFYKEELPNDLVRVDLLFQKAVEAGIDIQCRSISEEEISILILSGKYIAIVLVDHNKLSHVLQEDVPMPGLFSNNPGYTGHYVLICGYDAGADMFEIRDPASSKKHKRISSKSLEEARNTFGTDEDLLLISLEKSSNHHQPFLQLSNDVNTDS

SEQ ID NO: 52912 - DNA, 1526 bp, Glycine max
  misc_feature (1)..(1526): Ceres Seq. ID no. 15174737
agtatgcctatgtaagaaggcatgctatgctattgctatggagaagaaaacaagtgtccaagagtcacgtaaattcaaccaattatttttccccaagcaacacaacaaagtgtacccaattaggctacagagaagctcttcaacttcatccttgtcttcattatcatcatcattgtcacaaaagtcagatgactcttctctaacagattccttgaatctagcagatgagagttttcaatttgcactgaatttgatttcgccgcgttgtcaaagaagagaaccagaaattattaatgatgcacaccaacaacaaattccacagactgctgaggctggtgaattgaaaaggtgcaactggatcactaagaactgtgatgaggcttacattcaatttcacgatgagtgctggggagtcccagcttacgatgacaaaaaattgtttgagctgcttacactatcaggattgctgatagattacaactggaccgaaattctaaaaagaaaggaaattcttagaaaagtttttgctggatttgatcctaatactgtggccaaaatggaggagaaagaaatcatggaaatagcatcaaacaaagaagttttgttagccgattgcagagttaggtgcatagtagacaatgccaaatgcataatgaagattgtgagggaatgtggatcattcagctgctatatatggggctatgtgaatcacaaaccagtgattaacagatacagatacccaagagatgtccctctaaggactacaaaagcagataccatcagcaaggacttgataaagcgtggctttcaatttttgggtccagtgatagtttattcttttatgcaagctgcaggattggcaattgatcatcttgtggattgttataggcacaatgaatgtgtaaggctcgcagaaaggccttggagacatttgtaacataatcgaggattgctaacaacacacgttttaacatatttcttgcaatacactttctattgttgataaaattttattggaaactacaaaattactagtgagtcattgaataagaaatgagactcacaattttgtgattttcaaaaaaaaaaactaatcaataataaatgatgtattcaaaagagttgttataaactgtgttgttagcctttctctctgtaacattcatcagtttacttgcataattttcgattgttttttgtatcaacagctattcagttttccatacatgcctattctagcaagagagggaggtaaaacaatgctttgtagtccctctatttttttattttttggtttttggggtcatttttccttctcttccttccatcccatgtcataatcatcaagtcaagctttgccgttgtcaataaattgaagagggttgcttgcttgcctttgaatttgagtgatgaacagagtcagccttgaggccttggttgtggaacactacatgtttggtatggtaagtgcatcaaagaccaattgtacactactgaatgaaaatgttcttgtttgcattgtttac

SEQ ID NO: 52913 - protein, 311 aa, Glycine max
  peptide (1)..(311): Ceres Seq. ID no. 15174738
  misc_feature (119)..(299): Pfam Name: Methyladenine glycosylase Pfam Description: Methyladenine glycosylase
  misc_feature (115)..(307): Homolog of NCBI NO: 18399721 NR Description: expressed protein [Arabidopsis thaliana]
  misc_feature (115)..(304): Homolog of NCBI NO: 21592537 NR Description: unknown [Arabidopsis thaliana]
  misc_feature (125)..(306): Homolog of NCBI NO: 25406407 NR Description: hypothetical protein F9E10.6 [imported] -
  misc_feature (115)..(304): Homolog of NCBI NO: 15241554 NR Description: expressed protein [Arabidopsis thaliana]
  misc_feature (16)..(301): Homolog of NCBI NO: 15220860 NR Description: DNA-3-methyladenine glycosidase -related
  misc_feature (44)..(306): Homolog of NCBI NO: 18410766 NR Description: DNA-3-methyladenine glycosylase I -related
  misc_feature (112)..(304): Homolog of NCBI NO: 38345034 NR Description: OSJNBa0029H02.18 [Oryza sativa (japonica
  misc_feature (43)..(305): Homolog of NCBI NO: 15218379 NR Description: expressed protein [Arabidopsis thaliana]
  misc_feature (5)..(306): Homolog of NCBI NO: 15242914 NR Description: expressed protein [Arabidopsis thaliana]
  misc_feature (13)..(311): Homolog of NCBI NO: 25518014 NR Description: F21F23.7 protein - Arabidopsis thaliana
VCLCKKACYAIAMEKKTSVQESRKFNQLFFPKQHNKVYPIRLQRSSSTSSLSSLSSSLSQKSDDSSLTDSLNLADESFQFALNLISPRCQRREPEIINDAHQQQIPQTAEAGELKRCNWITKNCDEAYIQFHDECWGVPAYDDKKLFELLTLSGLLIDYNWTEILKRKEILRKVFAGFDPNTVAKMEEKEIMEIASNKEVLLADCRVRCIVDNAKCIMKIVRECGSFSCYIWGYVNHKPVINRYRYPRDVPLRTTKADTISKDLIKRGFQFLGPVIVYSFMQAAGLAIDHLVDCYRHNECVRLAERPWRHL

SEQ ID NO: 52914 - protein, 299 aa, Glycine max
  peptide (1)..(299): Ceres Seq. ID no. 15174739
  misc_feature (107)..(287): Pfam Name: Methyladenine glycosylase Pfam Description: Methyladenine glycosylase
  misc_feature (103)..(295): Homolog of NCBI NO: 18399721 NR Description: expressed protein [Arabidopsis thaliana]
  misc_feature (103)..(292): Homolog of NCBI NO: 21592537 NR Description: unknown [Arabidopsis thaliana]
  misc_feature (113)..(294): Homolog of NCBI NO: 25406407 NR Description: hypothetical protein F9E10.6 [imported] -
  misc_feature (103)..(292): Homolog of NCBI NO: 15241554 NR Description: expressed protein [Arabidopsis thaliana]
  misc_feature (4)..(289): Homolog of NCBI NO: 15220860 NR Description: DNA-3-methyladenine glycosidase -related
  misc_feature (32)..(294): Homolog of NCBI NO: 18410766 NR Description: DNA-3-methyladenine glycosylase I -related
  misc_feature (100)..(292): Homolog of NCBI NO: 38345034 NR Description: OSJNBa0029H02.18 [Oryza sativa (japonica
  misc_feature (31)..(293): Homolog of NCBI NO: 15218379 NR Description: expressed protein [Arabidopsis thaliana]
  misc_feature (1)..(294): Homolog of NCBI NO: 15242914 NR Description: expressed protein [Arabidopsis thaliana]
  misc_feature (1)..(299): Homolog of NCBI NO: 25518014 NR Description: F21F23.7 protein - Arabidopsis thaliana
MEKKTSVQESRKFNQLFFPKQHNKVYPIRLQRSSSTSSLSSLSSSLSQKSDDSSLTDSLNLADESFQFALNLISPRCQRREPEIINDAHQQQIPQTAEAGELKRCNWITKNCDEAYIQFHDECWGVPAYDDKKLFELLTLSGLLIDYNWTEILKRKEILRKVFAGFDPNTVAKMEEKEIMEIASNKEVLLADCRVRCIVDNAKCIMKIVRECGSFSCYIWGYVNHKPVINRYRYPRDVPLRTTKADTISKDLIKRGFQFLGPVIVYSFMQAAGLAIDHLVDCYRHNECVRLAERPWRHL

SEQ ID NO: 52915 - DNA, 1659 bp, Glycine max
  misc_feature (1)..(1659): Ceres Seq. ID no. 14315590
aaaaagcctctatagtttatatagcaagatgaaacgaaaggatataagcattgataaagtatatgatgcacgtgcattaagagtagttgtgggagacaagaatggaactttacatggtcctgcagttcagtgttgttatagtcttcttgacattgtacacaggctttggactccaatagatggtgaatttgatgactacatcattaatccgaagcctagtggctatcagtccttgcacactgcagtccaaggtcctgacaactcacctttagaagtacaaataaggacacagaggatgcatgagtgtgctgaacaaggacttgctgcacattggctttacaaggaaactggcaatccttttttatccatagacagcatggatgaacctgaaactgaagcatcctcctatttctccaaagatctagaggaaggaaattcttcagatattttattaagtaaatataagtcattgaaggctggacatccagtcctcagagtagaaggaagtcacttacttgctgcaattatcatcagtgtagaaaatgatgaaagagaattgctagttgctgtgagctttgggctagcagcttctgaagcagtagctgacagaagatctttccagattaagcgatgggaagcttatgcacgactgtacaaaaaggtgtctgatgaatggtggtttgaaccggggcatggggattggtttacgtgtctagagaagtacacactgtgtcgagatggtatgtatcataagcaagaccaatttgggcgcctactcccaacatttatccaggttatcaattttactgagcaagaagaatctgaatattgggctgttgtatctgctgtgtttgagggcaggcaagtggattggataacatctcggtcaaaatttgacttggttgcatcaacttctgtagaagctggcatcaataacaaggtgaaccttttgagaacaatgctctcttgggaagagcaattgcgctctgaagtaagtttcatgcaagcaaagcatgatgcaaagctttatgatcttcatggttctcttggggaagtggtaattatatgttggcctcatggtgaaattttgaggttaaaggcgggtagcactgctactgatgctgctcaaagagttggtttggagggaaagctggttttgattaacggacagttagtactgcccaacacaaaactcagagatggcgatgtagttgaagtaagaatttaaatcattctttagaaaaatgtaaataattctttatgggtcgtatgtggttaaagtagatggtatagaaatagtttttattttatttagggacgtggattcttggtagaataacgtactttcaaaaattttaaatgtgctggctttaaacttgattccaagaataagttggataaccacatgtgctatcatattttttattgttgtgttggctgtatgtgtggttattactaatttttggtactatggttattcactgtatttggaattaagcattaaaccactgcactttaaaatcatttgaagctgcaataattttatcaagaatccttggaaagagcggccaagccagggaaaatgctgtgtatctgattattagaaatatttgtatgatacagattaaatttatagcaaaacataggcttaggattccc

SEQ ID NO: 52916 - protein, 408 aa, Glycine max
  peptide (1)..(408): Ceres Seq. ID no. 14315591
  misc_feature (1)..(119): Pfam Name: Region found in RelA / SpoT proteins Pfam Description: Region found in RelA / SpoT proteins
  misc_feature (1)..(116): Homolog of NCBI NO: 23471030 NR Description: hypothetical protein [Pseudomonas syringae pv.
  misc_feature (1)..(116): Homolog of NCBI NO: 28868900 NR Description: GTP pyrophosphokinase
  misc_feature (1)..(117): Homolog of NCBI NO: 34499157 NR Description: GTP diphosphokinase [Chromobacterium violaceum
  misc_feature (1)..(117): Homolog of NCBI NO: 21232367 NR Description: ATP:GTP 3'-pyrophosphotranferase
  misc_feature (1)..(153): Homolog of NCBI NO: 22991317 NR Description: hypothetical protein [Enterococcus faecium]
  misc_feature (1)..(117): Homolog of NCBI NO: 33602751 NR Description: putative GTP pyrophosphokinase [Bordetella
  misc_feature (1)..(117): Homolog of NCBI NO: 33594456 NR Description: putative GTP pyrophosphokinase [Bordetella
  misc_feature (1)..(118): Homolog of NCBI NO: 24374961 NR Description: GTP pyrophosphokinase [Shewanella oneidensis
  misc_feature (1)..(122): Homolog of NCBI NO: 24215784 NR Description: GTP pyrophosphokinase
  misc_feature (1)..(117): Homolog of NCBI NO: 22985317 NR Description: hypothetical protein [Burkholderia fungorum]
KSLYSLYSKMKRKDISIDKVYDARALRVVVGDKNGTLHGPAVQCCYSLLDIVHRLWTPIDGEFDDYIINPKPSGYQSLHTAVQGPDNSPLEVQIRTQRMHECAEQGLAAHWLYKETGNPFLSIDSMDEPETEASSYFSKDLEEGNSSDILLSKYKSLKAGHPVLRVEGSHLLAAIIISVENDERELLVAVSFGLAASEAVADRRSFQIKRWEAYARLYKKVSDEWWFEPGHGDWFTCLEKYTLCRDGMYHKQDQFGRLLPTFIQVINFTEQEESEYWAVVSAVFEGRQVDWITSRSKFDLVASTSVEAGINNKVNLLRTMLSWEEQLRSEVSFMQAKHDAKLYDLHGSLGEVVIICWPHGEILRLKAGSTATDAAQRVGLEGKLVLINGQLVLPNTKLRDGDVVEVRI

SEQ ID NO: 52917 - protein, 399 aa, Glycine max
  peptide (1)..(399): Ceres Seq. ID no. 14315592
  misc_feature (1)..(110): Pfam Name: Region found in RelA / SpoT proteins Pfam Description: Region found in RelA / SpoT proteins
  misc_feature (1)..(107): Homolog of NCBI NO: 23471030 NR Description: hypothetical protein [Pseudomonas syringae pv.
  misc_feature (1)..(107): Homolog of NCBI NO: 28868900 NR Description: GTP pyrophosphokinase
  misc_feature (1)..(108): Homolog of NCBI NO: 34499157 NR Description: GTP diphosphokinase [Chromobacterium violaceum
  misc_feature (1)..(108): Homolog of NCBI NO: 21232367 NR Description: ATP:GTP 3'-pyrophosphotranferase
  misc_feature (1)..(144): Homolog of NCBI NO: 22991317 NR Description: hypothetical protein [Enterococcus faecium]
  misc_feature (1)..(108): Homolog of NCBI NO: 33602751 NR Description: putative GTP pyrophosphokinase [Bordetella
  misc_feature (1)..(108): Homolog of NCBI NO: 33594456 NR Description: putative GTP pyrophosphokinase [Bordetella
  misc_feature (1)..(109): Homolog of NCBI NO: 24374961 NR Description: GTP pyrophosphokinase [Shewanella oneidensis
  misc_feature (1)..(113): Homolog of NCBI NO: 24215784 NR Description: GTP pyrophosphokinase
  misc_feature (1)..(108): Homolog of NCBI NO: 22985317 NR Description: hypothetical protein [Burkholderia fungorum]
MKRKDISIDKVYDARALRVVVGDKNGTLHGPAVQCCYSLLDIVHRLWTPIDGEFDDYIINPKPSGYQSLHTAVQGPDNSPLEVQIRTQRMHECAEQGLAAHWLYKETGNPFLSIDSMDEPETEASSYFSKDLEEGNSSDILLSKYKSLKAGHPVLRVEGSHLLAAIIISVENDERELLVAVSFGLAASEAVADRRSFQIKRWEAYARLYKKVSDEWWFEPGHGDWFTCLEKYTLCRDGMYHKQDQFGRLLPTFIQVINFTEQEESEYWAVVSAVFEGRQVDWITSRSKFDLVASTSVEAGINNKVNLLRTMLSWEEQLRSEVSFMQAKHDAKLYDLHGSLGEVVIICWPHGEILRLKAGSTATDAAQRVGLEGKLVLINGQLVLPNTKLRDGDVVEVRI

SEQ ID NO: 52918 - protein, 310 aa, Glycine max
  peptide (1)..(310): Ceres Seq. ID no. 14315593
  misc_feature (1)..(18): Homolog of NCBI NO: 23471030 NR Description: hypothetical protein [Pseudomonas syringae pv.
  misc_feature (1)..(18): Homolog of NCBI NO: 28868900 NR Description: GTP pyrophosphokinase
  misc_feature (1)..(19): Homolog of NCBI NO: 34499157 NR Description: GTP diphosphokinase [Chromobacterium violaceum
  misc_feature (1)..(19): Homolog of NCBI NO: 21232367 NR Description: ATP:GTP 3'-pyrophosphotranferase
  misc_feature (1)..(55): Homolog of NCBI NO: 22991317 NR Description: hypothetical protein [Enterococcus faecium]
  misc_feature (1)..(19): Homolog of NCBI NO: 33602751 NR Description: putative GTP pyrophosphokinase [Bordetella
  misc_feature (1)..(19): Homolog of NCBI NO: 33594456 NR Description: putative GTP pyrophosphokinase [Bordetella
  misc_feature (1)..(20): Homolog of NCBI NO: 24374961 NR Description: GTP pyrophosphokinase [Shewanella oneidensis
  misc_feature (1)..(24): Homolog of NCBI NO: 24215784 NR Description: GTP pyrophosphokinase
  misc_feature (1)..(19): Homolog of NCBI NO: 22985317 NR Description: hypothetical protein [Burkholderia fungorum]
MHECAEQGLAAHWLYKETGNPFLSIDSMDEPETEASSYFSKDLEEGNSSDILLSKYKSLKAGHPVLRVEGSHLLAAIIISVENDERELLVAVSFGLAASEAVADRRSFQIKRWEAYARLYKKVSDEWWFEPGHGDWFTCLEKYTLCRDGMYHKQDQFGRLLPTFIQVINFTEQEESEYWAVVSAVFEGRQVDWITSRSKFDLVASTSVEAGINNKVNLLRTMLSWEEQLRSEVSFMQAKHDAKLYDLHGSLGEVVIICWPHGEILRLKAGSTATDAAQRVGLEGKLVLINGQLVLPNTKLRDGDVVEVRI

SEQ ID NO: 52919 - DNA, 1554 bp, Glycine max
  misc_feature (1)..(1554): Ceres Seq. ID no. 15174705
aatatcacgtcaagaagcaaagcatcccctggaagcaaaactagagttactaagagcaaatctgagaaggaagaggaaaatagaaagaaaaaggaggaattgatgattcagcggcagaaaagaattgctgaaagaagtgcctctaagaagactggaactggaactaagacttccttgacttctgcaaagaaagagaatcctaagatacatccatccaatgaggagaccaagaaattgcaaaaaccagtcatcaggaattccaccattgaacgtcttgcaactgcccgagtaagtcagtcgaaggtttcaccaagtccagcaaaatcaggtccaaccaagaaaccaaccttgaaggcaaatggtgtacctttgcagaagactacaagcacagaaaagaaacaggacccaaaagaagtcaaatcttcaagtcttaaagaagacgcgaagaaaacaaatggggaggttctaggagccactaatggccaggctaagaatgaaatagaaatctcagtagcattgccaaggaactctggcgccacacagtctgttgaaacaaataacagtaatcttggtttgaaagacaatggagagctatccaagacgtcatcagagaaagatgcgacatctttgatttcagaaagagagcatgtgcacgcaaatgttggccagcttcatgccgatccatctttgccgaatcacaatcttgcgttgggaggaaatcagcccagaggtgaagaagtgtcaaacaagttatcttcacttcctggtgatagcaaacctcaacatattactgatgtgatcacaaatcctacagctgcattacctagcaaacccctcacagtttctgctgtgaactcaaatgttaatcaagaaatacacgagaataatgctatcttgcctcaagtcactgagaaacaaatttctactacccctccacccaataaccaagtgatgatgccagaatcagtccactccaggaagaaatggaacactgatgaggacaattcaaaaccagcaaaaggatttcgtaagcttctattctttggaagaaagagctgaagcaaagcaccctggtggattgattttgtgcaaattggttcataataatcttctgaagtgttttgataagctatcagttctcttttccatgcttttggtttttcaacatttcaaagagtttacttcgtccattcttttgctcaacagaaagtgtttggcacattgaattatttcttgttttgaacacacatatggaagtcatgtggaagattgtagatagtttcctgcttgacacacgaaataacaaagccatgagatggggagttgcttgttacgttagagatccatgatgtaaattatctgaatatggtgtatcctaaggaaggctttcacaggtaataaattttccatgttggaactttttatacgaggcttaacttgtttaatgtcatatgatgccaaaaaaaaaaacctgtttccttgtattcatgaaagttgtaatgtttggttgtgtatgactttcatattatttcatgctgatattctattgcaaac

SEQ ID NO: 52920 - protein, 352 aa, Glycine max
  peptide (1)..(352): Ceres Seq. ID no. 15174706
  misc_feature (276)..(351): Homolog of NCBI NO: 29836419 NR Description: putative COP-1 interacting protein 7 [Gossypium
  misc_feature (276)..(352): Homolog of NCBI NO: 29836423 NR Description: putative COP-1 interacting protein 7 [Kokia
  misc_feature (276)..(352): Homolog of NCBI NO: 29836415 NR Description: putative COP-1 interacting protein 7 [Gossypium
  misc_feature (276)..(352): Homolog of NCBI NO: 29836417 NR Description: putative COP-1 interacting protein 7 [Gossypium
  misc_feature (276)..(352): Homolog of NCBI NO: 29836421 NR Description: putative COP-1 interacting protein 7 [Gossypium
  misc_feature (11)..(207): Homolog of NCBI NO: 15234126 NR Description: COP1-interacting protein 7 (CIP7) [Arabidopsis
NITSRSKASPGSKTRVTKSKSEKEEENRKKKEELMIQRQKRIAERSASKKTGTGTKTSLTSAKKENPKIHPSNEETKKLQKPVIRNSTIERLATARVSQSKVSPSPAKSGPTKKPTLKANGVPLQKTTSTEKKQDPKEVKSSSLKEDAKKTNGEVLGATNGQAKNEIEISVALPRNSGATQSVETNNSNLGLKDNGELSKTSSEKDATSLISEREHVHANVGQLHADPSLPNHNLALGGNQPRGEEVSNKLSSLPGDSKPQHITDVITNPTAALPSKPLTVSAVNSNVNQEIHENNAILPQVTEKQISTTPPPNNQVMMPESVHSRKKWNTDEDNSKPAKGFRKLLFFGRKS

SEQ ID NO: 52921 - protein, 318 aa, Glycine max
  peptide (1)..(318): Ceres Seq. ID no. 15174707
  misc_feature (242)..(317): Homolog of NCBI NO: 29836419 NR Description: putative COP-1 interacting protein 7 [Gossypium
  misc_feature (242)..(318): Homolog of NCBI NO: 29836423 NR Description: putative COP-1 interacting protein 7 [Kokia
  misc_feature (242)..(318): Homolog of NCBI NO: 29836415 NR Description: putative COP-1 interacting protein 7 [Gossypium
  misc_feature (242)..(318): Homolog of NCBI NO: 29836417 NR Description: putative COP-1 interacting protein 7 [Gossypium
  misc_feature (242)..(318): Homolog of NCBI NO: 29836421 NR Description: putative COP-1 interacting protein 7 [Gossypium
  misc_feature (1)..(173): Homolog of NCBI NO: 15234126 NR Description: COP1-interacting protein 7 (CIP7) [Arabidopsis
MIQRQKRIAERSASKKTGTGTKTSLTSAKKENPKIHPSNEETKKLQKPVIRNSTIERLATARVSQSKVSPSPAKSGPTKKPTLKANGVPLQKTTSTEKKQDPKEVKSSSLKEDAKKTNGEVLGATNGQAKNEIEISVALPRNSGATQSVETNNSNLGLKDNGELSKTSSEKDATSLISEREHVHANVGQLHADPSLPNHNLALGGNQPRGEEVSNKLSSLPGDSKPQHITDVITNPTAALPSKPLTVSAVNSNVNQEIHENNAILPQVTEKQISTTPPPNNQVMMPESVHSRKKWNTDEDNSKPAKGFRKLLFFGRKS

SEQ ID NO: 52922 - DNA, 1360 bp, Glycine max
  misc_feature (1)..(1360): Ceres Seq. ID no. 13637649
aaacacccaaaaataacgagcgagttttgcgtcttaatggaggagagaaagaagcacccttcttttccctccaactatctcactctcgctcaactccaagaacgatggctcaagcagcaaaaccaaatcaaccaaccacaaccacaaccacaaccacagccacaagaacaacacaaccaccaccaccgccaacaaccacaccaagagctggtactcgttcccagaaacggaaacgcttataggtctcgttctcagtttcagtatgttgcgaagaatcggaacgattccgaaactcgccgccgcgcaaccaaggttgcggtggcctccgatgacaactgcaaatcggaggccgtcgccggaatcggtgacgaaaccgccgatctgaatggaaaatccagtgaatcgaagaagaatcagaataataggaggaatgggaaaggaacatggaaaactaagacggagaagagaggagcgcgtggagatggctctggaacaggagcacaggggaaagaagaggcagagaagaaagccacaatcgagaagaagaatgagttggagaagaacggtggttcggcatcggtggatgaggttggacagcgagttagggttttatcgattaactcaggggatgaaaagaagaagaagaagaagaagaacggtggttcggttacggcagaggaggttgttgaacagagcgtgaggattttatcgattaactcggggaacggtaaacagaacaacgggagattagggaaaatgaacaacggttttggaacagcggcacatgggaaaaaagaggctgagaaaaccacaatcgaaaacgagttgaaggagaagaagaacggtggttccgtaacggtggaggaagtggaacagagagttagggtttcatcgaagaacgaggaggaggagaagaagaacggtggttccgtaacggtggaggaaatggaaaagagagttggggtttcttcatcgaataactcagggaatggtaaacagaacggaagattggggaaaatgagcaacagttttcgtcactctgaatctcagaggaagtattacggtggtgaagcaagttatggctatggctatggtaatcgtggtaacggtcactactctaaggttggggtgcagaaaacaacagagaagaagatggtttgggttaagaaggatgagatagttggtggaaattgagaccttagctagatttgtgctcttgtcgataattgaatagaaatagaatcaatcatagggtagcactatcatcaatgctcactctaacgtttgtttgcctcacccatacactcattgatggagattacaatctgtggttatcaaatatcatcatgatttgaatttt

SEQ ID NO: 52923 - protein, 397 aa, Glycine max
  peptide (1)..(397): Ceres Seq. ID no. 13637650
  misc_feature (11)..(69): Homolog of NCBI NO: 28829482 NR Description: similar to Dictyostelium discoideum (Slime mold).
  misc_feature (45)..(372): Homolog of NCBI NO: 28829482 NR Description: similar to Dictyostelium discoideum (Slime mold).
KHPKITSEFCVLMEERKKHPSFPSNYLTLAQLQERWLKQQNQINQPQPQPQPQPQEQHNHHHRQQPHQELVLVPRNGNAYRSRSQFQYVAKNRNDSETRRRATKVAVASDDNCKSEAVAGIGDETADLNGKSSESKKNQNNRRNGKGTWKTKTEKRGARGDGSGTGAQGKEEAEKKATIEKKNELEKNGGSASVDEVGQRVRVLSINSGDEKKKKKKKNGGSVTAEEVVEQSVRILSINSGNGKQNNGRLGKMNNGFGTAAHGKKEAEKTTIENELKEKKNGGSVTVEEVEQRVRVSSKNEEEEKKNGGSVTVEEMEKRVGVSSSNNSGNGKQNGRLGKMSNSFRHSESQRKYYGGEASYGYGYGNRGNGHYSKVGVQKTTEKKMVWVKKDEIVGGN

SEQ ID NO: 52924 - protein, 385 aa, Glycine max
  peptide (1)..(385): Ceres Seq. ID no. 13637651
  misc_feature (1)..(57): Homolog of NCBI NO: 28829482 NR Description: similar to Dictyostelium discoideum (Slime mold).
  misc_feature (33)..(360): Homolog of NCBI NO: 28829482 NR Description: similar to Dictyostelium discoideum (Slime mold).
MEERKKHPSFPSNYLTLAQLQERWLKQQNQINQPQPQPQPQPQEQHNHHHRQQPHQELVLVPRNGNAYRSRSQFQYVAKNRNDSETRRRATKVAVASDDNCKSEAVAGIGDETADLNGKSSESKKNQNNRRNGKGTWKTKTEKRGARGDGSGTGAQGKEEAEKKATIEKKNELEKNGGSASVDEVGQRVRVLSINSGDEKKKKKKKNGGSVTAEEVVEQSVRILSINSGNGKQNNGRLGKMNNGFGTAAHGKKEAEKTTIENELKEKKNGGSVTVEEVEQRVRVSSKNEEEEKKNGGSVTVEEMEKRVGVSSSNNSGNGKQNGRLGKMSNSFRHSESQRKYYGGEASYGYGYGNRGNGHYSKVGVQKTTEKKMVWVKKDEIVGGN

SEQ ID NO: 52925 - DNA, 1560 bp, Glycine max
  misc_feature (1)..(1560): Ceres Seq. ID no. 14306667
tccgacacatttttcattaccgccgtgataacacactaacaccaccacttcatcaactttacttgacaacaatattgtaaaactcaaaatctagtttcatactttttttcttcttcttgaaatggctctccaggctgcttctcttgttcctgcttctttctcggttcttaaagagggaaagagtggtgtgtctctcaaggactccaccttgttcggtctttcattttcagaacctatcaaagctaacttcagctcttctgcattgaggtgcaagagggaattcgaacaaaagctctgtgctgtgagggccgaaacagtggctacagcctctccagcagttaccaagtctacaccagaagggaagaaaacattgaggaagggcagtgttgtgataactggggcttcatctggactaggcctggccactgctaaggctttggctgagacgggaaaatggcatgtaataatggcctgcagggattacctcaaagctgcaagagctgcaaaatccgctggcatggctaaggaaaactacaccatcatgcacttggaccttgcctcgctcgacagtgtccgccaatttgttgataacttcagaagatcggaaatgccgttagatgtgctggtttgcaatgctgctgtttacttgccaactgctaaggaacctaccttcactgctgagggctttgaacttagtgttgggacaaatcatctggggcatttcctcctctcgcgcctgttgcttgaggacttggaaaaatccgattacccttcaaagcgcttgatcatcgttggttcaataacagggaacacaaacacattggctggtaatgtacctcccaaggctaaccttggtgacttgaggggacttcagggtggtttgaatgggctaaacagctcagccatgattgatggtggagacttcgatggtgccaaggcgtacaaggacagcaaagtctgcaatatgctcacaatgcaagaattccacagacgattccatgaggaaactggaatcacatttgcttccctttaccccggttgcattgccacaacaggcctgttcagagagcacattcccttgttcagaactctgttccctccattccagaagtacataaccaaaggctatgtctcagaagatgaagcaggaaagagacttgctcaggttgtaagtgatccaagcctaacaaaatctggtgtttactggagctggaacaaagcatcagcttcgtttgaaaaccagttgtctcaggaggccagtgatacagagaaggctcgtaagatctgggagattagtgagaaacttgttggttttgcctaagtgggaggagcctccaacatcccatgttgttctagagaccttgcacttgcatggaggaagaaaatgatgtctcaaaagagtggatagataacatcctatcattttgaatgcattgatgttgttttgttagctaggagcttctttgctttgatgtaaggtgtcaatggctttttgtgaatcaagactcaataaaatcattcagccatgtgggtgtggtgaagttgctcataaactttctg

SEQ ID NO: 52926 - protein, 399 aa, Glycine max
  peptide (1)..(399): Ceres Seq. ID no. 14306668
  misc_feature (1)..(399): Homolog of NCBI NO: 21068893 NR Description: NADPH:protochlorophyllide oxidoreductase
  misc_feature (1)..(399): Homolog of NCBI NO: 21593167 NR Description: protochlorophyllide reductase precursor
  misc_feature (1)..(399): Homolog of NCBI NO: 15234129 NR Description: protochlorophyllide reductase B (PCR B/POR B)
  misc_feature (1)..(399): Homolog of NCBI NO: 15239574 NR Description: protochlorophyllide reductase A (PCR A/POR A)
  misc_feature (1)..(399): Homolog of NCBI NO: 968975 NR Description: NADPH:protochlorophyllide oxidoreductase A
  misc_feature (1)..(399): Homolog of NCBI NO: 10720233 NR Description: Protochlorophyllide reductase, chloroplast
  misc_feature (1)..(399): Homolog of NCBI NO: 9587209 NR Description: NADPH-protochlorophyllide oxidoreductase [Vigna
  misc_feature (1)..(399): Homolog of NCBI NO: 10720220 NR Description: Protochlorophyllide reductase, chloroplast
  misc_feature (1)..(399): Homolog of NCBI NO: 266742 NR Description: Protochlorophyllide reductase, chloroplast
  misc_feature (1)..(399): Homolog of NCBI NO: 81946 NR Description: protochlorophyllide reductase (EC 1.3.1.33)
MALQAASLVPASFSVLKEGKSGVSLKDSTLFGLSFSEPIKANFSSSALRCKREFEQKLCAVRAETVATASPAVTKSTPEGKKTLRKGSVVITGASSGLGLATAKALAETGKWHVIMACRDYLKAARAAKSAGMAKENYTIMHLDLASLDSVRQFVDNFRRSEMPLDVLVCNAAVYLPTAKEPTFTAEGFELSVGTNHLGHFLLSRLLLEDLEKSDYPSKRLIIVGSITGNTNTLAGNVPPKANLGDLRGLQGGLNGLNSSAMIDGGDFDGAKAYKDSKVCNMLTMQEFHRRFHEETGITFASLYPGCIATTGLFREHIPLFRTLFPPFQKYITKGYVSEDEAGKRLAQVVSDPSLTKSGVYWSWNKASASFENQLSQEASDTEKARKIWEISEKLVGFA

SEQ ID NO: 52927 - protein, 284 aa, Glycine max
  peptide (1)..(284): Ceres Seq. ID no. 14306669
  misc_feature (1)..(284): Homolog of NCBI NO: 21068893 NR Description: NADPH:protochlorophyllide oxidoreductase
  misc_feature (1)..(284): Homolog of NCBI NO: 21593167 NR Description: protochlorophyllide reductase precursor
  misc_feature (1)..(284): Homolog of NCBI NO: 15234129 NR Description: protochlorophyllide reductase B (PCR B/POR B)
  misc_feature (1)..(284): Homolog of NCBI NO: 15239574 NR Description: protochlorophyllide reductase A (PCR A/POR A)
  misc_feature (1)..(284): Homolog of NCBI NO: 968975 NR Description: NADPH:protochlorophyllide oxidoreductase A
  misc_feature (1)..(284): Homolog of NCBI NO: 10720233 NR Description: Protochlorophyllide reductase, chloroplast
  misc_feature (1)..(284): Homolog of NCBI NO: 9587209 NR Description: NADPH-protochlorophyllide oxidoreductase [Vigna
  misc_feature (1)..(284): Homolog of NCBI NO: 10720220 NR Description: Protochlorophyllide reductase, chloroplast
  misc_feature (1)..(284): Homolog of NCBI NO: 266742 NR Description: Protochlorophyllide reductase, chloroplast
  misc_feature (1)..(284): Homolog of NCBI NO: 81946 NR Description: protochlorophyllide reductase (EC 1.3.1.33)
MACRDYLKAARAAKSAGMAKENYTIMHLDLASLDSVRQFVDNFRRSEMPLDVLVCNAAVYLPTAKEPTFTAEGFELSVGTNHLGHFLLSRLLLEDLEKSDYPSKRLIIVGSITGNTNTLAGNVPPKANLGDLRGLQGGLNGLNSSAMIDGGDFDGAKAYKDSKVCNMLTMQEFHRRFHEETGITFASLYPGCIATTGLFREHIPLFRTLFPPFQKYITKGYVSEDEAGKRLAQVVSDPSLTKSGVYWSWNKASASFENQLSQEASDTEKARKIWEISEKLVGFA

SEQ ID NO: 52928 - protein, 267 aa, Glycine max
  peptide (1)..(267): Ceres Seq. ID no. 14306670
  misc_feature (1)..(267): Homolog of NCBI NO: 21068893 NR Description: NADPH:protochlorophyllide oxidoreductase
  misc_feature (1)..(267): Homolog of NCBI NO: 21593167 NR Description: protochlorophyllide reductase precursor
  misc_feature (1)..(267): Homolog of NCBI NO: 15234129 NR Description: protochlorophyllide reductase B (PCR B/POR B)
  misc_feature (1)..(267): Homolog of NCBI NO: 15239574 NR Description: protochlorophyllide reductase A (PCR A/POR A)
  misc_feature (1)..(267): Homolog of NCBI NO: 968975 NR Description: NADPH:protochlorophyllide oxidoreductase A
  misc_feature (1)..(267): Homolog of NCBI NO: 10720233 NR Description: Protochlorophyllide reductase, chloroplast
  misc_feature (1)..(267): Homolog of NCBI NO: 9587209 NR Description: NADPH-protochlorophyllide oxidoreductase [Vigna
  misc_feature (1)..(267): Homolog of NCBI NO: 10720220 NR Description: Protochlorophyllide reductase, chloroplast
  misc_feature (1)..(267): Homolog of NCBI NO: 266742 NR Description: Protochlorophyllide reductase, chloroplast
  misc_feature (1)..(267): Homolog of NCBI NO: 81946 NR Description: protochlorophyllide reductase (EC 1.3.1.33)
MAKENYTIMHLDLASLDSVRQFVDNFRRSEMPLDVLVCNAAVYLPTAKEPTFTAEGFELSVGTNHLGHFLLSRLLLEDLEKSDYPSKRLIIVGSITGNTNTLAGNVPPKANLGDLRGLQGGLNGLNSSAMIDGGDFDGAKAYKDSKVCNMLTMQEFHRRFHEETGITFASLYPGCIATTGLFREHIPLFRTLFPPFQKYITKGYVSEDEAGKRLAQVVSDPSLTKSGVYWSWNKASASFENQLSQEASDTEKARKIWEISEKLVGFA

SEQ ID NO: 52929 - DNA, 1866 bp, Glycine max
  misc_feature (1)..(1866): Ceres Seq. ID no. 14315146
ggtgatcggtgatcggtgatcagtggtttggtgttgttgatagaaaaatgcattccagccctttgcttcttgaggaacccattaggatggcatccattcttgagccatccaagcctactttctttccagctatgacaaaaattgttggcacacttggtctaaagtcacgatcagttgatacaatttcccgttgccttgatgcaggaatgtctgtggcaaggtttgacttctcatggggtgatccagaataccatcaagagacattggaaaatttgagagttgctatcaaaagtaccaagaaactctgtgcggttatgctagatactgtgggtcctgaattacagattgagaataagacagatcacccaatcacccttgaagcagacacattagttgtcttaactccagatcaaaccaaagaagctggttcaaatctcttaccagtaaattttaacggactatcaaaggctgtgaagaagggtgatactatttttatcggaaaatacctgtttactggaagtgaaacagcttccttatggctggaggtcagtgaggtgaaaggtgaggatgtcacctgtctggtaaaaaacactgctacactgtctggatcattgtttactgcacatgtctctcagatccacatcgatcttcctactcttgctgataaagataaggaggtaataagcacatggggtgttcgaaacaatattgacttcctttcattatatacccggcacgttgaagatattcgtcatgcgcgtgaatttctttctaaattgggtgaccttaagcagacacatatttatgcaaagattgaaaatatagagggactgaagcattttgatgaaatattgagagaagcagatggcatcatcctcgctcgtggaaatttagggatagaactcccacctgagaaggttttcttattccaaaaggctgctatttacaagtgcaacatggttggaaagccagttgttgttacacgtgttgtagactctatgactgataatctaagacctactcgtgctgaagcaacagatgttgccaatgcagtgctggatggaagtgatgcaattctccttggagcagagaccctgcggggacaataccctgtagagaccatttctatagttggaaaaatatgtgctgaggcagagaaagttcataatcaagatttgtattttaagaaggctgtcaaatatgtgggagagccaatgagccatttggaatcaattgcttcctctgcggttcgagcagctatcaaggttaaagcctctgttattatttgcttcacttcatctggaagagctgcaagattgattgctaagtacagaccaattatgcctgtcatatccgttgtcattcctcaactgaagacaaatcaactccgatggacattcaccggtgcttttgaggctaggcaatctcttattgtgaggggtctttttcctatgctggcagatccacgacacccggctgagtctaaaagtggaacaaatgaatcaattttgaaggttgctttagatcatggcaaggcttttggcatcataaagccacatgaccgagttgttgtctgccagaaagtagctgactcgtcagttgtgaagattcttgagctcgaagattgattggttcaatacaacttatgtgtcatttgatgcatcataataaaacttcttctcaaccttttcattctagcgtttgtgtttcattgaagtacaataacaaacacataacattgagatacatattgtagagtgggaaagagacttttttgtttgattgtttttttaataggcaatcacagttttgagctataaataatggtattggtatggaaataaaaaaaaatgatgttatatcagc

SEQ ID NO: 52930 - protein, 526 aa, Glycine max
  peptide (1)..(526): Ceres Seq. ID no. 14315147
  misc_feature (393)..(523): Pfam Name: Pyruvate kinase, alpha/beta domain Pfam Description: Pyruvate kinase, alpha/beta domain
  misc_feature (12)..(437): Homolog of NCBI NO: 13928580 NR Description: pyruvate kinase [Toxoplasma gondii]
  misc_feature (30)..(521): Homolog of NCBI NO: 322787 NR Description: pyruvate kinase (EC 2.7.1.40), cytosolic - potato
  misc_feature (30)..(521): Homolog of NCBI NO: 125606 NR Description: Pyruvate kinase, cytosolic isozyme
  misc_feature (54)..(526): Homolog of NCBI NO: 25287747 NR Description: probable pyruvate kinase [imported] - Arabidopsis
  misc_feature (37)..(526): Homolog of NCBI NO: 20562907 NR Description: pyruvate kinase-like [Deschampsia antarctica]
  misc_feature (14)..(526): Homolog of NCBI NO: 11260409 NR Description: pyruvate kinase-like protein - Arabidopsis
  misc_feature (1)..(526): Homolog of NCBI NO: 23308151 NR Description: At2g36580/F1O11.21 [Arabidopsis thaliana]
  misc_feature (1)..(526): Homolog of NCBI NO: 21537122 NR Description: putative pyruvate kinase [Arabidopsis thaliana]
  misc_feature (1)..(526): Homolog of NCBI NO: 18404169 NR Description: pyruvate kinase, putative [Arabidopsis thaliana]
  misc_feature (1)..(526): Homolog of NCBI NO: 18409740 NR Description: pyruvate kinase, putative [Arabidopsis thaliana]
MHSSPLLLEEPIRMASILEPSKPTFFPAMTKIVGTLGLKSRSVDTISRCLDAGMSVARFDFSWGDPEYHQETLENLRVAIKSTKKLCAVMLDTVGPELQIENKTDHPITLEADTLVVLTPDQTKEAGSNLLPVNFNGLSKAVKKGDTIFIGKYLFTGSETASLWLEVSEVKGEDVTCLVKNTATLSGSLFTAHVSQIHIDLPTLADKDKEVISTWGVRNNIDFLSLYTRHVEDIRHAREFLSKLGDLKQTHIYAKIENIEGLKHFDEILREADGIILARGNLGIELPPEKVFLFQKAAIYKCNMVGKPVVVTRVVDSMTDNLRPTRAEATDVANAVLDGSDAILLGAETLRGQYPVETISIVGKICAEAEKVHNQDLYFKKAVKYVGEPMSHLESIASSAVRAAIKVKASVIICFTSSGRAARLIAKYRPIMPVISVVIPQLKTNQLRWTFTGAFEARQSLIVRGLFPMLADPRHPAESKSGTNESILKVALDHGKAFGIIKPHDRVVVCQKVADSSVVKILELED

SEQ ID NO: 52931 - protein, 513 aa, Glycine max
  peptide (1)..(513): Ceres Seq. ID no. 14315148
  misc_feature (380)..(510): Pfam Name: Pyruvate kinase, alpha/beta domain Pfam Description: Pyruvate kinase, alpha/beta domain
  misc_feature (1)..(424): Homolog of NCBI NO: 13928580 NR Description: pyruvate kinase [Toxoplasma gondii]
  misc_feature (17)..(508): Homolog of NCBI NO: 322787 NR Description: pyruvate kinase (EC 2.7.1.40), cytosolic - potato
  misc_feature (17)..(508): Homolog of NCBI NO: 125606 NR Description: Pyruvate kinase, cytosolic isozyme
  misc_feature (41)..(513): Homolog of NCBI NO: 25287747 NR Description: probable pyruvate kinase [imported] - Arabidopsis
  misc_feature (24)..(513): Homolog of NCBI NO: 20562907 NR Description: pyruvate kinase-like [Deschampsia antarctica]
  misc_feature (1)..(513): Homolog of NCBI NO: 11260409 NR Description: pyruvate kinase-like protein - Arabidopsis
  misc_feature (1)..(513): Homolog of NCBI NO: 23308151 NR Description: At2g36580/F1O11.21 [Arabidopsis thaliana]
  misc_feature (1)..(513): Homolog of NCBI NO: 21537122 NR Description: putative pyruvate kinase [Arabidopsis thaliana]
  misc_feature (1)..(513): Homolog of NCBI NO: 18404169 NR Description: pyruvate kinase, putative [Arabidopsis thaliana]
  misc_feature (1)..(513): Homolog of NCBI NO: 18409740 NR Description: pyruvate kinase, putative [Arabidopsis thaliana]
MASILEPSKPTFFPAMTKIVGTLGLKSRSVDTISRCLDAGMSVARFDFSWGDPEYHQETLENLRVAIKSTKKLCAVMLDTVGPELQIENKTDHPITLEADTLVVLTPDQTKEAGSNLLPVNFNGLSKAVKKGDTIFIGKYLFTGSETASLWLEVSEVKGEDVTCLVKNTATLSGSLFTAHVSQIHIDLPTLADKDKEVISTWGVRNNIDFLSLYTRHVEDIRHAREFLSKLGDLKQTHIYAKIENIEGLKHFDEILREADGIILARGNLGIELPPEKVFLFQKAAIYKCNMVGKPVVVTRVVDSMTDNLRPTRAEATDVANAVLDGSDAILLGAETLRGQYPVETISIVGKICAEAEKVHNQDLYFKKAVKYVGEPMSHLESIASSAVRAAIKVKASVIICFTSSGRAARLIAKYRPIMPVISVVIPQLKTNQLRWTFTGAFEARQSLIVRGLFPMLADPRHPAESKSGTNESILKVALDHGKAFGIIKPHDRVVVCQKVADSSVVKILELED

SEQ ID NO: 52932 - protein, 498 aa, Glycine max
  peptide (1)..(498): Ceres Seq. ID no. 14315149
  misc_feature (365)..(495): Pfam Name: Pyruvate kinase, alpha/beta domain Pfam Description: Pyruvate kinase, alpha/beta domain
  misc_feature (1)..(409): Homolog of NCBI NO: 13928580 NR Description: pyruvate kinase [Toxoplasma gondii]
  misc_feature (2)..(493): Homolog of NCBI NO: 322787 NR Description: pyruvate kinase (EC 2.7.1.40), cytosolic - potato
  misc_feature (2)..(493): Homolog of NCBI NO: 125606 NR Description: Pyruvate kinase, cytosolic isozyme
  misc_feature (26)..(498): Homolog of NCBI NO: 25287747 NR Description: probable pyruvate kinase [imported] - Arabidopsis
  misc_feature (9)..(498): Homolog of NCBI NO: 20562907 NR Description: pyruvate kinase-like [Deschampsia antarctica]
  misc_feature (1)..(498): Homolog of NCBI NO: 11260409 NR Description: pyruvate kinase-like protein - Arabidopsis
  misc_feature (1)..(498): Homolog of NCBI NO: 23308151 NR Description: At2g36580/F1O11.21 [Arabidopsis thaliana]
  misc_feature (1)..(498): Homolog of NCBI NO: 21537122 NR Description: putative pyruvate kinase [Arabidopsis thaliana]
  misc_feature (1)..(498): Homolog of NCBI NO: 18404169 NR Description: pyruvate kinase, putative [Arabidopsis thaliana]
  misc_feature (1)..(498): Homolog of NCBI NO: 18409740 NR Description: pyruvate kinase, putative [Arabidopsis thaliana]
MTKIVGTLGLKSRSVDTISRCLDAGMSVARFDFSWGDPEYHQETLENLRVAIKSTKKLCAVMLDTVGPELQIENKTDHPITLEADTLVVLTPDQTKEAGSNLLPVNFNGLSKAVKKGDTIFIGKYLFTGSETASLWLEVSEVKGEDVTCLVKNTATLSGSLFTAHVSQIHIDLPTLADKDKEVISTWGVRNNIDFLSLYTRHVEDIRHAREFLSKLGDLKQTHIYAKIENIEGLKHFDEILREADGIILARGNLGIELPPEKVFLFQKAAIYKCNMVGKPVVVTRVVDSMTDNLRPTRAEATDVANAVLDGSDAILLGAETLRGQYPVETISIVGKICAEAEKVHNQDLYFKKAVKYVGEPMSHLESIASSAVRAAIKVKASVIICFTSSGRAARLIAKYRPIMPVISVVIPQLKTNQLRWTFTGAFEARQSLIVRGLFPMLADPRHPAESKSGTNESILKVALDHGKAFGIIKPHDRVVVCQKVADSSVVKILELED

SEQ ID NO: 52933 - DNA, 1288 bp, Glycine max
  misc_feature (1)..(1288): Ceres Seq. ID no. 14310687
gatgctacaggtggaatcactggtttcagcgtgcgccggcggatccagcgatcggaaaatcgcctgcgagaccctggccgacgacgtccaccccacggatccgccggagtcccacccggattctccgccggagtccttctggctctcgagggacgaggaatacgactggtgggaccgcaacgccgtttacgagcgcaaagaatccaccaaggcaagtaataataattcaacaaacctaaaccctggcatcaactccagcaacaactcccagcgtttctctctcaatttcaagtccaaggcttccaccatcattggcttacctaagccgcagaaaacctccttcgtcgacgtcaagaaccgccgcaaccacaacaagcccagtaacatcaggctgttcccgaaacgcagcgtttcggtcggaaaatctgagtcaggactcgtcgaaccgtcttcgcccaaagtctcttgcatgggaagagtcagatccaagcgcgatcgaaatcgcaagttgagaagttcacgaaagtcttcccctgacacagacgccaaagaaaaacacagcagaagcggaaagaaacccggttttttcgagagttttcgctctattttccggtccggccgaaaagggaaaccggaccggaagaaaagcgatcccctggccgcggactcaactcatgagacgaagagcggtgccgttaactactctagagcgcggcacagcacgtcgagcttgaacgacgtgtcgttcgaggagtcagtctcgcgaaacagcgtgtcggagagcgaaccgcccggtttgggtggcatgatgcggttcgcgtctgggagaaggtctgagtcgtggggagtaggtgattccgaaggacacgtggcacagtagtattggatgaagataaccgttcggcgagggcaaacacgaagtggggccctttgcccttggatgtaagcaattgagataaaaaggcgagtcttttggcgtgggaccaaggcgttggaagagggagtgacgtggcgcgttgaacaaattttacttgttactgtttggaaagtaaaatctttttccttttgtgctgtgcttgattgaatctggtgtattttgtagccacaaagttttgtcttgtaaatatacacgagtcatgagtggtttttgtttctttgaattgagcagatgtatgtatattttgattttctctcttgggtttcaataattgtatgaattgtccaacggtgcatgcgttgccggttccctctccttttcaattaagcaaaattattaagcatgggtgtt

SEQ ID NO: 52934 - protein, 292 aa, Glycine max
  peptide (1)..(292): Ceres Seq. ID no. 14310688
  misc_feature (27)..(160): Homolog of NCBI NO: 25053813 NR Description: calcium/calmodulin protein kinase 1 [Nicotiana
  misc_feature (2)..(174): Homolog of NCBI NO: 34908494 NR Description: P0489B03.23 [Oryza sativa (japonica
  misc_feature (2)..(229): Homolog of NCBI NO: 21537164 NR Description: unknown [Arabidopsis thaliana]
  misc_feature (2)..(229): Homolog of NCBI NO: 18404079 NR Description: expressed protein [Arabidopsis thaliana]
  misc_feature (7)..(279): Homolog of NCBI NO: 15231297 NR Description: expressed protein [Arabidopsis thaliana]
MLQVESLVSACAGGSSDRKIACETLADDVHPTDPPESHPDSPPESFWLSRDEEYDWWDRNAVYERKESTKASNNNSTNLNPGINSSNNSQRFSLNFKSKASTIIGLPKPQKTSFVDVKNRRNHNKPSNIRLFPKRSVSVGKSESGLVEPSSPKVSCMGRVRSKRDRNRKLRSSRKSSPDTDAKEKHSRSGKKPGFFESFRSIFRSGRKGKPDRKKSDPLAADSTHETKSGAVNYSRARHSTSSLNDVSFEESVSRNSVSESEPPGLGGMMRFASGRRSESWGVGDSEGHVAQ

SEQ ID NO: 52935 - DNA, 1324 bp, Glycine max
  misc_feature (1)..(1324): Ceres Seq. ID no. 13593911
tttatacttctgatcatttctaattttgaattcttaattcatgcatgtactcacatgctttgaaagatctttttgttattaagaatacatcagagtcaatatttttatccttgactggtttcaattgatgtttacatgcaactgtttttgtttgcttgcttttatagcatttacataacggttttaattgatgtttacatgcaactgtttatgtttgcttatatagtatttacaacagttccttgcatttaacttcccaggttaatgccttcagggaaaggagagcacttgctttgacattgaatgataccaaaacggcagtgaacaaacttcatcgaatgctcaattttatagttggaattattatactggttatttggctcttgatattggaacttgccaccaccaaatttcttctctttgtgagctcacaggttgtcgtggttgcatttatatttggaaacacctgcaagaccatatttgaagcaattattttcttatttgtcatgcacccatttgatgtgggagatagatgtgaaattgatggggttcagatggttgtagaagaaatgaacatattgacaaccatatttctgagatttgataatcaaaaggtcatcatccctaacaatgtccttgctaccaaggccatatataactattaccggagtcctgacatgggagatgctatcgaattctgtgtacatatatctaccccagttgaaaagatttcactcattaaacacagaatacaaagttacattgataacaagaaggagcactggtatccttcacctttgattgtatacagggattatgaccaattaaacatggtgaggttggctatctggccaactcatagaatgaacttccaagacatgggagaaaggtttgtgaggagatcccttttgcttgaagagatgatcaagattttcagggagcttgacattaattaccggctcttgcccatggacattaatgtgagagccactcctaccacttctgatcggcttccacctagttggacatcagttccaactccaagttgagtagaagaaggaaattcataacctcatgtcatcttgtgtgtgtggaaaacccgcggcattaactgctaggaaatgctatattttagctggatagcatattgtaaagagagggtcttttgtttttagattagcttgatatgtactgaggttagtttgtagtagctatgaagccatgcctaggtttcccatgtagtagttttgttcaaatgattagagggttaatcgctacgtcttttatactataaccatattcagtataagatttctatatgtct

SEQ ID NO: 52936 - protein, 236 aa, Glycine max
  peptide (1)..(236): Ceres Seq. ID no. 13593912
  misc_feature (1)..(207): Pfam Name: Mechanosensitive ion channel Pfam Description: Mechanosensitive ion channel
  misc_feature (175)..(230): Homolog of NCBI NO: 25411771 NR Description: hypothetical protein At2g17010 [imported] -
  misc_feature (1)..(156): Homolog of NCBI NO: 25411771 NR Description: hypothetical protein At2g17010 [imported] -
  misc_feature (33)..(229): Homolog of NCBI NO: 15231928 NR Description: hypothetical protein [Arabidopsis thaliana]
  misc_feature (1)..(233): Homolog of NCBI NO: 15227342 NR Description: hypothetical protein [Arabidopsis thaliana]
  misc_feature (1)..(229): Homolog of NCBI NO: 38345847 NR Description: OSJNBa0084K11.11 [Oryza sativa (japonica
  misc_feature (1)..(230): Homolog of NCBI NO: 30679840 NR Description: expressed protein [Arabidopsis thaliana]
  misc_feature (1)..(229): Homolog of NCBI NO: 15220793 NR Description: hypothetical protein [Arabidopsis thaliana]
  misc_feature (1)..(229): Homolog of NCBI NO: 12324039 NR Description: unknown protein, 5' partial; 111936-110607
  misc_feature (1)..(231): Homolog of NCBI NO: 15218429 NR Description: expressed protein [Arabidopsis thaliana]
  misc_feature (1)..(229): Homolog of NCBI NO: 11994592 NR Description: gb|AAD30575.1~gene_id:T21E2.7~strong similarity
MLNFIVGIIILVIWLLILELATTKFLLFVSSQVVVVAFIFGNTCKTIFEAIIFLFVMHPFDVGDRCEIDGVQMVVEEMNILTTIFLRFDNQKVIIPNNVLATKAIYNYYRSPDMGDAIEFCVHISTPVEKISLIKHRIQSYIDNKKEHWYPSPLIVYRDYDQLNMVRLAIWPTHRMNFQDMGERFVRRSLLLEEMIKIFRELDINYRLLPMDINVRATPTTSDRLPPSWTSVPTPS

SEQ ID NO: 52937 - protein, 180 aa, Glycine max
  peptide (1)..(180): Ceres Seq. ID no. 13593913
  misc_feature (1)..(151): Pfam Name: Mechanosensitive ion channel Pfam Description: Mechanosensitive ion channel
  misc_feature (119)..(174): Homolog of NCBI NO: 25411771 NR Description: hypothetical protein At2g17010 [imported] -
  misc_feature (1)..(100): Homolog of NCBI NO: 25411771 NR Description: hypothetical protein At2g17010 [imported] -
  misc_feature (1)..(173): Homolog of NCBI NO: 15231928 NR Description: hypothetical protein [Arabidopsis thaliana]
  misc_feature (1)..(177): Homolog of NCBI NO: 15227342 NR Description: hypothetical protein [Arabidopsis thaliana]
  misc_feature (1)..(173): Homolog of NCBI NO: 38345847 NR Description: OSJNBa0084K11.11 [Oryza sativa (japonica
  misc_feature (1)..(174): Homolog of NCBI NO: 30679840 NR Description: expressed protein [Arabidopsis thaliana]
  misc_feature (1)..(173): Homolog of NCBI NO: 15220793 NR Description: hypothetical protein [Arabidopsis thaliana]
  misc_feature (1)..(173): Homolog of NCBI NO: 12324039 NR Description: unknown protein, 5' partial; 111936-110607
  misc_feature (1)..(175): Homolog of NCBI NO: 15218429 NR Description: expressed protein [Arabidopsis thaliana]
  misc_feature (1)..(173): Homolog of NCBI NO: 11994592 NR Description: gb|AAD30575.1~gene_id:T21E2.7~strong similarity
MHPFDVGDRCEIDGVQMVVEEMNILTTIFLRFDNQKVIIPNNVLATKAIYNYYRSPDMGDAIEFCVHISTPVEKISLIKHRIQSYIDNKKEHWYPSPLIVYRDYDQLNMVRLAIWPTHRMNFQDMGERFVRRSLLLEEMIKIFRELDINYRLLPMDINVRATPTTSDRLPPSWTSVPTPS

SEQ ID NO: 52938 - protein, 164 aa, Glycine max
  peptide (1)..(164): Ceres Seq. ID no. 13593914
  misc_feature (1)..(135): Pfam Name: Mechanosensitive ion channel Pfam Description: Mechanosensitive ion channel
  misc_feature (103)..(158): Homolog of NCBI NO: 25411771 NR Description: hypothetical protein At2g17010 [imported] -
  misc_feature (1)..(84): Homolog of NCBI NO: 25411771 NR Description: hypothetical protein At2g17010 [imported] -
  misc_feature (1)..(157): Homolog of NCBI NO: 15231928 NR Description: hypothetical protein [Arabidopsis thaliana]
  misc_feature (1)..(161): Homolog of NCBI NO: 15227342 NR Description: hypothetical protein [Arabidopsis thaliana]
  misc_feature (1)..(157): Homolog of NCBI NO: 38345847 NR Description: OSJNBa0084K11.11 [Oryza sativa (japonica
  misc_feature (1)..(158): Homolog of NCBI NO: 30679840 NR Description: expressed protein [Arabidopsis thaliana]
  misc_feature (1)..(157): Homolog of NCBI NO: 15220793 NR Description: hypothetical protein [Arabidopsis thaliana]
  misc_feature (1)..(157): Homolog of NCBI NO: 12324039 NR Description: unknown protein, 5' partial; 111936-110607
  misc_feature (1)..(159): Homolog of NCBI NO: 15218429 NR Description: expressed protein [Arabidopsis thaliana]
  misc_feature (1)..(157): Homolog of NCBI NO: 11994592 NR Description: gb|AAD30575.1~gene_id:T21E2.7~strong similarity
MVVEEMNILTTIFLRFDNQKVIIPNNVLATKAIYNYYRSPDMGDAIEFCVHISTPVEKISLIKHRIQSYIDNKKEHWYPSPLIVYRDYDQLNMVRLAIWPTHRMNFQDMGERFVRRSLLLEEMIKIFRELDINYRLLPMDINVRATPTTSDRLPPSWTSVPTPS

SEQ ID NO: 52939 - DNA, 1300 bp, Glycine max
  misc_feature (1)..(1300): Ceres Seq. ID no. 14306675
aatgttaactatgttcttctttttttgttctcatctccacaccatgtcctaatctttctgcaccatcgttctccatttttggctttacaaaaccactgtgtctgattaagggttctttaatatttccaatatttcttgtagtgaaaaagttgttagctaaaagaagaccaagtttttggtgttgtagaaggaagagaagaattaacatgaaaattcagtgtgacgtgtgtgagagagctccagcaacagtgatttgttgcgcggatgaggctgctttgtgtgccaaatgtgacgttgaagttcatgctgcaaacaagcttgcaagcaagcaccaaagacttcttcttcaatgtctatcaagcaagcttcccacatgtgacatttgccaagacaagccagcattcatattttgtgttgaagacagagcactcttctgtcaggattgtgatgaaccaattcattcagccggaagcctttccgcgaaccaccagcgcttccttgctactggtatccgagtggcctcgagttctaattgcaccaaagacaatgaaaaaagtcactcggagcctcctaataggagtgcacaacaagtttctgcgaaaattcctcctcagcaagtgcctagcttcacatcctcttgggctgttgatgacttattggaactaacaggctttgaatcacctgagaaaaaggaatctctgcagtttggagagctggaatggcttacagatgtgggtattttcggcgaacaatttgctcaggaagccttggctgcagctgaagtacctcagcttcccgaaactcataacagtagcagtgttgcttcatacaaaacctccaaatcctacatgtcccacaaaaagcctaggattgaagtcctaaatgatgatgatgatgatgagtattttactgtgcccgatctcggctaagtacgtggcttgccatatgggatggtgcatgcatgattggaaaagattaattatgggaaaataattgttttttttaagctctattagtaaattgtcaaaaaagaatattattttcccaaaaaaactattccattcagacatgttgatatgttgtatattcaattattatgagaacgataattttcacaagttgtgtggagttgattaagtattgtacttaaggtgtttttttgctggatagcatagaatccatgcctttggggaataaattttccttgtccttatgcttcatacactaggggggattctcccacggtcacatcttccccaatccccctcgaatttgagacggttaattccattttgtttgc

SEQ ID NO: 52940 - protein, 240 aa, Glycine max
  peptide (1)..(240): Ceres Seq. ID no. 14306676
  misc_feature (1)..(47): Pfam Name: B-box zinc finger Pfam Description: B-box zinc finger
  misc_feature (1)..(115): Homolog of NCBI NO: 3618312 NR Description: zinc finger protein [Oryza sativa (japonica
  misc_feature (1)..(139): Homolog of NCBI NO: 18412037 NR Description: CONSTANS B-box zinc finger family protein
  misc_feature (1)..(139): Homolog of NCBI NO: 17433085 NR Description: Zinc finger protein constans-like 7
  misc_feature (1)..(155): Homolog of NCBI NO: 34903708 NR Description: putative zinc-finger protein
  misc_feature (1)..(164): Homolog of NCBI NO: 3618314 NR Description: zinc finger protein [Oryza sativa (japonica
  misc_feature (1)..(161): Homolog of NCBI NO: 30679541 NR Description: salt-tolerance protein [Arabidopsis thaliana]
  misc_feature (1)..(240): Homolog of NCBI NO: 3618310 NR Description: zinc finger protein [Oryza sativa (japonica
  misc_feature (1)..(240): Homolog of NCBI NO: 18402646 NR Description: salt tolerance-like protein [Arabidopsis
  misc_feature (1)..(240): Homolog of NCBI NO: 25408150 NR Description: hypothetical protein At2g31380 [imported] -
  misc_feature (1)..(240): Homolog of NCBI NO: 15221367 NR Description: salt-tolerance protein [Arabidopsis thaliana]
MKIQCDVCERAPATVICCADEAALCAKCDVEVHAANKLASKHQRLLLQCLSSKLPTCDICQDKPAFIFCVEDRALFCQDCDEPIHSAGSLSANHQRFLATGIRVASSSNCTKDNEKSHSEPPNRSAQQVSAKIPPQQVPSFTSSWAVDDLLELTGFESPEKKESLQFGELEWLTDVGIFGEQFAQEALAAAEVPQLPETHNSSSVASYKTSKSYMSHKKPRIEVLNDDDDDEYFTVPDLG

SEQ ID NO: 52941 - protein, 133 aa, Glycine max
  peptide (1)..(133): Ceres Seq. ID no. 14306677
MRLLCVPNVTLKFMLQTSLQASTKDFFFNVYQASFPHVTFAKTSQHSYFVLKTEHSSVRIVMNQFIQPEAFPRTTSASLLLVSEWPRVLIAPKTMKKVTRSLLIGVHNKFLRKFLLSKCLASHPLGLLMTYWN

SEQ ID NO: 52942 - protein, 120 aa, Glycine max
  peptide (1)..(120): Ceres Seq. ID no. 14306678
MLQTSLQASTKDFFFNVYQASFPHVTFAKTSQHSYFVLKTEHSSVRIVMNQFIQPEAFPRTTSASLLLVSEWPRVLIAPKTMKKVTRSLLIGVHNKFLRKFLLSKCLASHPLGLLMTYWN

SEQ ID NO: 52943 - DNA, 1613 bp, Glycine max
  misc_feature (1)..(1613): Ceres Seq. ID no. 14315626
aaaaatatccgtggcaagagacagaaagaaggacactgttcacggttagggtttgagtctcaaccactctttctttaaagcacagtctcgcattcctccttgcctctttgttctctctttttctctctccttctttctttgtttctgtgtgttcgagattgaagaagatgatgcaggctggacccggcggcatggcccaacaagcgaaccaacaatacgcacagcaacagcaacaaccctacatgatgatgccgccacagcctcagccccctcagatgtgggccacatcggcccagcctccgtcccagtcggtggctcctccgcaacccaccagcgccgatgaggtccgtaccctctggatcggtgatttgcagtactggatggacgaaaattatctctacacctgtttggcacacaccggcgaggtggcttcagttaaagtcattcggaacaaacaaactagtcaatcggagggatatgggtttattgagtttactagtcgtgctggtgctgagagagtccttcaaacatacaatggcaccattatgccaaatggcgggcagaacttcagattgaactgggcaactcttagtgcaggtgagaggcgtcacgatgatagcccagatcacaccatatttgttggagacctggctgccgatgttacggattatcttcttcaagagacatttcgggcacgatatccctcaattaagggggccaaagttgtaattgataggctaactggacggacaaagggttatggttttgttaggtttggagatgagagtgaacaggttagagctatgactgaaatgcaaggggttctttgttcaacaaggcccatgcgaattggaccagcctctaataaaaaccctagcactcagtctcagccaaaagcatcatatcagaatcctcaaggggcacagaacgagcatgatccaaataatacaactatttttgtcggcaatttggatcctaacgtcacggatgaccatttgagacaagtttttgggcattatggagagttagttcatgtgaagattccagctggcaagcgatgtggatttgtccaatttgcggaccggagctgtgcggaagaggcactgcgggttttgaatggcacacttctaggcggacaaaatgttaggctttcatgggggcgaagtccttcaaacaaacaggctcaaccagatgcaaaccagtggaatggtagtggtggtggatactacggatatgctcaggggggctatgaaaattatggttatgcccctgctggacaggaccccaatatgtatggcagttatcctgggtatgcgaattaccaacctccccagcaacagcagcaaataggatatagctaagaagttgggcaccaattttttccgttttcttctgtaatgctatgctattgctaagatactcgttttggttgcttctcttttattgtatcgtggagaacaaacttggctgaatacattctatgcgaataggatatagctaagaagtttcttatgacattctatgcgaattttattttgtatccattaaatattgcttgctgaattctatttggtgaaagcgatcacatttgattgttatgtgtaattcgcagc

SEQ ID NO: 52944 - protein, 397 aa, Glycine max
  peptide (1)..(397): Ceres Seq. ID no. 14315627
  misc_feature (156)..(228): Pfam Name: RNA recognition motif. (a.k.a. RRM, RBD, or RNP domain) Pfam Description: RNA recognition motif. (a.k.a. RRM, RBD, or RNP
  misc_feature (2)..(393): Homolog of NCBI NO: 9758270 NR Description: contains similarity to polyadenylate-binding
  misc_feature (72)..(392): Homolog of NCBI NO: 30524689 NR Description: salt tolerance protein 6 [Beta vulgaris]
  misc_feature (1)..(397): Homolog of NCBI NO: 21592583 NR Description: putative DNA binding protein [Arabidopsis
  misc_feature (6)..(393): Homolog of NCBI NO: 39545835 NR Description: OSJNBb0060E08.6 [Oryza sativa (japonica
  misc_feature (5)..(393): Homolog of NCBI NO: 18416906 NR Description: RNA binding protein 45 (RBP45), putative
  misc_feature (1)..(392): Homolog of NCBI NO: 34896988 NR Description: putative RNA binding protein [Oryza sativa]
  misc_feature (5)..(396): Homolog of NCBI NO: 7485342 NR Description: hypothetical protein F10M23.340 - Arabidopsis
  misc_feature (1)..(397): Homolog of NCBI NO: 15221071 NR Description: RNA binding protein 45 (RBP45), putative
  misc_feature (15)..(393): Homolog of NCBI NO: 40253807 NR Description: putative RNA Binding Protein 45
  misc_feature (6)..(390): Homolog of NCBI NO: 9663767 NR Description: RNA Binding Protein 45 [Nicotiana plumbaginifolia]
MMQAGPGGMAQQANQQYAQQQQQPYMMMPPQPQPPQMWATSAQPPSQSVAPPQPTSADEVRTLWIGDLQYWMDENYLYTCLAHTGEVASVKVIRNKQTSQSEGYGFIEFTSRAGAERVLQTYNGTIMPNGGQNFRLNWATLSAGERRHDDSPDHTIFVGDLAADVTDYLLQETFRARYPSIKGAKVVIDRLTGRTKGYGFVRFGDESEQVRAMTEMQGVLCSTRPMRIGPASNKNPSTQSQPKASYQNPQGAQNEHDPNNTTIFVGNLDPNVTDDHLRQVFGHYGELVHVKIPAGKRCGFVQFADRSCAEEALRVLNGTLLGGQNVRLSWGRSPSNKQAQPDANQWNGSGGGYYGYAQGGYENYGYAPAGQDPNMYGSYPGYANYQPPQQQQQIGYS

SEQ ID NO: 52945 - protein, 396 aa, Glycine max
  peptide (1)..(396): Ceres Seq. ID no. 14315628
  misc_feature (155)..(227): Pfam Name: RNA recognition motif. (a.k.a. RRM, RBD, or RNP domain) Pfam Description: RNA recognition motif. (a.k.a. RRM, RBD, or RNP
  misc_feature (1)..(392): Homolog of NCBI NO: 9758270 NR Description: contains similarity to polyadenylate-binding
  misc_feature (71)..(391): Homolog of NCBI NO: 30524689 NR Description: salt tolerance protein 6 [Beta vulgaris]
  misc_feature (1)..(396): Homolog of NCBI NO: 21592583 NR Description: putative DNA binding protein [Arabidopsis
  misc_feature (5)..(392): Homolog of NCBI NO: 39545835 NR Description: OSJNBb0060E08.6 [Oryza sativa (japonica
  misc_feature (4)..(392): Homolog of NCBI NO: 18416906 NR Description: RNA binding protein 45 (RBP45), putative
  misc_feature (1)..(391): Homolog of NCBI NO: 34896988 NR Description: putative RNA binding protein [Oryza sativa]
  misc_feature (4)..(395): Homolog of NCBI NO: 7485342 NR Description: hypothetical protein F10M23.340 - Arabidopsis
  misc_feature (1)..(396): Homolog of NCBI NO: 15221071 NR Description: RNA binding protein 45 (RBP45), putative
  misc_feature (14)..(392): Homolog of NCBI NO: 40253807 NR Description: putative RNA Binding Protein 45
  misc_feature (5)..(389): Homolog of NCBI NO: 9663767 NR Description: RNA Binding Protein 45 [Nicotiana plumbaginifolia]
MQAGPGGMAQQANQQYAQQQQQPYMMMPPQPQPPQMWATSAQPPSQSVAPPQPTSADEVRTLWIGDLQYWMDENYLYTCLAHTGEVASVKVIRNKQTSQSEGYGFIEFTSRAGAERVLQTYNGTIMPNGGQNFRLNWATLSAGERRHDDSPDHTIFVGDLAADVTDYLLQETFRARYPSIKGAKVVIDRLTGRTKGYGFVRFGDESEQVRAMTEMQGVLCSTRPMRIGPASNKNPSTQSQPKASYQNPQGAQNEHDPNNTTIFVGNLDPNVTDDHLRQVFGHYGELVHVKIPAGKRCGFVQFADRSCAEEALRVLNGTLLGGQNVRLSWGRSPSNKQAQPDANQWNGSGGGYYGYAQGGYENYGYAPAGQDPNMYGSYPGYANYQPPQQQQQIGYS

SEQ ID NO: 52946 - protein, 389 aa, Glycine max
  peptide (1)..(389): Ceres Seq. ID no. 14315629
  misc_feature (148)..(220): Pfam Name: RNA recognition motif. (a.k.a. RRM, RBD, or RNP domain) Pfam Description: RNA recognition motif. (a.k.a. RRM, RBD, or RNP
  misc_feature (1)..(385): Homolog of NCBI NO: 9758270 NR Description: contains similarity to polyadenylate-binding
  misc_feature (64)..(384): Homolog of NCBI NO: 30524689 NR Description: salt tolerance protein 6 [Beta vulgaris]
  misc_feature (1)..(389): Homolog of NCBI NO: 21592583 NR Description: putative DNA binding protein [Arabidopsis
  misc_feature (1)..(385): Homolog of NCBI NO: 39545835 NR Description: OSJNBb0060E08.6 [Oryza sativa (japonica
  misc_feature (1)..(385): Homolog of NCBI NO: 18416906 NR Description: RNA binding protein 45 (RBP45), putative
  misc_feature (1)..(384): Homolog of NCBI NO: 34896988 NR Description: putative RNA binding protein [Oryza sativa]
  misc_feature (1)..(388): Homolog of NCBI NO: 7485342 NR Description: hypothetical protein F10M23.340 - Arabidopsis
  misc_feature (1)..(389): Homolog of NCBI NO: 15221071 NR Description: RNA binding protein 45 (RBP45), putative
  misc_feature (7)..(385): Homolog of NCBI NO: 40253807 NR Description: putative RNA Binding Protein 45
  misc_feature (1)..(382): Homolog of NCBI NO: 9663767 NR Description: RNA Binding Protein 45 [Nicotiana plumbaginifolia]
MAQQANQQYAQQQQQPYMMMPPQPQPPQMWATSAQPPSQSVAPPQPTSADEVRTLWIGDLQYWMDENYLYTCLAHTGEVASVKVIRNKQTSQSEGYGFIEFTSRAGAERVLQTYNGTIMPNGGQNFRLNWATLSAGERRHDDSPDHTIFVGDLAADVTDYLLQETFRARYPSIKGAKVVIDRLTGRTKGYGFVRFGDESEQVRAMTEMQGVLCSTRPMRIGPASNKNPSTQSQPKASYQNPQGAQNEHDPNNTTIFVGNLDPNVTDDHLRQVFGHYGELVHVKIPAGKRCGFVQFADRSCAEEALRVLNGTLLGGQNVRLSWGRSPSNKQAQPDANQWNGSGGGYYGYAQGGYENYGYAPAGQDPNMYGSYPGYANYQPPQQQQQIGYS

SEQ ID NO: 52947 - DNA, 1232 bp, Glycine max
  misc_feature (1)..(1232): Ceres Seq. ID no. 14303786
gagtgaagtgcgaaggacaatgagtgttcggtccaaaaacttgaactctgtattctatgcagattcgtaccatcccattcaagctggcagcatcgacggcaccgatgttgttcctcacgataacgccgtttatcgcgctcaactctgttcctccatcggcctctatgacccatttggtgatcccaaggccactggagacccttattgcactctctttgtcgctcgtctctctcgcctcaccaccgaagatgatctccgcaaggtcatgagtaagtatggtcgagtgaagaacttacgcttggttagggacattgtgacgggagcttctcgtggttatgcttttgttgaatacgagactgaaagggagatgcgacgagcatatatggatgctcatcatttgattgttgatgattctgaaatcatagttgattacaacagacagcaattgatgcctggatggattcctagaaggttaggtggtggtcttagtggtaagaaggaatcgggacaacttcgttttggggggagagaaaagccatttcgtgcacccctgaaaccaattccatatgaggagttgaagaagcttggcatcccccctcctcccgagggaagatacatgtcacgctttcaggtgccatcgcctcctagaagtgaaaggagcctttcagacagggaagaagactctcatagccacagaaggggatctaatgacaggaacaggaacaagacggaagatggactcagaagttcagtggacattgaggaagggcattataggagttcaagtcatcgtgataaccactcacgtggaaggagctctatggagaggagtggtcgttaccatgaccggagttcatctgagaaagaacatcgacacgggagttctactgacaaagacaaacattctcagaagagaaaagaaagtgacaggagttcacttgagaaagaacgtcgacacaggagttctactgacaaagacaaacattctcggaagagaaaagaaagagatgaacggtctcaaaggcgggaaaaatatagtcaccattcccctcacaaggactaagctgtacaactcattattatcacccttctgttgtgcttttgtgctttgtgtatggtatatgcatgggagaaatgggaatgcaaagtggaaatcctcaaagatttctcaataaacgcgagactggtgcatgtataggttcaatgataatcatgcttcggtttatattttt

SEQ ID NO: 52948 - protein, 353 aa, Glycine max
  peptide (1)..(353): Ceres Seq. ID no. 14303787
  misc_feature (71)..(142): Pfam Name: RNA recognition motif. (a.k.a. RRM, RBD, or RNP domain) Pfam Description: RNA recognition motif. (a.k.a. RRM, RBD, or RNP
  misc_feature (55)..(353): Homolog of NCBI NO: 15229825 NR Description: U1 small nuclear ribonucleoprotein 70 (U1-70k)
  misc_feature (16)..(184): Homolog of NCBI NO: 31239757 NR Description: ENSANGP00000016629 [Anopheles gambiae]
  misc_feature (20)..(196): Homolog of NCBI NO: 26333021 NR Description: unnamed protein product [Mus musculus]
  misc_feature (20)..(277): Homolog of NCBI NO: 21624627 NR Description: RIKEN cDNA 6330548G22 [Mus musculus]
  misc_feature (20)..(276): Homolog of NCBI NO: 5902144 NR Description: U1-snRNP binding protein homolog isoform a; hm-1
  misc_feature (9)..(276): Homolog of NCBI NO: 31077198 NR Description: U1-snRNP binding protein homolog isoform b; hm-1
  misc_feature (20)..(277): Homolog of NCBI NO: 34872304 NR Description: similar to RIKEN cDNA 6330548G22 [Rattus
  misc_feature (123)..(349): Homolog of NCBI NO: 26451879 NR Description: putative U1 small nuclear ribonucleoprotein 70
  misc_feature (7)..(301): Homolog of NCBI NO: 25408861 NR Description: hypothetical protein At2g43370 [imported] -
  misc_feature (7)..(349): Homolog of NCBI NO: 30689357 NR Description: U1 small nuclear ribonucleoprotein 70 kDa,
SEVRRTMSVRSKNLNSVFYADSYHPIQAGSIDGTDVVPHDNAVYRAQLCSSIGLYDPFGDPKATGDPYCTLFVARLSRLTTEDDLRKVMSKYGRVKNLRLVRDIVTGASRGYAFVEYETEREMRRAYMDAHHLIVDDSEIIVDYNRQQLMPGWIPRRLGGGLSGKKESGQLRFGGREKPFRAPLKPIPYEELKKLGIPPPPEGRYMSRFQVPSPPRSERSLSDREEDSHSHRRGSNDRNRNKTEDGLRSSVDIEEGHYRSSSHRDNHSRGRSSMERSGRYHDRSSSEKEHRHGSSTDKDKHSQKRKESDRSSLEKERRHRSSTDKDKHSRKRKERDERSQRREKYSHHSPHKD

SEQ ID NO: 52949 - protein, 347 aa, Glycine max
  peptide (1)..(347): Ceres Seq. ID no. 14303788
  misc_feature (65)..(136): Pfam Name: RNA recognition motif. (a.k.a. RRM, RBD, or RNP domain) Pfam Description: RNA recognition motif. (a.k.a. RRM, RBD, or RNP
  misc_feature (49)..(347): Homolog of NCBI NO: 15229825 NR Description: U1 small nuclear ribonucleoprotein 70 (U1-70k)
  misc_feature (10)..(178): Homolog of NCBI NO: 31239757 NR Description: ENSANGP00000016629 [Anopheles gambiae]
  misc_feature (14)..(190): Homolog of NCBI NO: 26333021 NR Description: unnamed protein product [Mus musculus]
  misc_feature (14)..(271): Homolog of NCBI NO: 21624627 NR Description: RIKEN cDNA 6330548G22 [Mus musculus]
  misc_feature (14)..(270): Homolog of NCBI NO: 5902144 NR Description: U1-snRNP binding protein homolog isoform a; hm-1
  misc_feature (3)..(270): Homolog of NCBI NO: 31077198 NR Description: U1-snRNP binding protein homolog isoform b; hm-1
  misc_feature (14)..(271): Homolog of NCBI NO: 34872304 NR Description: similar to RIKEN cDNA 6330548G22 [Rattus
  misc_feature (117)..(343): Homolog of NCBI NO: 26451879 NR Description: putative U1 small nuclear ribonucleoprotein 70
  misc_feature (1)..(295): Homolog of NCBI NO: 25408861 NR Description: hypothetical protein At2g43370 [imported] -
  misc_feature (1)..(343): Homolog of NCBI NO: 30689357 NR Description: U1 small nuclear ribonucleoprotein 70 kDa,
MSVRSKNLNSVFYADSYHPIQAGSIDGTDVVPHDNAVYRAQLCSSIGLYDPFGDPKATGDPYCTLFVARLSRLTTEDDLRKVMSKYGRVKNLRLVRDIVTGASRGYAFVEYETEREMRRAYMDAHHLIVDDSEIIVDYNRQQLMPGWIPRRLGGGLSGKKESGQLRFGGREKPFRAPLKPIPYEELKKLGIPPPPEGRYMSRFQVPSPPRSERSLSDREEDSHSHRRGSNDRNRNKTEDGLRSSVDIEEGHYRSSSHRDNHSRGRSSMERSGRYHDRSSSEKEHRHGSSTDKDKHSQKRKESDRSSLEKERRHRSSTDKDKHSRKRKERDERSQRREKYSHHSPHKD

SEQ ID NO: 52950 - protein, 265 aa, Glycine max
  peptide (1)..(265): Ceres Seq. ID no. 14303789
  misc_feature (1)..(54): Pfam Name: RNA recognition motif. (a.k.a. RRM, RBD, or RNP domain) Pfam Description: RNA recognition motif. (a.k.a. RRM, RBD, or RNP
  misc_feature (1)..(265): Homolog of NCBI NO: 15229825 NR Description: U1 small nuclear ribonucleoprotein 70 (U1-70k)
  misc_feature (1)..(96): Homolog of NCBI NO: 31239757 NR Description: ENSANGP00000016629 [Anopheles gambiae]
  misc_feature (1)..(108): Homolog of NCBI NO: 26333021 NR Description: unnamed protein product [Mus musculus]
  misc_feature (1)..(189): Homolog of NCBI NO: 21624627 NR Description: RIKEN cDNA 6330548G22 [Mus musculus]
  misc_feature (1)..(188): Homolog of NCBI NO: 5902144 NR Description: U1-snRNP binding protein homolog isoform a; hm-1
  misc_feature (1)..(188): Homolog of NCBI NO: 31077198 NR Description: U1-snRNP binding protein homolog isoform b; hm-1
  misc_feature (1)..(189): Homolog of NCBI NO: 34872304 NR Description: similar to RIKEN cDNA 6330548G22 [Rattus
  misc_feature (35)..(261): Homolog of NCBI NO: 26451879 NR Description: putative U1 small nuclear ribonucleoprotein 70
  misc_feature (1)..(213): Homolog of NCBI NO: 25408861 NR Description: hypothetical protein At2g43370 [imported] -
  misc_feature (1)..(261): Homolog of NCBI NO: 30689357 NR Description: U1 small nuclear ribonucleoprotein 70 kDa,
MSKYGRVKNLRLVRDIVTGASRGYAFVEYETEREMRRAYMDAHHLIVDDSEIIVDYNRQQLMPGWIPRRLGGGLSGKKESGQLRFGGREKPFRAPLKPIPYEELKKLGIPPPPEGRYMSRFQVPSPPRSERSLSDREEDSHSHRRGSNDRNRNKTEDGLRSSVDIEEGHYRSSSHRDNHSRGRSSMERSGRYHDRSSSEKEHRHGSSTDKDKHSQKRKESDRSSLEKERRHRSSTDKDKHSRKRKERDERSQRREKYSHHSPHKD

SEQ ID NO: 52951 - DNA, 1229 bp, Glycine max
  misc_feature (1)..(1229): Ceres Seq. ID no. 15170578
tttccgtgattgatacaggactcattgacttgatagcatacacccgtagcaacatgagggcatggcattagttaagctagataaactataaaatgctgtcaactactgccgctgctcagcttccaagttgctgatagccgaattcccctcagaaacttctatggcctaagtcttcctcaaacccataattgcagcaaagggaaagaaagcaataacagggctagatacaattccaatttaaatcagaaccacagacatttattatttctacagttcttccctgacagtgacacagaagacagcaataatcaaaatccaagaaccagaaaccactgtcaacatcaagtagatgaacaaagagaattcaaggaaaataaagaggccaggttgcttttctcaaacatgtggtgggtagatgtgaaagcagcacttggccaaagaataaatttggagggcattctatgttcaactatggtgatcttaaaagacccgaaattggcaatgccccatatttctgttcctgatataaggtatgttgattgggctgagctgcgtagaaagggatttaagggtgttgtctttgacaaggataatactattacagcaccttactctttgaagtcctggcctccacttgagtcttcattggagtgttgtaaatcggagtttggtcatgatattgcagtatttagtaactctgcgggacttcatgaatatgaccatgacggttcaaaagctaggatgcttgaaggggcaattggaattaaagtcataagacatagggtgaagaagccagccggtacagctgaagaaattgaaaagcattttggttgtgaagcttcacaattaatcatggttggtgatcggccattcactgacattgtttatggcaatcggaatggatttgtgggtattttgacagagccattgagtcttgctgaggagccgtttattgttaagcaggtgaggaagctagaaacttcatttgtaagtttctggtctagaagagggttggatccacttagccagaagttattgtcagatccaaagccatgtgtcaaagagccatatcattgacaagactaatatccaaacactgcacaattttttggccatcagaagtactgctttttagtaaagtaatgccctttagttaagtaatgcatacatgtcaatatattttttttaaaagcctatctagtttattttttaccacatgttaaatacat

SEQ ID NO: 52952 - protein, 224 aa, Glycine max
  peptide (1)..(224): Ceres Seq. ID no. 15170579
  misc_feature (31)..(204): Homolog of NCBI NO: 21402382 NR Description: Hydrolase, haloacid dehalogenase-like hydrolase
  misc_feature (31)..(204): Homolog of NCBI NO: 30022414 NR Description: putative lipase [Bacillus cereus ATCC 14579]
  misc_feature (31)..(203): Homolog of NCBI NO: 16079622 NR Description: similar to hypothetical proteins [Bacillus
  misc_feature (14)..(171): Homolog of NCBI NO: 32412768 NR Description: hypothetical protein ( (AL353822) conserved
  misc_feature (14)..(171): Homolog of NCBI NO: 11282546 NR Description: hypothetical protein 15E6.20 [imported] -
  misc_feature (14)..(198): Homolog of NCBI NO: 6321892 NR Description: Hypothetical ORF; Yhr100cp [Saccharomyces
  misc_feature (2)..(120): Homolog of NCBI NO: 34908890 NR Description: P0699H05.17 [Oryza sativa (japonica
  misc_feature (108)..(224): Homolog of NCBI NO: 34908890 NR Description: P0699H05.17 [Oryza sativa (japonica
  misc_feature (1)..(222): Homolog of NCBI NO: 28466953 NR Description: At3g58830 [Arabidopsis thaliana]
  misc_feature (1)..(222): Homolog of NCBI NO: 15231583 NR Description: expressed protein [Arabidopsis thaliana]
MWWVDVKAALGQRINLEGILCSTMVILKDPKLAMPHISVPDIRYVDWAELRRKGFKGVVFDKDNTITAPYSLKSWPPLESSLECCKSEFGHDIAVFSNSAGLHEYDHDGSKARMLEGAIGIKVIRHRVKKPAGTAEEIEKHFGCEASQLIMVGDRPFTDIVYGNRNGFVGILTEPLSLAEEPFIVKQVRKLETSFVSFWSRRGLDPLSQKLLSDPKPCVKEPYH

SEQ ID NO: 52953 - protein, 201 aa, Glycine max
  peptide (1)..(201): Ceres Seq. ID no. 15170580
  misc_feature (8)..(181): Homolog of NCBI NO: 21402382 NR Description: Hydrolase, haloacid dehalogenase-like hydrolase
  misc_feature (8)..(181): Homolog of NCBI NO: 30022414 NR Description: putative lipase [Bacillus cereus ATCC 14579]
  misc_feature (8)..(180): Homolog of NCBI NO: 16079622 NR Description: similar to hypothetical proteins [Bacillus
  misc_feature (1)..(148): Homolog of NCBI NO: 32412768 NR Description: hypothetical protein ( (AL353822) conserved
  misc_feature (1)..(148): Homolog of NCBI NO: 11282546 NR Description: hypothetical protein 15E6.20 [imported] -
  misc_feature (1)..(175): Homolog of NCBI NO: 6321892 NR Description: Hypothetical ORF; Yhr100cp [Saccharomyces
  misc_feature (1)..(97): Homolog of NCBI NO: 34908890 NR Description: P0699H05.17 [Oryza sativa (japonica
  misc_feature (85)..(201): Homolog of NCBI NO: 34908890 NR Description: P0699H05.17 [Oryza sativa (japonica
  misc_feature (1)..(199): Homolog of NCBI NO: 28466953 NR Description: At3g58830 [Arabidopsis thaliana]
  misc_feature (1)..(199): Homolog of NCBI NO: 15231583 NR Description: expressed protein [Arabidopsis thaliana]
MVILKDPKLAMPHISVPDIRYVDWAELRRKGFKGVVFDKDNTITAPYSLKSWPPLESSLECCKSEFGHDIAVFSNSAGLHEYDHDGSKARMLEGAIGIKVIRHRVKKPAGTAEEIEKHFGCEASQLIMVGDRPFTDIVYGNRNGFVGILTEPLSLAEEPFIVKQVRKLETSFVSFWSRRGLDPLSQKLLSDPKPCVKEPYH

SEQ ID NO: 52954 - protein, 191 aa, Glycine max
  peptide (1)..(191): Ceres Seq. ID no. 15170581
  misc_feature (1)..(171): Homolog of NCBI NO: 21402382 NR Description: Hydrolase, haloacid dehalogenase-like hydrolase
  misc_feature (1)..(171): Homolog of NCBI NO: 30022414 NR Description: putative lipase [Bacillus cereus ATCC 14579]
  misc_feature (1)..(170): Homolog of NCBI NO: 16079622 NR Description: similar to hypothetical proteins [Bacillus
  misc_feature (1)..(138): Homolog of NCBI NO: 32412768 NR Description: hypothetical protein ( (AL353822) conserved
  misc_feature (1)..(138): Homolog of NCBI NO: 11282546 NR Description: hypothetical protein 15E6.20 [imported] -
  misc_feature (1)..(165): Homolog of NCBI NO: 6321892 NR Description: Hypothetical ORF; Yhr100cp [Saccharomyces
  misc_feature (1)..(87): Homolog of NCBI NO: 34908890 NR Description: P0699H05.17 [Oryza sativa (japonica
  misc_feature (75)..(191): Homolog of NCBI NO: 34908890 NR Description: P0699H05.17 [Oryza sativa (japonica
  misc_feature (1)..(189): Homolog of NCBI NO: 28466953 NR Description: At3g58830 [Arabidopsis thaliana]
  misc_feature (1)..(189): Homolog of NCBI NO: 15231583 NR Description: expressed protein [Arabidopsis thaliana]
MPHISVPDIRYVDWAELRRKGFKGVVFDKDNTITAPYSLKSWPPLESSLECCKSEFGHDIAVFSNSAGLHEYDHDGSKARMLEGAIGIKVIRHRVKKPAGTAEEIEKHFGCEASQLIMVGDRPFTDIVYGNRNGFVGILTEPLSLAEEPFIVKQVRKLETSFVSFWSRRGLDPLSQKLLSDPKPCVKEPYH

SEQ ID NO: 52955 - DNA, 927 bp, Glycine max
  misc_feature (1)..(927): Ceres Seq. ID no. 14304626
ggatcatcacttcacttcactaatacatcatggcagacgagacccagaacaagtatgagagctctgaggttgaggtccaggatcgtggtgtttttgactttctcggtaagaaaaaggatgaagaagacaagcctcatcctcaggaggaggtcatcgccaccgagtttcaaaaagtcactgtctcagaccaaggagagaacaagcacagcctcttagaaaagcttcaccgatctgacagcagctctagctcttcaagtgaggaggaaggagaagatggagagaaaaggaagaagaagaagaaggaaaagaaagggctgaaagagaagatcgaggagaaaatagagggtgatcatcatcatcacaaggatgaggacacaagtgtccctgttgagaaagttgaggttgttgaaacagcacatgctgaggaaaagaaggggttcctcgacaagattaaggagaagctaccagggcacaagaagacagaggaggccacagctactactcctcctccaccaccacctgttgcatcattggagcatggtgaaggtgctcatcatgaaggagaggccaaggagaagaaaggtatattagaaaagataaaagagaagcttcctggttatcactccaagacagaggaggaaaaggaaaaggaaaaggagagtggtgctcattgatatttaagattgagacaaggcttttttgttggttggagatgcatgattgtggtgtgctttgttttcatttcatcatatgacagccttgtgggtttctttggtgtttcttgatgcatacttaatttactttattattgtgtatttatctcttccatttacaaaaaaaaaagtttgtgtaggtttccttctttgaagtaaaaagaaattaaatatgtactgaaaatggaataatagtgtgttttatttgtgtttg

SEQ ID NO: 52956 - protein, 214 aa, Glycine max
  peptide (1)..(214): Ceres Seq. ID no. 14304627
  misc_feature (29)..(208): Pfam Name: Dehydrin Pfam Description: Dehydrin
  misc_feature (31)..(211): Homolog of NCBI NO: 975646 NR Description: dehydrin [Arabidopsis thaliana]
  misc_feature (31)..(211): Homolog of NCBI NO: 99681 NR Description: cold-regulated protein cor47 - Arabidopsis
  misc_feature (14)..(172): Homolog of NCBI NO: 31745704 NR Description: dehydrin [Citrus sinensis]
  misc_feature (10)..(214): Homolog of NCBI NO: 34098764 NR Description: Phosphoprotein ECPP44
  misc_feature (8)..(214): Homolog of NCBI NO: 13992713 NR Description: bdn1 [Boea crassifolia]
  misc_feature (14)..(214): Homolog of NCBI NO: 26418686 NR Description: dehydrin [Citrus x paradisi]
  misc_feature (4)..(213): Homolog of NCBI NO: 29120043 NR Description: dhn1 [Populus euramericana]
  misc_feature (1)..(210): Homolog of NCBI NO: 31335281 NR Description: 25 kDa protein dehydrin [Solanum sogarandinum]
  misc_feature (1)..(209): Homolog of NCBI NO: 7489228 NR Description: dehydrin homolog CI7 - potato
  misc_feature (1)..(208): Homolog of NCBI NO: 7488762 NR Description: dehydrin - kidney bean
MADETQNKYESSEVEVQDRGVFDFLGKKKDEEDKPHPQEEVIATEFQKVTVSDQGENKHSLLEKLHRSDSSSSSSSEEEGEDGEKRKKKKKEKKGLKEKIEEKIEGDHHHHKDEDTSVPVEKVEVVETAHAEEKKGFLDKIKEKLPGHKKTEEATATTPPPPPPVASLEHGEGAHHEGEAKEKKGILEKIKEKLPGYHSKTEEEKEKEKESGAH

SEQ ID NO: 52957 - DNA, 1518 bp, Glycine max
  misc_feature (1)..(1518): Ceres Seq. ID no. 14305042
aaaactctctctctctctctctacgctaattaaggttcattgggcattggcggattctatttccttttctcaaaacccaatttgcttcttcttcatggaagcactctccttcatcatccccaaagactcttgttctcttctccttcgcactccttcttcatattcctcttcgtctgtcagaactccgccgccgccacttgctttcttcaaaaccacccaacactctcactcgcctcaccttctccgtcttcgcgtttttgccctccctaaccccgacgccgatgaacccaccaacgacttcgctttagcgtctcatcctcaggaaaatttaagccattctgagactgagagttccgaagatgatcaagatgctccaccacaaatggacatgtcgtggtcaacgatcacagccccagctggaagtggatccggtggtggcaccagggctggacttttcagaacacccatttctggtggcgtgcagagtgccacctcagctcacggtttacctagaccggctttagcagtacggaatttgatggagcaggcaagatttgctcatttgtgcactgtaatgtctcgtatgcaccaccgacgagaaggatatccatttggttctctggttgattttgcaccagactcaacgggtcatccaatattttcattttctcctcttgcaattcacacaaggaatttgttggctgacccaagatgcacactggttgtccagatacctggatggagtggcttgtccaatgcaagggtaactctttttggggatgtctatccacttccagaagatcaacaggaatgggctcataagcagtatattgcaaaacatcaacagggtccttctcaacagtggggcaacttctactattttaggatgcagaatataagtgacatatatttcattggaggctttggtactgttgcttgggtggatgtaaaggaatatgaaacccttcaacctgataagattgcagttgatggtggtgaacagtatttaaaggaactcaatgctatcttctcaaaacccctaaagaaacttctatctagtgagactgaggtagatgacgctgcactcatatctatagacagcaaaggaactgatattagggtccgtcaaggtgctcagttcaacattcagaggatatcatttgatgaagggcagagtgtagaaacattggaagaagctaaagctgctcttcggaaattaatacacaaaggaaaagtgtacaatttgcagaaataagatgctggatgggatgtcctcttctccttttggctatagagtagacaatatatggaaccatgcgactttctaatgggacctttttagaatggttaattttatacttttttgcctggttgacatgcaccagaaagtgtattatattcatgcatttgaaagcatattttggtaagagtgggctttattgtgggctataccaccatagtcaaactagaaataatatatcagaactcatgaaataatagtatgattttttcccctcc

SEQ ID NO: 52958 - protein, 417 aa, Glycine max
  peptide (1)..(417): Ceres Seq. ID no. 14305043
  misc_feature (131)..(411): Homolog of NCBI NO: 34393557 NR Description: putative root border cell-specific protein
  misc_feature (83)..(182): Homolog of NCBI NO: 12321683 NR Description: unknown protein, 3' partial [Arabidopsis thaliana]
  misc_feature (188)..(337): Homolog of NCBI NO: 6006853 NR Description: unknown protein [Arabidopsis thaliana]
  misc_feature (188)..(387): Homolog of NCBI NO: 30678976 NR Description: auxin-regulated protein [Arabidopsis thaliana]
  misc_feature (188)..(411): Homolog of NCBI NO: 18396698 NR Description: auxin-regulated protein [Arabidopsis thaliana]
  misc_feature (300)..(417): Homolog of NCBI NO: 11994274 NR Description: gb|AAF00629.1~gene_id:MSA6.18~similar to unknown
  misc_feature (139)..(407): Homolog of NCBI NO: 34905136 NR Description: P0700D12.12 [Oryza sativa (japonica
  misc_feature (32)..(417): Homolog of NCBI NO: 15232479 NR Description: expressed protein [Arabidopsis thaliana]
  misc_feature (83)..(417): Homolog of NCBI NO: 18377805 NR Description: unknown protein [Arabidopsis thaliana]
  misc_feature (83)..(417): Homolog of NCBI NO: 15217955 NR Description: expressed protein [Arabidopsis thaliana]
KLSLSLSTLIKVHWALADSISFSQNPICFFFMEALSFIIPKDSCSLLLRTPSSYSSSSVRTPPPPLAFFKTTQHSHSPHLLRLRVFALPNPDADEPTNDFALASHPQENLSHSETESSEDDQDAPPQMDMSWSTITAPAGSGSGGGTRAGLFRTPISGGVQSATSAHGLPRPALAVRNLMEQARFAHLCTVMSRMHHRREGYPFGSLVDFAPDSTGHPIFSFSPLAIHTRNLLADPRCTLVVQIPGWSGLSNARVTLFGDVYPLPEDQQEWAHKQYIAKHQQGPSQQWGNFYYFRMQNISDIYFIGGFGTVAWVDVKEYETLQPDKIAVDGGEQYLKELNAIFSKPLKKLLSSETEVDDAALISIDSKGTDIRVRQGAQFNIQRISFDEGQSVETLEEAKAALRKLIHKGKVYNLQK

SEQ ID NO: 52959 - protein, 386 aa, Glycine max
  peptide (1)..(386): Ceres Seq. ID no. 14305044
  misc_feature (100)..(380): Homolog of NCBI NO: 34393557 NR Description: putative root border cell-specific protein
  misc_feature (52)..(151): Homolog of NCBI NO: 12321683 NR Description: unknown protein, 3' partial [Arabidopsis thaliana]
  misc_feature (157)..(306): Homolog of NCBI NO: 6006853 NR Description: unknown protein [Arabidopsis thaliana]
  misc_feature (157)..(356): Homolog of NCBI NO: 30678976 NR Description: auxin-regulated protein [Arabidopsis thaliana]
  misc_feature (157)..(380): Homolog of NCBI NO: 18396698 NR Description: auxin-regulated protein [Arabidopsis thaliana]
  misc_feature (269)..(386): Homolog of NCBI NO: 11994274 NR Description: gb|AAF00629.1~gene_id:MSA6.18~similar to unknown
  misc_feature (108)..(376): Homolog of NCBI NO: 34905136 NR Description: P0700D12.12 [Oryza sativa (japonica
  misc_feature (1)..(386): Homolog of NCBI NO: 15232479 NR Description: expressed protein [Arabidopsis thaliana]
  misc_feature (52)..(386): Homolog of NCBI NO: 18377805 NR Description: unknown protein [Arabidopsis thaliana]
  misc_feature (52)..(386): Homolog of NCBI NO: 15217955 NR Description: expressed protein [Arabidopsis thaliana]
MEALSFIIPKDSCSLLLRTPSSYSSSSVRTPPPPLAFFKTTQHSHSPHLLRLRVFALPNPDADEPTNDFALASHPQENLSHSETESSEDDQDAPPQMDMSWSTITAPAGSGSGGGTRAGLFRTPISGGVQSATSAHGLPRPALAVRNLMEQARFAHLCTVMSRMHHRREGYPFGSLVDFAPDSTGHPIFSFSPLAIHTRNLLADPRCTLVVQIPGWSGLSNARVTLFGDVYPLPEDQQEWAHKQYIAKHQQGPSQQWGNFYYFRMQNISDIYFIGGFGTVAWVDVKEYETLQPDKIAVDGGEQYLKELNAIFSKPLKKLLSSETEVDDAALISIDSKGTDIRVRQGAQFNIQRISFDEGQSVETLEEAKAALRKLIHKGKVYNLQK

SEQ ID NO: 52960 - protein, 290 aa, Glycine max
  peptide (1)..(290): Ceres Seq. ID no. 14305045
  misc_feature (4)..(284): Homolog of NCBI NO: 34393557 NR Description: putative root border cell-specific protein
  misc_feature (1)..(55): Homolog of NCBI NO: 12321683 NR Description: unknown protein, 3' partial [Arabidopsis thaliana]
  misc_feature (61)..(210): Homolog of NCBI NO: 6006853 NR Description: unknown protein [Arabidopsis thaliana]
  misc_feature (61)..(260): Homolog of NCBI NO: 30678976 NR Description: auxin-regulated protein [Arabidopsis thaliana]
  misc_feature (61)..(284): Homolog of NCBI NO: 18396698 NR Description: auxin-regulated protein [Arabidopsis thaliana]
  misc_feature (173)..(290): Homolog of NCBI NO: 11994274 NR Description: gb|AAF00629.1~gene_id:MSA6.18~similar to unknown
  misc_feature (12)..(280): Homolog of NCBI NO: 34905136 NR Description: P0700D12.12 [Oryza sativa (japonica
  misc_feature (1)..(290): Homolog of NCBI NO: 15232479 NR Description: expressed protein [Arabidopsis thaliana]
  misc_feature (1)..(290): Homolog of NCBI NO: 18377805 NR Description: unknown protein [Arabidopsis thaliana]
  misc_feature (1)..(290): Homolog of NCBI NO: 15217955 NR Description: expressed protein [Arabidopsis thaliana]
MDMSWSTITAPAGSGSGGGTRAGLFRTPISGGVQSATSAHGLPRPALAVRNLMEQARFAHLCTVMSRMHHRREGYPFGSLVDFAPDSTGHPIFSFSPLAIHTRNLLADPRCTLVVQIPGWSGLSNARVTLFGDVYPLPEDQQEWAHKQYIAKHQQGPSQQWGNFYYFRMQNISDIYFIGGFGTVAWVDVKEYETLQPDKIAVDGGEQYLKELNAIFSKPLKKLLSSETEVDDAALISIDSKGTDIRVRQGAQFNIQRISFDEGQSVETLEEAKAALRKLIHKGKVYNLQK

SEQ ID NO: 52961 - DNA, 1212 bp, Glycine max
  misc_feature (1)..(1212): Ceres Seq. ID no. 14304593
ttgttctttcacaaatggtagccccaaaagtgaggtcatggagcctgagattaagaacaaagatgtctttaagaaaagaaagaccatgtcaacgtgcacagaacaagtgaaggtgtgcttgggaacggcgcatgaaggatctctggatgatggctatagttggagaaaatatggacagaaggatattctcggagctaagtttccaagaggatattacagatgcacatatagaaatgtacaaggatgtctggccacaaagcaggtgcaaaagtcagatgaagacccaatgatatgtgaaataacctacaaaggaagacacacatgcacccaagcaagtcacttaaacaaaacagtgatacccccatcaaagacaaaggtgaacttgttgggagaaaataagcaccaaacccatcaaattaagaatcaaccacggcaagagaaaatagaacaacaaccaccagagacatttttcacatttggatcatcatcaggtcttgaagttaaaatagaggacatcgaccacaaggagggcatattcccatcattttgcttttcttctccatcaatagtagggtcagaaaatggggacgacaacaacagcagcatattctcatacaccatgattgagaacaacttaatggaaagcttctctcctgccttcatatctccaacaacttcagatatagaatcaaacactttctgccactgggggagcactggactaggccaaagtgtgcaaagctcagggtctgatatcactgatatagtttcagcaccaacttcagtcaccaattcaccaataatggaccttgatttctttttcgataagatcgatttcgacacagatttccctttgagcaccatggaactttgcacttaataaattgtccccacttctaagtttacagcatatgtgatttctatgcggattaactgtgagttttgtagatcctgactagcaccataaccgagggaaggaagtctataataatcaccatagatcatgtccataaatgaagacaatgaaaaacttccctcttgtgctaattaagagagttttcatgtacctaggctgcaatgtgaaaataatttgtaggttgtagcttaatttggtgcatgtttggtttgcaatggaaattgttgtaatgcgcgttccaatgtagatcttatggataaaagtaaaatgaaatcaaaagagttctaatcttttag

SEQ ID NO: 52962 - protein, 292 aa, Glycine max
  peptide (1)..(292): Ceres Seq. ID no. 14304594
  misc_feature (48)..(110): Pfam Name: WRKY DNA -binding domain Pfam Description: WRKY DNA -binding domain
  misc_feature (25)..(110): Homolog of NCBI NO: 34898262 NR Description: WRKY family transcription factor-like protein
  misc_feature (24)..(135): Homolog of NCBI NO: 34911952 NR Description: P0694A04.6 [Oryza sativa (japonica
  misc_feature (24)..(108): Homolog of NCBI NO: 40253471 NR Description: putative transcription factor WRKY5
  misc_feature (5)..(221): Homolog of NCBI NO: 15236622 NR Description: WRKY family transcription factor [Arabidopsis
  misc_feature (6)..(125): Homolog of NCBI NO: 18420751 NR Description: WRKY family transcription factor [Arabidopsis
  misc_feature (19)..(195): Homolog of NCBI NO: 15225975 NR Description: WRKY family transcription factor [Arabidopsis
  misc_feature (217)..(284): Homolog of NCBI NO: 30681651 NR Description: WRKY family transcription factor [Arabidopsis
  misc_feature (217)..(284): Homolog of NCBI NO: 15237039 NR Description: WRKY family transcription factor [Arabidopsis
  misc_feature (6)..(124): Homolog of NCBI NO: 30681651 NR Description: WRKY family transcription factor [Arabidopsis
  misc_feature (6)..(124): Homolog of NCBI NO: 15237039 NR Description: WRKY family transcription factor [Arabidopsis
CSFTNGSPKSEVMEPEIKNKDVFKKRKTMSTCTEQVKVCLGTAHEGSLDDGYSWRKYGQKDILGAKFPRGYYRCTYRNVQGCLATKQVQKSDEDPMICEITYKGRHTCTQASHLNKTVIPPSKTKVNLLGENKHQTHQIKNQPRQEKIEQQPPETFFTFGSSSGLEVKIEDIDHKEGIFPSFCFSSPSIVGSENGDDNNSSIFSYTMIENNLMESFSPAFISPTTSDIESNTFCHWGSTGLGQSVQSSGSDITDIVSAPTSVTNSPIMDLDFFFDKIDFDTDFPLSTMELCT

SEQ ID NO: 52963 - protein, 280 aa, Glycine max
  peptide (1)..(280): Ceres Seq. ID no. 14304595
  misc_feature (36)..(98): Pfam Name: WRKY DNA -binding domain Pfam Description: WRKY DNA -binding domain
  misc_feature (13)..(98): Homolog of NCBI NO: 34898262 NR Description: WRKY family transcription factor-like protein
  misc_feature (12)..(123): Homolog of NCBI NO: 34911952 NR Description: P0694A04.6 [Oryza sativa (japonica
  misc_feature (12)..(96): Homolog of NCBI NO: 40253471 NR Description: putative transcription factor WRKY5
  misc_feature (1)..(209): Homolog of NCBI NO: 15236622 NR Description: WRKY family transcription factor [Arabidopsis
  misc_feature (1)..(113): Homolog of NCBI NO: 18420751 NR Description: WRKY family transcription factor [Arabidopsis
  misc_feature (7)..(183): Homolog of NCBI NO: 15225975 NR Description: WRKY family transcription factor [Arabidopsis
  misc_feature (205)..(272): Homolog of NCBI NO: 30681651 NR Description: WRKY family transcription factor [Arabidopsis
  misc_feature (205)..(272): Homolog of NCBI NO: 15237039 NR Description: WRKY family transcription factor [Arabidopsis
  misc_feature (1)..(112): Homolog of NCBI NO: 30681651 NR Description: WRKY family transcription factor [Arabidopsis
  misc_feature (1)..(112): Homolog of NCBI NO: 15237039 NR Description: WRKY family transcription factor [Arabidopsis
MEPEIKNKDVFKKRKTMSTCTEQVKVCLGTAHEGSLDDGYSWRKYGQKDILGAKFPRGYYRCTYRNVQGCLATKQVQKSDEDPMICEITYKGRHTCTQASHLNKTVIPPSKTKVNLLGENKHQTHQIKNQPRQEKIEQQPPETFFTFGSSSGLEVKIEDIDHKEGIFPSFCFSSPSIVGSENGDDNNSSIFSYTMIENNLMESFSPAFISPTTSDIESNTFCHWGSTGLGQSVQSSGSDITDIVSAPTSVTNSPIMDLDFFFDKIDFDTDFPLSTMELCT

SEQ ID NO: 52964 - protein, 264 aa, Glycine max
  peptide (1)..(264): Ceres Seq. ID no. 14304596
  misc_feature (20)..(82): Pfam Name: WRKY DNA -binding domain Pfam Description: WRKY DNA -binding domain
  misc_feature (1)..(82): Homolog of NCBI NO: 34898262 NR Description: WRKY family transcription factor-like protein
  misc_feature (1)..(107): Homolog of NCBI NO: 34911952 NR Description: P0694A04.6 [Oryza sativa (japonica
  misc_feature (1)..(80): Homolog of NCBI NO: 40253471 NR Description: putative transcription factor WRKY5
  misc_feature (1)..(193): Homolog of NCBI NO: 15236622 NR Description: WRKY family transcription factor [Arabidopsis
  misc_feature (1)..(97): Homolog of NCBI NO: 18420751 NR Description: WRKY family transcription factor [Arabidopsis
  misc_feature (1)..(167): Homolog of NCBI NO: 15225975 NR Description: WRKY family transcription factor [Arabidopsis
  misc_feature (189)..(256): Homolog of NCBI NO: 30681651 NR Description: WRKY family transcription factor [Arabidopsis
  misc_feature (189)..(256): Homolog of NCBI NO: 15237039 NR Description: WRKY family transcription factor [Arabidopsis
  misc_feature (1)..(96): Homolog of NCBI NO: 30681651 NR Description: WRKY family transcription factor [Arabidopsis
  misc_feature (1)..(96): Homolog of NCBI NO: 15237039 NR Description: WRKY family transcription factor [Arabidopsis
MSTCTEQVKVCLGTAHEGSLDDGYSWRKYGQKDILGAKFPRGYYRCTYRNVQGCLATKQVQKSDEDPMICEITYKGRHTCTQASHLNKTVIPPSKTKVNLLGENKHQTHQIKNQPRQEKIEQQPPETFFTFGSSSGLEVKIEDIDHKEGIFPSFCFSSPSIVGSENGDDNNSSIFSYTMIENNLMESFSPAFISPTTSDIESNTFCHWGSTGLGQSVQSSGSDITDIVSAPTSVTNSPIMDLDFFFDKIDFDTDFPLSTMELCT

SEQ ID NO: 52965 - DNA, 1831 bp, Glycine max
  misc_feature (1)..(1831): Ceres Seq. ID no. 15174712
aattctggatgtgaatttattgataaatcttctagtacttctgggacatctcaatctcctttggtggaagaaaagtgtgggagcgtcagaaaggtccattccagtagcaataagagagactacattcttcgacagaagtcattccacatggaaaaaagttatcggacatatggacctaaagggtcttcaagaggaggaagactgaatggcttgaatggattaatcttggataaaaaacttaaatctgtatctgagtctactaccataaacttaaagagtgcatcgataaacataagtaaggcagtgggagttgatgtgacacaagacaatttaaatgctgatttttcatctaatgatggaccatcaacccccactgcatttagtctggattctactgttactgtttctcagtcaaccaatactttatcttcagtgcatgaagcaaatgctatacctgcagttggtagcccaaatgtattatcagctacagatactgatctttctctttctttgtcttcaaatagtaagtctcctacaacaactgtccgctgcaataatgaggcacctaatagtagttgtatggggatacctcatgacaggtccctggggaagtggataccccaagatagaaaggatgagatgattttgaagctagttccaagggttcgggagctgcaaaatcagcttcaagaatggacagagtgggcaaatcagaaggttatgcaggctgctcgtcggctgagtaaggatagggccgagcttaagacactgagacaagagaaagatgaagttgaacgtcttaaaaaagaaaaacaatctctagaggaaaacactatgaagaagatttctgagatggaaaatgccttgtctaaagcgagtgcacaggtagaaagaaccaatgctgatgtccggaaacttgaggtggaaaatgctgcactgaggaaagagatggaggttgctaagttacaagcggctgagtcagccacaagctgtcaagaggtctcaaggagggaaaagaagacccaaatgaagtttcaatcatgggagaagcagaaatccttgtttcaggaagagctaatgaatgaaaaacacaaattagctcagttgcagcaagaattagagcaagctaaagtgcaacagcagcaagtcgaggctaggtggcagcaagcagcaaaggcaaaagaagaactcctcctgcaggccagttctataagaaaagaaagggaacaaattgaggagtcagcaaaatcaaaggaggatatgatcaaactgaaagcagaggaaaatctacacaggtacagagatgacatccagaaacttgaaaaagaaattgcacaactgagacagaagaccgactcttctaaaattgctgcactgagaaggggaattgatggaaactatgtcagcagctttatggacgtgaaaagcatggctctgaaagaatcgcgggccacttttatctcagaaatggtttcaaatttaaatgactactctttgatagggggtgtaaagcgggaaagagaatgtgtcatgtgcctttctgaggagatgtctgttgtattcctcccatgtgctcatcaggttgtttgcacaacatgcaatgatctccacgagaaacaaggtatgcaagactgtccttcttgcaggagccccatccagaggcgtatttctgtccgatttgcccgtacataatttatttacttgaatgaaatgagtgttttgaataatgtctgttggaacactcttgcaaagaataatgcattcagaatcatgcatctcgagtttaaagatacattaagttgctttcaatgccaaggttgatttttatgtt

SEQ ID NO: 52966 - protein, 563 aa, Glycine max
  peptide (1)..(563): Ceres Seq. ID no. 15174713
  misc_feature (211)..(528): Pfam Name: Synaptonemal complex protein 1 (SCP-1) Pfam Description: Synaptonemal complex protein 1 (SCP-1)
  misc_feature (257)..(563): Homolog of NCBI NO: 25343843 NR Description: protein F15K9.3 [imported] - Arabidopsis thaliana
  misc_feature (211)..(562): Homolog of NCBI NO: 15236231 NR Description: conserved hypothetical protein [Arabidopsis
  misc_feature (130)..(384): Homolog of NCBI NO: 15236231 NR Description: conserved hypothetical protein [Arabidopsis
  misc_feature (209)..(549): Homolog of NCBI NO: 25518154 NR Description: F5D14.31 protein - Arabidopsis thaliana
  misc_feature (209)..(563): Homolog of NCBI NO: 15223228 NR Description: zinc finger (C3HC4-type RING finger) protein
  misc_feature (16)..(462): Homolog of NCBI NO: 15218791 NR Description: unknown protein; protein id: At1g03370.1
  misc_feature (16)..(462): Homolog of NCBI NO: 25343843 NR Description: protein F15K9.3 [imported] - Arabidopsis thaliana
  misc_feature (207)..(558): Homolog of NCBI NO: 30686389 NR Description: expressed protein [Arabidopsis thaliana]
  misc_feature (207)..(558): Homolog of NCBI NO: 25408371 NR Description: hypothetical protein At2g35330 [imported] -
  misc_feature (207)..(558): Homolog of NCBI NO: 22531056 NR Description: unknown protein [Arabidopsis thaliana]
NSGCEFIDKSSSTSGTSQSPLVEEKCGSVRKVHSSSNKRDYILRQKSFHMEKSYRTYGPKGSSRGGRLNGLNGLILDKKLKSVSESTTINLKSASINISKAVGVDVTQDNLNADFSSNDGPSTPTAFSLDSTVTVSQSTNTLSSVHEANAIPAVGSPNVLSATDTDLSLSLSSNSKSPTTTVRCNNEAPNSSCMGIPHDRSLGKWIPQDRKDEMILKLVPRVRELQNQLQEWTEWANQKVMQAARRLSKDRAELKTLRQEKDEVERLKKEKQSLEENTMKKISEMENALSKASAQVERTNADVRKLEVENAALRKEMEVAKLQAAESATSCQEVSRREKKTQMKFQSWEKQKSLFQEELMNEKHKLAQLQQELEQAKVQQQQVEARWQQAAKAKEELLLQASSIRKEREQIEESAKSKEDMIKLKAEENLHRYRDDIQKLEKEIAQLRQKTDSSKIAALRRGIDGNYVSSFMDVKSMALKESRATFISEMVSNLNDYSLIGGVKRERECVMCLSEEMSVVFLPCAHQVVCTTCNDLHEKQGMQDCPSCRSPIQRRISVRFART

SEQ ID NO: 52967 - protein, 514 aa, Glycine max
  peptide (1)..(514): Ceres Seq. ID no. 15174714
  misc_feature (162)..(479): Pfam Name: Synaptonemal complex protein 1 (SCP-1) Pfam Description: Synaptonemal complex protein 1 (SCP-1)
  misc_feature (208)..(514): Homolog of NCBI NO: 25343843 NR Description: protein F15K9.3 [imported] - Arabidopsis thaliana
  misc_feature (162)..(513): Homolog of NCBI NO: 15236231 NR Description: conserved hypothetical protein [Arabidopsis
  misc_feature (81)..(335): Homolog of NCBI NO: 15236231 NR Description: conserved hypothetical protein [Arabidopsis
  misc_feature (160)..(500): Homolog of NCBI NO: 25518154 NR Description: F5D14.31 protein - Arabidopsis thaliana
  misc_feature (160)..(514): Homolog of NCBI NO: 15223228 NR Description: zinc finger (C3HC4-type RING finger) protein
  misc_feature (1)..(413): Homolog of NCBI NO: 15218791 NR Description: unknown protein; protein id: At1g03370.1
  misc_feature (1)..(413): Homolog of NCBI NO: 25343843 NR Description: protein F15K9.3 [imported] - Arabidopsis thaliana
  misc_feature (158)..(509): Homolog of NCBI NO: 30686389 NR Description: expressed protein [Arabidopsis thaliana]
  misc_feature (158)..(509): Homolog of NCBI NO: 25408371 NR Description: hypothetical protein At2g35330 [imported] -
  misc_feature (158)..(509): Homolog of NCBI NO: 22531056 NR Description: unknown protein [Arabidopsis thaliana]
MEKSYRTYGPKGSSRGGRLNGLNGLILDKKLKSVSESTTINLKSASINISKAVGVDVTQDNLNADFSSNDGPSTPTAFSLDSTVTVSQSTNTLSSVHEANAIPAVGSPNVLSATDTDLSLSLSSNSKSPTTTVRCNNEAPNSSCMGIPHDRSLGKWIPQDRKDEMILKLVPRVRELQNQLQEWTEWANQKVMQAARRLSKDRAELKTLRQEKDEVERLKKEKQSLEENTMKKISEMENALSKASAQVERTNADVRKLEVENAALRKEMEVAKLQAAESATSCQEVSRREKKTQMKFQSWEKQKSLFQEELMNEKHKLAQLQQELEQAKVQQQQVEARWQQAAKAKEELLLQASSIRKEREQIEESAKSKEDMIKLKAEENLHRYRDDIQKLEKEIAQLRQKTDSSKIAALRRGIDGNYVSSFMDVKSMALKESRATFISEMVSNLNDYSLIGGVKRERECVMCLSEEMSVVFLPCAHQVVCTTCNDLHEKQGMQDCPSCRSPIQRRISVRFART

SEQ ID NO: 52968 - protein, 370 aa, Glycine max
  peptide (1)..(370): Ceres Seq. ID no. 15174715
  misc_feature (18)..(335): Pfam Name: Synaptonemal complex protein 1 (SCP-1) Pfam Description: Synaptonemal complex protein 1 (SCP-1)
  misc_feature (64)..(370): Homolog of NCBI NO: 25343843 NR Description: protein F15K9.3 [imported] - Arabidopsis thaliana
  misc_feature (18)..(369): Homolog of NCBI NO: 15236231 NR Description: conserved hypothetical protein [Arabidopsis
  misc_feature (1)..(191): Homolog of NCBI NO: 15236231 NR Description: conserved hypothetical protein [Arabidopsis
  misc_feature (16)..(356): Homolog of NCBI NO: 25518154 NR Description: F5D14.31 protein - Arabidopsis thaliana
  misc_feature (16)..(370): Homolog of NCBI NO: 15223228 NR Description: zinc finger (C3HC4-type RING finger) protein
  misc_feature (1)..(269): Homolog of NCBI NO: 15218791 NR Description: unknown protein; protein id: At1g03370.1
  misc_feature (1)..(269): Homolog of NCBI NO: 25343843 NR Description: protein F15K9.3 [imported] - Arabidopsis thaliana
  misc_feature (14)..(365): Homolog of NCBI NO: 25408371 NR Description: hypothetical protein At2g35330 [imported] -
  misc_feature (14)..(365): Homolog of NCBI NO: 30686389 NR Description: expressed protein [Arabidopsis thaliana]
  misc_feature (14)..(365): Homolog of NCBI NO: 22531056 NR Description: unknown protein [Arabidopsis thaliana]
MGIPHDRSLGKWIPQDRKDEMILKLVPRVRELQNQLQEWTEWANQKVMQAARRLSKDRAELKTLRQEKDEVERLKKEKQSLEENTMKKISEMENALSKASAQVERTNADVRKLEVENAALRKEMEVAKLQAAESATSCQEVSRREKKTQMKFQSWEKQKSLFQEELMNEKHKLAQLQQELEQAKVQQQQVEARWQQAAKAKEELLLQASSIRKEREQIEESAKSKEDMIKLKAEENLHRYRDDIQKLEKEIAQLRQKTDSSKIAALRRGIDGNYVSSFMDVKSMALKESRATFISEMVSNLNDYSLIGGVKRERECVMCLSEEMSVVFLPCAHQVVCTTCNDLHEKQGMQDCPSCRSPIQRRISVRFART

SEQ ID NO: 52969 - DNA, 1396 bp, Glycine max
  misc_feature (1)..(1396): Ceres Seq. ID no. 14304004
gaaatgagaattgcacaattgcaaagtgagaataattccttacttcaaaaagaggctggattggtggaaaaaactaatcagttgctgaatgaaaaggtagttttgagcctgaaagctgagagtttagagagaaaaataaatcttctggagaatgagttgagttcttttagtgagaaagaggttggacttgaaacaagaattgcacaattgcagagtgagaataattccttacttcaaaaagaggctacattggtggaaagaaccaatcaattgctgaatgaaaaggcagttttgagcctgaaaggggagagtttagaacaaaaaatatatcttctggaaagcgatttgaattctttagtcaagaaggagaattcaactaaagaaactatttcaaacctgaatggaaacattgctgtgctacaagcgcaggtggaagaattggaggagtccaggaataatctttttctagaaaaccagcaattgagggaaaaagtgtcgagtcttcagtcaacggtccaaaatcatgaaaacagtaacacttcttcctgctcatgggatgcatctgtaaaggatcttgcttctgaaaacgaggacttgaagtctgaaattgaagcagcctttacgttggtggagaaattgatggctgaaaatgcagaacttgttgagaaggtcaccgagttatgtgttgagctggatcaccgaagtgcagaagtcggacattctggagtcactgaatccaatgggatgactgaatttgttaaacctactggtgttgccattcctctaccagaatctgctgagtatgcgtctgtatcatcccccaagttgaattcattggaagagacttcagtgaaggataatggtaactctaatgatgctaagcatgttgttggggtaacgtcaaactcgtcgttggtatcggctgatgacgctggagaaatcgtgcaaattccattggatgataatgaaatacaagatatagagttgcaggatgctaagaatgtggaaaatgatgctgatgctgtgccaatcacagatgctccgcttatcggtgctccatttcgtttgatatcatttgttgctaattttgttagtggtgctgacttggttaaccaaagctcttcaaacactgctcgttgacttggttgaccaaagctctgttttttttggctggcagtcttgaacatacaataacctcacttacattaggcagaataccaatataggttggcctaatttgggccattttaatgtttgtatgttaattctttgaacacggaaatattgtactggggaaaagcatatagttttatgtgttcttacttcatattgctttcacttttggaaattatacctttaaaaaatggcatcatgaatagacatgcattaattggtg

SEQ ID NO: 52970 - protein, 379 aa, Glycine max
  peptide (1)..(379): Ceres Seq. ID no. 14304005
  misc_feature (1)..(292): Pfam Name: Myosin tail Pfam Description: Myosin tail
  misc_feature (1)..(203): Homolog of NCBI NO: 15644689 NR Description: hypothetical protein [Helicobacter pylori 26695]
  misc_feature (5)..(374): Homolog of NCBI NO: 39582440 NR Description: Hypothetical protein CBG22662 [Caenorhabditis
  misc_feature (6)..(204): Homolog of NCBI NO: 12718845 NR Description: enterophilin-2L [Cavia porcellus]
  misc_feature (3)..(235): Homolog of NCBI NO: 34870895 NR Description: myosin heavy polypeptide 13 [Rattus norvegicus]
  misc_feature (3)..(292): Homolog of NCBI NO: 12003423 NR Description: skeletal muscle myosin heavy chain MyHC-EO/IIL
  misc_feature (6)..(349): Homolog of NCBI NO: 34860755 NR Description: similar to hypothetical protein [Rattus
  misc_feature (3)..(292): Homolog of NCBI NO: 11321579 NR Description: myosin, heavy polypeptide 13, skeletal muscle
  misc_feature (1)..(195): Homolog of NCBI NO: 15224904 NR Description: hypothetical protein [Arabidopsis thaliana]
  misc_feature (73)..(369): Homolog of NCBI NO: 15224904 NR Description: hypothetical protein [Arabidopsis thaliana]
  misc_feature (42)..(321): Homolog of NCBI NO: 15224904 NR Description: hypothetical protein [Arabidopsis thaliana]
EMRIAQLQSENNSLLQKEAGLVEKTNQLLNEKVVLSLKAESLERKINLLENELSSFSEKEVGLETRIAQLQSENNSLLQKEATLVERTNQLLNEKAVLSLKGESLEQKIYLLESDLNSLVKKENSTKETISNLNGNIAVLQAQVEELEESRNNLFLENQQLREKVSSLQSTVQNHENSNTSSCSWDASVKDLASENEDLKSEIEAAFTLVEKLMAENAELVEKVTELCVELDHRSAEVGHSGVTESNGMTEFVKPTGVAIPLPESAEYASVSSPKLNSLEETSVKDNGNSNDAKHVVGVTSNSSLVSADDAGEIVQIPLDDNEIQDIELQDAKNVENDADAVPITDAPLIGAPFRLISFVANFVSGADLVNQSSSNTAR

SEQ ID NO: 52971 - protein, 378 aa, Glycine max
  peptide (1)..(378): Ceres Seq. ID no. 14304006
  misc_feature (1)..(291): Pfam Name: Myosin tail Pfam Description: Myosin tail
  misc_feature (1)..(202): Homolog of NCBI NO: 15644689 NR Description: hypothetical protein [Helicobacter pylori 26695]
  misc_feature (4)..(373): Homolog of NCBI NO: 39582440 NR Description: Hypothetical protein CBG22662 [Caenorhabditis
  misc_feature (5)..(203): Homolog of NCBI NO: 12718845 NR Description: enterophilin-2L [Cavia porcellus]
  misc_feature (2)..(234): Homolog of NCBI NO: 34870895 NR Description: myosin heavy polypeptide 13 [Rattus norvegicus]
  misc_feature (2)..(291): Homolog of NCBI NO: 12003423 NR Description: skeletal muscle myosin heavy chain MyHC-EO/IIL
  misc_feature (5)..(348): Homolog of NCBI NO: 34860755 NR Description: similar to hypothetical protein [Rattus
  misc_feature (2)..(291): Homolog of NCBI NO: 11321579 NR Description: myosin, heavy polypeptide 13, skeletal muscle
  misc_feature (1)..(194): Homolog of NCBI NO: 15224904 NR Description: hypothetical protein [Arabidopsis thaliana]
  misc_feature (72)..(368): Homolog of NCBI NO: 15224904 NR Description: hypothetical protein [Arabidopsis thaliana]
  misc_feature (41)..(320): Homolog of NCBI NO: 15224904 NR Description: hypothetical protein [Arabidopsis thaliana]
MRIAQLQSENNSLLQKEAGLVEKTNQLLNEKVVLSLKAESLERKINLLENELSSFSEKEVGLETRIAQLQSENNSLLQKEATLVERTNQLLNEKAVLSLKGESLEQKIYLLESDLNSLVKKENSTKETISNLNGNIAVLQAQVEELEESRNNLFLENQQLREKVSSLQSTVQNHENSNTSSCSWDASVKDLASENEDLKSEIEAAFTLVEKLMAENAELVEKVTELCVELDHRSAEVGHSGVTESNGMTEFVKPTGVAIPLPESAEYASVSSPKLNSLEETSVKDNGNSNDAKHVVGVTSNSSLVSADDAGEIVQIPLDDNEIQDIELQDAKNVENDADAVPITDAPLIGAPFRLISFVANFVSGADLVNQSSSNTAR

SEQ ID NO: 52972 - DNA, 1462 bp, Glycine max
  misc_feature (1)..(1462): Ceres Seq. ID no. 14315614
aacacaaacaccacggccgccgccgccaccgagattatcacaacgcgccgccgccaccgagattatcacaacgcgccgccgcagcattcacctccccggagatccaccctttgcatggcagtgagctttctggcgcgcgatgtatcggacctctgccttgggaagccaccgctgaggtcgctctccgctgccgccaccgtcgccgacgccttagacgcgctcaagagctccgacggcgagatccacgtcagcgtgtggagcttcgagaatgaagtgggtcgatgcgtagggaaactgtgcatggtcgatgttatttgctacctttgcagagaggacaatctcttgtctccttctaaatctctcaaagaaccactttcctcaattctccctaaggatcataatctcgttgtgcatcttcaaccttcttctagcttgttggaagctattgatcttatcctacaaggtgcacagaattttgtggtgccaatattgccaacaaagaggagtggagtttcaagaaggaaacagcagcatcagaaggcatcatcaacaatcaacagccatagtagttgtgaattcagttggttgactcaagaggatgtgattaggttccttcttggttccattggggtcttcactccacttcctgctttgtctattgactctcttggcatcgttagctctgatgtgcttgccattgactactactcccctgcatcttctacagttggagccatctcaaagtcccttgcccagcaaacttctgttgccattgtggacagtgatggcactttcattggagagatatcacccttcactctcgcttgttgcgacgagacggtcgcggccgccatggccaccttgtctgcgggggacctaatggcctacattgattgtggaggccctcctgaggatcttgtgagagtggtcaaggcaaggttgaaggagaagaatttggagaagatgttgcaggagttcacaattttgtcatcttgcgagagttcacaattggcatcctcctcgtcttcctccgatgaggagtcaacaacaaggacaccagctaggtctggaaggttggcaaggtcatctagctactcggctaggatggtgaggaaggccgaggctatagtgtgtcatccaaagagctcccttgttgctgtgatgatccaggccattgcacatagagtgaactacttgtgggttattgaggatgattgtagcttagttggcattgtcactttttctaatatgttgaaggtgttcagagaacatttagaaactatgtagattattaggtgatgaggttttggctttggatgcttctggtgagaagcatgaacaccaaggtgtatgagcatggtccttcttttgtaagtattgcaatgtggcccgggaggttttggtttttgttgtgctttatttctgtgtgcttcccttctaataaaaaaactcccttcaacgt

SEQ ID NO: 52973 - protein, 428 aa, Glycine max
  peptide (1)..(428): Ceres Seq. ID no. 14315615
  misc_feature (374)..(422): Pfam Name: CBS domain Pfam Description: CBS domain
  misc_feature (169)..(418): Homolog of NCBI NO: 7487793 NR Description: hypothetical protein T8F5.10 - Arabidopsis
  misc_feature (39)..(203): Homolog of NCBI NO: 15218643 NR Description: CBS domain containing protein [Arabidopsis
  misc_feature (169)..(418): Homolog of NCBI NO: 15218643 NR Description: CBS domain containing protein [Arabidopsis
  misc_feature (39)..(228): Homolog of NCBI NO: 15238832 NR Description: expressed protein [Arabidopsis thaliana]
  misc_feature (45)..(425): Homolog of NCBI NO: 32487397 NR Description: OSJNBb0017I01.11 [Oryza sativa (japonica
  misc_feature (111)..(416): Homolog of NCBI NO: 15238832 NR Description: expressed protein [Arabidopsis thaliana]
  misc_feature (39)..(426): Homolog of NCBI NO: 37535750 NR Description: unknown protein [Oryza sativa (japonica
  misc_feature (39)..(412): Homolog of NCBI NO: 7486257 NR Description: hypothetical protein F27G19.60 - Arabidopsis
  misc_feature (39)..(426): Homolog of NCBI NO: 30687603 NR Description: expressed protein [Arabidopsis thaliana]
  misc_feature (39)..(426): Homolog of NCBI NO: 27754524 NR Description: unknown protein [Arabidopsis thaliana]
NTNTTAAAATEIITTRRRHRDYHNAPPQHSPPRRSTLCMAVSFLARDVSDLCLGKPPLRSLSAAATVADALDALKSSDGEIHVSVWSFENEVGRCVGKLCMVDVICYLCREDNLLSPSKSLKEPLSSILPKDHNLVVHLQPSSSLLEAIDLILQGAQNFVVPILPTKRSGVSRRKQQHQKASSTINSHSSCEFSWLTQEDVIRFLLGSIGVFTPLPALSIDSLGIVSSDVLAIDYYSPASSTVGAISKSLAQQTSVAIVDSDGTFIGEISPFTLACCDETVAAAMATLSAGDLMAYIDCGGPPEDLVRVVKARLKEKNLEKMLQEFTILSSCESSQLASSSSSSDEESTTRTPARSGRLARSSSYSARMVRKAEAIVCHPKSSLVAVMIQAIAHRVNYLWVIEDDCSLVGIVTFSNMLKVFREHLETM

SEQ ID NO: 52974 - protein, 390 aa, Glycine max
  peptide (1)..(390): Ceres Seq. ID no. 14315616
  misc_feature (336)..(384): Pfam Name: CBS domain Pfam Description: CBS domain
  misc_feature (131)..(380): Homolog of NCBI NO: 7487793 NR Description: hypothetical protein T8F5.10 - Arabidopsis
  misc_feature (1)..(165): Homolog of NCBI NO: 15218643 NR Description: CBS domain containing protein [Arabidopsis
  misc_feature (131)..(380): Homolog of NCBI NO: 15218643 NR Description: CBS domain containing protein [Arabidopsis
  misc_feature (1)..(190): Homolog of NCBI NO: 15238832 NR Description: expressed protein [Arabidopsis thaliana]
  misc_feature (7)..(387): Homolog of NCBI NO: 32487397 NR Description: OSJNBb0017I01.11 [Oryza sativa (japonica
  misc_feature (73)..(378): Homolog of NCBI NO: 15238832 NR Description: expressed protein [Arabidopsis thaliana]
  misc_feature (1)..(388): Homolog of NCBI NO: 37535750 NR Description: unknown protein [Oryza sativa (japonica
  misc_feature (1)..(374): Homolog of NCBI NO: 7486257 NR Description: hypothetical protein F27G19.60 - Arabidopsis
  misc_feature (1)..(388): Homolog of NCBI NO: 30687603 NR Description: expressed protein [Arabidopsis thaliana]
  misc_feature (1)..(388): Homolog of NCBI NO: 27754524 NR Description: unknown protein [Arabidopsis thaliana]
MAVSFLARDVSDLCLGKPPLRSLSAAATVADALDALKSSDGEIHVSVWSFENEVGRCVGKLCMVDVICYLCREDNLLSPSKSLKEPLSSILPKDHNLVVHLQPSSSLLEAIDLILQGAQNFVVPILPTKRSGVSRRKQQHQKASSTINSHSSCEFSWLTQEDVIRFLLGSIGVFTPLPALSIDSLGIVSSDVLAIDYYSPASSTVGAISKSLAQQTSVAIVDSDGTFIGEISPFTLACCDETVAAAMATLSAGDLMAYIDCGGPPEDLVRVVKARLKEKNLEKMLQEFTILSSCESSQLASSSSSSDEESTTRTPARSGRLARSSSYSARMVRKAEAIVCHPKSSLVAVMIQAIAHRVNYLWVIEDDCSLVGIVTFSNMLKVFREHLETM

SEQ ID NO: 52975 - protein, 328 aa, Glycine max
  peptide (1)..(328): Ceres Seq. ID no. 14315617
  misc_feature (274)..(322): Pfam Name: CBS domain Pfam Description: CBS domain
  misc_feature (69)..(318): Homolog of NCBI NO: 7487793 NR Description: hypothetical protein T8F5.10 - Arabidopsis
  misc_feature (1)..(103): Homolog of NCBI NO: 15218643 NR Description: CBS domain containing protein [Arabidopsis
  misc_feature (69)..(318): Homolog of NCBI NO: 15218643 NR Description: CBS domain containing protein [Arabidopsis
  misc_feature (1)..(128): Homolog of NCBI NO: 15238832 NR Description: expressed protein [Arabidopsis thaliana]
  misc_feature (1)..(325): Homolog of NCBI NO: 32487397 NR Description: OSJNBb0017I01.11 [Oryza sativa (japonica
  misc_feature (11)..(316): Homolog of NCBI NO: 15238832 NR Description: expressed protein [Arabidopsis thaliana]
  misc_feature (1)..(326): Homolog of NCBI NO: 37535750 NR Description: unknown protein [Oryza sativa (japonica
  misc_feature (1)..(312): Homolog of NCBI NO: 7486257 NR Description: hypothetical protein F27G19.60 - Arabidopsis
  misc_feature (1)..(326): Homolog of NCBI NO: 30687603 NR Description: expressed protein [Arabidopsis thaliana]
  misc_feature (1)..(326): Homolog of NCBI NO: 27754524 NR Description: unknown protein [Arabidopsis thaliana]
MVDVICYLCREDNLLSPSKSLKEPLSSILPKDHNLVVHLQPSSSLLEAIDLILQGAQNFVVPILPTKRSGVSRRKQQHQKASSTINSHSSCEFSWLTQEDVIRFLLGSIGVFTPLPALSIDSLGIVSSDVLAIDYYSPASSTVGAISKSLAQQTSVAIVDSDGTFIGEISPFTLACCDETVAAAMATLSAGDLMAYIDCGGPPEDLVRVVKARLKEKNLEKMLQEFTILSSCESSQLASSSSSSDEESTTRTPARSGRLARSSSYSARMVRKAEAIVCHPKSSLVAVMIQAIAHRVNYLWVIEDDCSLVGIVTFSNMLKVFREHLETM

SEQ ID NO: 52976 - DNA, 1620 bp, Glycine max
  misc_feature (1)..(1620): Ceres Seq. ID no. 14303831
gtttcatttggttttcttccttctcacacttcccccaattcccaaaccaaactctgtcttttcttctctgtacggcactctctcttccggcgttctgggggtcgcatcgccggcgattccccactctgcttctctcttcacccttcaattcaaccctctcgtcttcgcttcactgattccctcttcgaaaatgcttccgatcgcttgctagggttttccttctcccaaatctccgtctccgaaagaaccctgtaccttttcttcctccgattaatcaacttcctagttatggctattcgtgtaactttttccttttcgggctacgtcgcccagagcctcgcctcctccgccggcgtgcgcgtcgccaattcgcgatgtgtccaggaatgctggatccgcacgcgcctcttcgggggcgccacccagaagacggatctagattcctccgccggcggcggagtccgcaatttcgccaggcccaactgctgggcccagtccacttactcgagcctcgccggggaatttctcggcgacggttgcagcaagagcccaatcatcttgggcctgatttcgatcatgaagtcaacggtgggtgtgtctgggtcatccgcggcggctgcgggtattttcggtatttcgccatttaaaaccacttcgattatccccttcttgccaggttcgaagtggcttccttgcaacgagtccgttcccgaccccacctcctgggaggtcgacaaaggtggcacgcgacgcgtcgtttcggaaacagaatcgaattttgccaagattagttggctttcgcggttgatgaacgtgtgttccgaagacgcgaaggctgcgttcactgctcttaccgttagtttactctttaaatcgtccttggctgaacccagatcaattccctcctcttctatgtaccctactcttgaagtaggtgaccgtgttcttaccgagaaggtttcgttcttctttagaaagcctgatgtttcggatatagtcattttcaaagctcctccttggttagaggagtttggttttagttcgtctgatgtatttataaagaggattgtggctaaggctggggacactgttgaggtgcgtgatgggaaactactgataaatggtgctgctgaagaacaagaatttgtattagaggctctagcttatgagatggatccaatggttgtgccagaaggatatgtgtttgtaatgggcgacaatcggaataaaagctttgattctcataactggggtcccctgccggttgagaacattgttggtaggtccatgtttcggtactggcctccatccaaggcatctgacactgatacccatcgtaaactcccacctggtaacaaacctgtggcaatttcttgacatgattcccgcagctttgtgaaggtgatgaaggtttccagatacggtcgtttgttctaaattgttagcttgagctgactttgcacacagtttgggatgaatatcttattcattgatacaaatttgtcgatgacctaataataccattaagcgttcattagtgccatctgagatgtatttctattgctgaagtgcggggagaaaaaaaagaattaaaaaagcatgatgattttgccccccccc

SEQ ID NO: 52977 - protein, 458 aa, Glycine max
  peptide (1)..(458): Ceres Seq. ID no. 14303832
  misc_feature (266)..(427): Pfam Name: Signal peptidase I Pfam Description: Signal peptidase I
  misc_feature (270)..(442): Homolog of NCBI NO: 25082936 NR Description: chloroplast thylakoidal processing peptidase,
  misc_feature (270)..(442): Homolog of NCBI NO: 30687572 NR Description: chloroplast thylakoidal processing peptidase
  misc_feature (270)..(442): Homolog of NCBI NO: 9294054 NR Description: contains similarity to signal peptidase (leader
  misc_feature (97)..(120): Homolog of NCBI NO: 31415933 NR Description: putative chloroplast thylakoidal processing
  misc_feature (183)..(236): Homolog of NCBI NO: 31415933 NR Description: putative chloroplast thylakoidal processing
  misc_feature (264)..(438): Homolog of NCBI NO: 31415933 NR Description: putative chloroplast thylakoidal processing
  misc_feature (209)..(458): Homolog of NCBI NO: 25408074 NR Description: probable signal peptidase I [imported] -
  misc_feature (155)..(458): Homolog of NCBI NO: 30684587 NR Description: signal peptidase I -related [Arabidopsis
  misc_feature (97)..(448): Homolog of NCBI NO: 21553622 NR Description: chloroplast thylakoidal processing peptidase,
  misc_feature (97)..(448): Homolog of NCBI NO: 15222236 NR Description: chloroplast thylakoidal processing peptidase
VSFGFLPSHTSPNSQTKLCLFFSVRHSLFRRSGGRIAGDSPLCFSLHPSIQPSRLRFTDSLFENASDRLLGFSFSQISVSERTLYLFFLRLINFLVMAIRVTFSFSGYVAQSLASSAGVRVANSRCVQECWIRTRLFGGATQKTDLDSSAGGGVRNFARPNCWAQSTYSSLAGEFLGDGCSKSPIILGLISIMKSTVGVSGSSAAAAGIFGISPFKTTSIIPFLPGSKWLPCNESVPDPTSWEVDKGGTRRVVSETESNFAKISWLSRLMNVCSEDAKAAFTALTVSLLFKSSLAEPRSIPSSSMYPTLEVGDRVLTEKVSFFFRKPDVSDIVIFKAPPWLEEFGFSSSDVFIKRIVAKAGDTVEVRDGKLLINGAAEEQEFVLEALAYEMDPMVVPEGYVFVMGDNRNKSFDSHNWGPLPVENIVGRSMFRYWPPSKASDTDTHRKLPPGNKPVAIS

SEQ ID NO: 52978 - protein, 362 aa, Glycine max
  peptide (1)..(362): Ceres Seq. ID no. 14303833
  misc_feature (170)..(331): Pfam Name: Signal peptidase I Pfam Description: Signal peptidase I
  misc_feature (174)..(346): Homolog of NCBI NO: 25082936 NR Description: chloroplast thylakoidal processing peptidase,
  misc_feature (174)..(346): Homolog of NCBI NO: 30687572 NR Description: chloroplast thylakoidal processing peptidase
  misc_feature (174)..(346): Homolog of NCBI NO: 9294054 NR Description: contains similarity to signal peptidase (leader
  misc_feature (1)..(24): Homolog of NCBI NO: 31415933 NR Description: putative chloroplast thylakoidal processing
  misc_feature (87)..(140): Homolog of NCBI NO: 31415933 NR Description: putative chloroplast thylakoidal processing
  misc_feature (168)..(342): Homolog of NCBI NO: 31415933 NR Description: putative chloroplast thylakoidal processing
  misc_feature (113)..(362): Homolog of NCBI NO: 25408074 NR Description: probable signal peptidase I [imported] -
  misc_feature (59)..(362): Homolog of NCBI NO: 30684587 NR Description: signal peptidase I -related [Arabidopsis
  misc_feature (1)..(352): Homolog of NCBI NO: 21553622 NR Description: chloroplast thylakoidal processing peptidase,
  misc_feature (1)..(352): Homolog of NCBI NO: 15222236 NR Description: chloroplast thylakoidal processing peptidase
MAIRVTFSFSGYVAQSLASSAGVRVANSRCVQECWIRTRLFGGATQKTDLDSSAGGGVRNFARPNCWAQSTYSSLAGEFLGDGCSKSPIILGLISIMKSTVGVSGSSAAAAGIFGISPFKTTSIIPFLPGSKWLPCNESVPDPTSWEVDKGGTRRVVSETESNFAKISWLSRLMNVCSEDAKAAFTALTVSLLFKSSLAEPRSIPSSSMYPTLEVGDRVLTEKVSFFFRKPDVSDIVIFKAPPWLEEFGFSSSDVFIKRIVAKAGDTVEVRDGKLLINGAAEEQEFVLEALAYEMDPMVVPEGYVFVMGDNRNKSFDSHNWGPLPVENIVGRSMFRYWPPSKASDTDTHRKLPPGNKPVAIS

SEQ ID NO: 52979 - protein, 266 aa, Glycine max
  peptide (1)..(266): Ceres Seq. ID no. 14303834
  misc_feature (74)..(235): Pfam Name: Signal peptidase I Pfam Description: Signal peptidase I
  misc_feature (83)..(246): Homolog of NCBI NO: 16329254 NR Description: leader peptidase I [Synechocystis sp. PCC 6803]
  misc_feature (78)..(250): Homolog of NCBI NO: 25082936 NR Description: chloroplast thylakoidal processing peptidase,
  misc_feature (78)..(250): Homolog of NCBI NO: 30687572 NR Description: chloroplast thylakoidal processing peptidase
  misc_feature (78)..(250): Homolog of NCBI NO: 9294054 NR Description: contains similarity to signal peptidase (leader
  misc_feature (1)..(44): Homolog of NCBI NO: 31415933 NR Description: putative chloroplast thylakoidal processing
  misc_feature (72)..(246): Homolog of NCBI NO: 31415933 NR Description: putative chloroplast thylakoidal processing
  misc_feature (17)..(266): Homolog of NCBI NO: 25408074 NR Description: probable signal peptidase I [imported] -
  misc_feature (1)..(266): Homolog of NCBI NO: 30684587 NR Description: signal peptidase I -related [Arabidopsis
  misc_feature (1)..(256): Homolog of NCBI NO: 21553622 NR Description: chloroplast thylakoidal processing peptidase,
  misc_feature (1)..(256): Homolog of NCBI NO: 15222236 NR Description: chloroplast thylakoidal processing peptidase
MKSTVGVSGSSAAAAGIFGISPFKTTSIIPFLPGSKWLPCNESVPDPTSWEVDKGGTRRVVSETESNFAKISWLSRLMNVCSEDAKAAFTALTVSLLFKSSLAEPRSIPSSSMYPTLEVGDRVLTEKVSFFFRKPDVSDIVIFKAPPWLEEFGFSSSDVFIKRIVAKAGDTVEVRDGKLLINGAAEEQEFVLEALAYEMDPMVVPEGYVFVMGDNRNKSFDSHNWGPLPVENIVGRSMFRYWPPSKASDTDTHRKLPPGNKPVAIS

SEQ ID NO: 52980 - DNA, 1476 bp, Glycine max
  misc_feature (1)..(1476): Ceres Seq. ID no. 14305026
tcttaaagacgacattgactgctaacaacaataaagtggatcaatcattaaaggcttacttcttcttcttcttcttcttcttcttcttctaacaacaataagatcccatctttcccactcatgaagagacttaacagctcagattcttccactgccctcatgacaatttttccatcatcatcaacagaggaacatagtccgaggaacagccaccacatgtatggcagggagttccgatcgatgttggacggactcgacgaggaagggtgtgttgaagaaccggggcatcaatctgagaagaagcgtcgactaagtgtggaacaagtgaaggctttggagaagaactttgaggttgaaaacaagcttgaacctgagaggaaggtcaagcttgcccaagaacttgggttgcaacctagacaagtagccgtttggttccaaaaccgccgagccagatggaaaaccaaacaattggagagagattatggtgtcctcaaagccaattatgatgctcttaagcttaactttggcaccctcaatcaggacaacgaagccttacgaaagcagataaaggaattgaaatcgaggctgctgcaagaagagaacacagcaggaagcggtgtttcggtgaaggaagaagagataacaacgatgcctgcagactcagaagagaaaacgatggaacaaagtaagagtgacccaccttctgaaacctcgaacattaatcctagttcggagtcgtcggaggaggaccacttgaattacgaatgtttcaacaacaacagcgacgactgtgtcgtcggaggatccgccgcagcatcgctcttgcaagtggacttcatgaaagacggttcttccgacagcgacggatcaagcgcgatcttgaacgaagacaccatgtacttgccgtcttcgatgaactgttttcagttccagaaaccgtatcatcacgcgcagtacgtgaagacggaggagcacaatttcttgagcgccgatgaggcctgcaatttcttctccgatgaacaagcaccgaccctgcaatggtactgtccagaacagtggagctgagatagaagaaacatgggaaaattggaaaccgctttcagaaatttttgtttaatatgttgcacggttgtgttgaacacagctcattgaggtaaaagttgtaaaaaaaggttgccacttgccaacagaggctgcttgaaggtagaaaatgaaacactgtgcagaagatagagttacgaaagagagaacagagatcaatggctgcatggcgtggggtcggagatgaaggatgacgattaaggttaattattactctcgatcgtgggtaatatcaataattattcaatcgtaaagcaaaccatgctgtaaaaaacaaatttcaattcaagtatagaataacgatgtagtactttatcaaacagaaaacgaaaaaaaaaattataaatctgttaaacaatatccttttgcctcact

SEQ ID NO: 52981 - protein, 314 aa, Glycine max
  peptide (1)..(314): Ceres Seq. ID no. 14305027
  misc_feature (60)..(114): Pfam Name: Homeobox domain Pfam Description: Homeobox domain
  misc_feature (48)..(314): Homolog of NCBI NO: 15148916 NR Description: homeodomain leucine zipper protein HDZ1
MKRLNSSDSSTALMTIFPSSSTEEHSPRNSHHMYGREFRSMLDGLDEEGCVEEPGHQSEKKRRLSVEQVKALEKNFEVENKLEPERKVKLAQELGLQPRQVAVWFQNRRARWKTKQLERDYGVLKANYDALKLNFGTLNQDNEALRKQIKELKSRLLQEENTAGSGVSVKEEEITTMPADSEEKTMEQSKSDPPSETSNINPSSESSEEDHLNYECFNNNSDDCVVGGSAAASLLQVDFMKDGSSDSDGSSAILNEDTMYLPSSMNCFQFQKPYHHAQYVKTEEHNFLSADEACNFFSDEQAPTLQWYCPEQWS

SEQ ID NO: 52982 - protein, 301 aa, Glycine max
  peptide (1)..(301): Ceres Seq. ID no. 14305028
  misc_feature (47)..(101): Pfam Name: Homeobox domain Pfam Description: Homeobox domain
  misc_feature (35)..(301): Homolog of NCBI NO: 15148916 NR Description: homeodomain leucine zipper protein HDZ1
MTIFPSSSTEEHSPRNSHHMYGREFRSMLDGLDEEGCVEEPGHQSEKKRRLSVEQVKALEKNFEVENKLEPERKVKLAQELGLQPRQVAVWFQNRRARWKTKQLERDYGVLKANYDALKLNFGTLNQDNEALRKQIKELKSRLLQEENTAGSGVSVKEEEITTMPADSEEKTMEQSKSDPPSETSNINPSSESSEEDHLNYECFNNNSDDCVVGGSAAASLLQVDFMKDGSSDSDGSSAILNEDTMYLPSSMNCFQFQKPYHHAQYVKTEEHNFLSADEACNFFSDEQAPTLQWYCPEQWS

SEQ ID NO: 52983 - protein, 282 aa, Glycine max
  peptide (1)..(282): Ceres Seq. ID no. 14305029
  misc_feature (28)..(82): Pfam Name: Homeobox domain Pfam Description: Homeobox domain
  misc_feature (16)..(282): Homolog of NCBI NO: 15148916 NR Description: homeodomain leucine zipper protein HDZ1
MYGREFRSMLDGLDEEGCVEEPGHQSEKKRRLSVEQVKALEKNFEVENKLEPERKVKLAQELGLQPRQVAVWFQNRRARWKTKQLERDYGVLKANYDALKLNFGTLNQDNEALRKQIKELKSRLLQEENTAGSGVSVKEEEITTMPADSEEKTMEQSKSDPPSETSNINPSSESSEEDHLNYECFNNNSDDCVVGGSAAASLLQVDFMKDGSSDSDGSSAILNEDTMYLPSSMNCFQFQKPYHHAQYVKTEEHNFLSADEACNFFSDEQAPTLQWYCPEQWS

SEQ ID NO: 52984 - DNA, 1332 bp, Glycine max
  misc_feature (1)..(1332): Ceres Seq. ID no. 14306769
acttttcagcggcgaaaatgggaaaacgagagaagcagaagcagaggcatgagaggggtcaccgtggaagagggtctttcaactatcttcaagaagaccatgattttgatgacactccaagatcctcaccctctgaagaagaaggtgctgatggcagcaatgaggaaaaagaagaagatgaagaaaatgtaacaataagtcatgaaaaccaatctcatgatatgccttccaagttcctcctttaccaacaatctgtgcagtctccaaaaggagacataagttatatgcaaaagttctttctcatgtacgtgggtggaaggatgcccctccatcttcaagaagatttctgtggcacggcgcttcttagtacagaatggctccgcagtgattcaagaagaacagtagtaggattagatttggatcttgaggcactcaattggtgcatggaaaacaacatacctaaagttggggctgatggattttcaagaatttccctctttcatgggaatgttttacaacctcttcagtctaaacttgtaaaagtagatcctcaggagctggtaagcaatatttcattgtcacagaatgaagaaaatcttcagactggtgtgccagaatctgatgctccaacaggctctattgctcaagacgataagtatactaagggaaacataacactgcctggaagagatattgtgtgtgcttttaactacagctgctgctgtctacataaacgagcagaactggttatgtatttcaaacatgctcgtggggccttgtcaactaaaggtggaatttttgtgatggatttatatgggggtacgtcgtcagagcacaagttgaggcttcagagaagatttcctaattttacgtatgtatgggagcaagctgaatttgatattattcaacggaagacaaggattagcctccattttcatatgaagaaggaacaaagaaaacttcgccatgcattttcatacagctggcggttgtggacattacctgaaattagggattgcctagaagaggctggatttcggtctgttcacttttgggttcgagagatgccagacaccacagaaattatgaaaacagagggatttggtgcaggaaagaatgtaaaatacgaagaggcaacaagttttcagcaacaagattcttggaatgcttacatagttggtgttgcatagcttcatcttagaaagtgtagtttctgttacattaactttgtcacaagactcacaactagacaagcataacttgtaatcagttccattgcttggaacttccctttcttttatatgaaaattgaattggatttggcttgagatt

SEQ ID NO: 52985 - protein, 395 aa, Glycine max
  peptide (1)..(395): Ceres Seq. ID no. 14306770
  misc_feature (6)..(198): Homolog of NCBI NO: 25370730 NR Description: hypothetical protein At2g27590 [imported] -
  misc_feature (122)..(395): Homolog of NCBI NO: 25370730 NR Description: hypothetical protein At2g27590 [imported] -
  misc_feature (6)..(395): Homolog of NCBI NO: 34908450 NR Description: P0683F02.16 [Oryza sativa (japonica
  misc_feature (14)..(395): Homolog of NCBI NO: 21536815 NR Description: unknown [Arabidopsis thaliana]
  misc_feature (14)..(395): Homolog of NCBI NO: 18401468 NR Description: expressed protein [Arabidopsis thaliana]
FSAAKMGKREKQKQRHERGHRGRGSFNYLQEDHDFDDTPRSSPSEEEGADGSNEEKEEDEENVTISHENQSHDMPSKFLLYQQSVQSPKGDISYMQKFFLMYVGGRMPLHLQEDFCGTALLSTEWLRSDSRRTVVGLDLDLEALNWCMENNIPKVGADGFSRISLFHGNVLQPLQSKLVKVDPQELVSNISLSQNEENLQTGVPESDAPTGSIAQDDKYTKGNITLPGRDIVCAFNYSCCCLHKRAELVMYFKHARGALSTKGGIFVMDLYGGTSSEHKLRLQRRFPNFTYVWEQAEFDIIQRKTRISLHFHMKKEQRKLRHAFSYSWRLWTLPEIRDCLEEAGFRSVHFWVREMPDTTEIMKTEGFGAGKNVKYEEATSFQQQDSWNAYIVGVA

SEQ ID NO: 52986 - protein, 390 aa, Glycine max
  peptide (1)..(390): Ceres Seq. ID no. 14306771
  misc_feature (1)..(193): Homolog of NCBI NO: 25370730 NR Description: hypothetical protein At2g27590 [imported] -
  misc_feature (117)..(390): Homolog of NCBI NO: 25370730 NR Description: hypothetical protein At2g27590 [imported] -
  misc_feature (1)..(390): Homolog of NCBI NO: 34908450 NR Description: P0683F02.16 [Oryza sativa (japonica
  misc_feature (9)..(390): Homolog of NCBI NO: 21536815 NR Description: unknown [Arabidopsis thaliana]
  misc_feature (9)..(390): Homolog of NCBI NO: 18401468 NR Description: expressed protein [Arabidopsis thaliana]
MGKREKQKQRHERGHRGRGSFNYLQEDHDFDDTPRSSPSEEEGADGSNEEKEEDEENVTISHENQSHDMPSKFLLYQQSVQSPKGDISYMQKFFLMYVGGRMPLHLQEDFCGTALLSTEWLRSDSRRTVVGLDLDLEALNWCMENNIPKVGADGFSRISLFHGNVLQPLQSKLVKVDPQELVSNISLSQNEENLQTGVPESDAPTGSIAQDDKYTKGNITLPGRDIVCAFNYSCCCLHKRAELVMYFKHARGALSTKGGIFVMDLYGGTSSEHKLRLQRRFPNFTYVWEQAEFDIIQRKTRISLHFHMKKEQRKLRHAFSYSWRLWTLPEIRDCLEEAGFRSVHFWVREMPDTTEIMKTEGFGAGKNVKYEEATSFQQQDSWNAYIVGVA

SEQ ID NO: 52987 - protein, 322 aa, Glycine max
  peptide (1)..(322): Ceres Seq. ID no. 14306772
  misc_feature (1)..(125): Homolog of NCBI NO: 25370730 NR Description: hypothetical protein At2g27590 [imported] -
  misc_feature (49)..(322): Homolog of NCBI NO: 25370730 NR Description: hypothetical protein At2g27590 [imported] -
  misc_feature (1)..(322): Homolog of NCBI NO: 34908450 NR Description: P0683F02.16 [Oryza sativa (japonica
  misc_feature (1)..(322): Homolog of NCBI NO: 21536815 NR Description: unknown [Arabidopsis thaliana]
  misc_feature (1)..(322): Homolog of NCBI NO: 18401468 NR Description: expressed protein [Arabidopsis thaliana]
MPSKFLLYQQSVQSPKGDISYMQKFFLMYVGGRMPLHLQEDFCGTALLSTEWLRSDSRRTVVGLDLDLEALNWCMENNIPKVGADGFSRISLFHGNVLQPLQSKLVKVDPQELVSNISLSQNEENLQTGVPESDAPTGSIAQDDKYTKGNITLPGRDIVCAFNYSCCCLHKRAELVMYFKHARGALSTKGGIFVMDLYGGTSSEHKLRLQRRFPNFTYVWEQAEFDIIQRKTRISLHFHMKKEQRKLRHAFSYSWRLWTLPEIRDCLEEAGFRSVHFWVREMPDTTEIMKTEGFGAGKNVKYEEATSFQQQDSWNAYIVGVA

SEQ ID NO: 52988 - DNA, 1896 bp, Glycine max
  misc_feature (1)..(1896): Ceres Seq. ID no. 15176403
agcttttctgcgatcaatggagttcgacccgatcccaatcggttcgtgctccaaagaacaccagatgatctataaggagtggttcaattacgctgattcagatagcgatggccgcattacggggagtgatgccaccaagtttttcgccatgtccaatttgccccgcgaagatcttaagcaggtgtgggctattgcagattcaaagcgacaaggatatcttggtttcactgaatttatcattgctatgcagctagtttctttggctcaatctgggcactcaataacacccgatctgctgactagtgatgttgattttacaaatggaaaacctccctcaatggagggtttggacgtattactagttaagaaaaagcataaacaaaaagaggttgatgcaaatggtagttctcaattgcagccatcaccatcaagtaattggttttcttcaaagtcaacaaaaaaggtgcctctttcctctgtgacatcaataattgacggcttgaagagactctacattcagaagttgaagccattagaagttacttaccgttttaatgattttgtatccccattactgacaaatagtgactttgatgccaaaccaatggttatgcttttgggtcagtactcaactggtaaaacaacatttatcaaacatctgcttaaaagtagttatccaggagcacatattggacctgagccaacaactgataggtttgttgttgtcatgtctggatctgatgagagaagcgttcctggaaatactgttgctgtccaagcagacatgccatttagtggtcttacaacttttggcacagcatttttgtcaaaatttgtgtgttcacagatgcctcatcctctactggaacacatcacatttgttgacactccgggagttctatctggagaaaagcaacgcacacaacgagcatatgattttacgggtgtaacatcttggtttgctgctaagtgtgatttgattctccttctgtttgatcctcacaaacttgacatcagtgatgagttcaatcgtgtgatatcatccttacgggggcatgatgacaaaatccgagtggttttgaacaaggcagaccaagttgatacccaacaattgatgagggtttatggagccttaatgtggtcacttgggaaggtgctgaagacacctgaagtaatgcgagtgtatattggctccttcaatgacaagcctgtaaatgatgctgccactggtccacttgggaaggaactctttgaaaaggaacaggatgatctactctcggatctgaaagatgtaccaaaagcagcttgtgatcgaagaatcaatgagtttgtaaaacgggcccgagcagccaagatacatgcttacattatcagccatcttaaaaaggagatgcctgctatgataggcaaagctaaagctcaacaaaagctcatcgataatttggcagctgaatttggaaaggtacaaagggagttccatttacctcctggcgattttccaaatgtagagtttttcagagagagattgagtggttacaatattgataagtttgaaaaattgaaaccaaaaatgacacaagcagttgatgacatgttagcttacgacattcctaatctcttgaagaattttaggaatccctatgattaaatttctgagcaattgagtcggtgctataattagattagttagagtgacatttgtagcgtacaaattttacgggatctttatgcaatgtatgtgtgtcatgagatctttatgtgccatccggtggcctttcttttctagtaggaagttttattatttaatatatgtttttgtatttatgtatattttgttatctacaatcaagtgtcaagacagaaaataaagggaaaacacaattacttgtttgcatc

SEQ ID NO: 52989 - protein, 548 aa, Glycine max
  peptide (1)..(548): Ceres Seq. ID no. 15176404
  misc_feature (23)..(51): Pfam Name: EF hand Pfam Description: EF hand
  misc_feature (130)..(540): Homolog of NCBI NO: 17565132 NR Description: receptor Mediated Endocytosis RME-1, required for
  misc_feature (130)..(540): Homolog of NCBI NO: 7206819 NR Description: Receptor mediated endocytosis protein 1, isoform
  misc_feature (129)..(540): Homolog of NCBI NO: 18250262 NR Description: Receptor mediated endocytosis protein 1, isoform
  misc_feature (129)..(540): Homolog of NCBI NO: 17565130 NR Description: receptor Mediated Endocytosis RME-1, required for
  misc_feature (129)..(540): Homolog of NCBI NO: 39594267 NR Description: Hypothetical protein CBG18887 [Caenorhabditis
  misc_feature (111)..(494): Homolog of NCBI NO: 18412957 NR Description: calcium-binding EF-hand family protein
  misc_feature (18)..(548): Homolog of NCBI NO: 38345297 NR Description: OSJNBa0043A12.19 [Oryza sativa (japonica
  misc_feature (6)..(115): Homolog of NCBI NO: 9294546 NR Description: contains similarity to EH domain containing
  misc_feature (134)..(548): Homolog of NCBI NO: 9294546 NR Description: contains similarity to EH domain containing
  misc_feature (6)..(548): Homolog of NCBI NO: 18402561 NR Description: calcium-binding EF-hand family protein
AFLRSMEFDPIPIGSCSKEHQMIYKEWFNYADSDSDGRITGSDATKFFAMSNLPREDLKQVWAIADSKRQGYLGFTEFIIAMQLVSLAQSGHSITPDLLTSDVDFTNGKPPSMEGLDVLLVKKKHKQKEVDANGSSQLQPSPSSNWFSSKSTKKVPLSSVTSIIDGLKRLYIQKLKPLEVTYRFNDFVSPLLTNSDFDAKPMVMLLGQYSTGKTTFIKHLLKSSYPGAHIGPEPTTDRFVVVMSGSDERSVPGNTVAVQADMPFSGLTTFGTAFLSKFVCSQMPHPLLEHITFVDTPGVLSGEKQRTQRAYDFTGVTSWFAAKCDLILLLFDPHKLDISDEFNRVISSLRGHDDKIRVVLNKADQVDTQQLMRVYGALMWSLGKVLKTPEVMRVYIGSFNDKPVNDAATGPLGKELFEKEQDDLLSDLKDVPKAACDRRINEFVKRARAAKIHAYIISHLKKEMPAMIGKAKAQQKLIDNLAAEFGKVQREFHLPPGDFPNVEFFRERLSGYNIDKFEKLKPKMTQAVDDMLAYDIPNLLKNFRNPYD

SEQ ID NO: 52990 - protein, 543 aa, Glycine max
  peptide (1)..(543): Ceres Seq. ID no. 15176405
  misc_feature (18)..(46): Pfam Name: EF hand Pfam Description: EF hand
  misc_feature (125)..(535): Homolog of NCBI NO: 17565132 NR Description: receptor Mediated Endocytosis RME-1, required for
  misc_feature (125)..(535): Homolog of NCBI NO: 7206819 NR Description: Receptor mediated endocytosis protein 1, isoform
  misc_feature (124)..(535): Homolog of NCBI NO: 18250262 NR Description: Receptor mediated endocytosis protein 1, isoform
  misc_feature (124)..(535): Homolog of NCBI NO: 17565130 NR Description: receptor Mediated Endocytosis RME-1, required for
  misc_feature (124)..(535): Homolog of NCBI NO: 39594267 NR Description: Hypothetical protein CBG18887 [Caenorhabditis
  misc_feature (106)..(489): Homolog of NCBI NO: 18412957 NR Description: calcium-binding EF-hand family protein
  misc_feature (13)..(543): Homolog of NCBI NO: 38345297 NR Description: OSJNBa0043A12.19 [Oryza sativa (japonica
  misc_feature (1)..(110): Homolog of NCBI NO: 9294546 NR Description: contains similarity to EH domain containing
  misc_feature (129)..(543): Homolog of NCBI NO: 9294546 NR Description: contains similarity to EH domain containing
  misc_feature (1)..(543): Homolog of NCBI NO: 18402561 NR Description: calcium-binding EF-hand family protein
MEFDPIPIGSCSKEHQMIYKEWFNYADSDSDGRITGSDATKFFAMSNLPREDLKQVWAIADSKRQGYLGFTEFIIAMQLVSLAQSGHSITPDLLTSDVDFTNGKPPSMEGLDVLLVKKKHKQKEVDANGSSQLQPSPSSNWFSSKSTKKVPLSSVTSIIDGLKRLYIQKLKPLEVTYRFNDFVSPLLTNSDFDAKPMVMLLGQYSTGKTTFIKHLLKSSYPGAHIGPEPTTDRFVVVMSGSDERSVPGNTVAVQADMPFSGLTTFGTAFLSKFVCSQMPHPLLEHITFVDTPGVLSGEKQRTQRAYDFTGVTSWFAAKCDLILLLFDPHKLDISDEFNRVISSLRGHDDKIRVVLNKADQVDTQQLMRVYGALMWSLGKVLKTPEVMRVYIGSFNDKPVNDAATGPLGKELFEKEQDDLLSDLKDVPKAACDRRINEFVKRARAAKIHAYIISHLKKEMPAMIGKAKAQQKLIDNLAAEFGKVQREFHLPPGDFPNVEFFRERLSGYNIDKFEKLKPKMTQAVDDMLAYDIPNLLKNFRNPYD

SEQ ID NO: 52991 - protein, 527 aa, Glycine max
  peptide (1)..(527): Ceres Seq. ID no. 15176406
  misc_feature (2)..(30): Pfam Name: EF hand Pfam Description: EF hand
  misc_feature (109)..(519): Homolog of NCBI NO: 17565132 NR Description: receptor Mediated Endocytosis RME-1, required for
  misc_feature (109)..(519): Homolog of NCBI NO: 7206819 NR Description: Receptor mediated endocytosis protein 1, isoform
  misc_feature (108)..(519): Homolog of NCBI NO: 18250262 NR Description: Receptor mediated endocytosis protein 1, isoform
  misc_feature (108)..(519): Homolog of NCBI NO: 17565130 NR Description: receptor Mediated Endocytosis RME-1, required for
  misc_feature (108)..(519): Homolog of NCBI NO: 39594267 NR Description: Hypothetical protein CBG18887 [Caenorhabditis
  misc_feature (90)..(473): Homolog of NCBI NO: 18412957 NR Description: calcium-binding EF-hand family protein
  misc_feature (1)..(527): Homolog of NCBI NO: 38345297 NR Description: OSJNBa0043A12.19 [Oryza sativa (japonica
  misc_feature (1)..(94): Homolog of NCBI NO: 9294546 NR Description: contains similarity to EH domain containing
  misc_feature (113)..(527): Homolog of NCBI NO: 9294546 NR Description: contains similarity to EH domain containing
  misc_feature (1)..(527): Homolog of NCBI NO: 18402561 NR Description: calcium-binding EF-hand family protein
MIYKEWFNYADSDSDGRITGSDATKFFAMSNLPREDLKQVWAIADSKRQGYLGFTEFIIAMQLVSLAQSGHSITPDLLTSDVDFTNGKPPSMEGLDVLLVKKKHKQKEVDANGSSQLQPSPSSNWFSSKSTKKVPLSSVTSIIDGLKRLYIQKLKPLEVTYRFNDFVSPLLTNSDFDAKPMVMLLGQYSTGKTTFIKHLLKSSYPGAHIGPEPTTDRFVVVMSGSDERSVPGNTVAVQADMPFSGLTTFGTAFLSKFVCSQMPHPLLEHITFVDTPGVLSGEKQRTQRAYDFTGVTSWFAAKCDLILLLFDPHKLDISDEFNRVISSLRGHDDKIRVVLNKADQVDTQQLMRVYGALMWSLGKVLKTPEVMRVYIGSFNDKPVNDAATGPLGKELFEKEQDDLLSDLKDVPKAACDRRINEFVKRARAAKIHAYIISHLKKEMPAMIGKAKAQQKLIDNLAAEFGKVQREFHLPPGDFPNVEFFRERLSGYNIDKFEKLKPKMTQAVDDMLAYDIPNLLKNFRNPYD

SEQ ID NO: 52992 - DNA, 1388 bp, Glycine max
  misc_feature (1)..(1388): Ceres Seq. ID no. 15226389
aactccaaagttttcaaactcataacaacaactccttctgttcacaaactcatcttcaattccttttctgatctacgcaaggttaaggttaattttatctatctacttggacatgaacgaaatcgatgttccttcgttctttctctgccccatttcgctagatatcatgaaggatccagtgacggtctcaacgggcatcacctacgaccgtgaaagcatcgaaacctggctgttctcgaagaaaaacacgacatgccccattaccaaactgcccttgatagattacaccgatctcacaccaaaccacacccttcgtagactcatccaagcgtggtgttccatgaacgcttctcacggcatcgaaaggatcccaacccctaaaccccccgttaacaagaaccaaatttcgaagcttctcaaagacgcttctcattcccctctcacatgcctcagaagactcaaatccatctcttccggaagcgaaacaaataagcggtgcatggaggcttctggcgctgttgagtttctagcatcaattgtaatcaacaccaaccgcaacattgattcttcacatgaggctgactcaaacgacggatctggattcgagttgaaaacaagtgcatgcgatgaagcgttgagtttgcttcataatcttcatttatccgaacaagggttgaagactctcttaagcttcagaaacggcgagtttattgagtctttaacaagagtcatgcaaaaggggttctttgaatcacgcgcttatgctgtgttcttgttgaaatctatttccgaagtggctgaaccagtgcaactattgcatctaatacaagaactttttgtcgaactggtacaagtcctgaaggatcaaatttcacagaagacatcaaaggcgacccttcaaaccctgatccaattctctccttgggggaggaacaggatcagagctgtggaagcagctgctgttcctgttttgattgagcttcttctcgattgcaaggagagaaagccttgtgagatgatgctggtgttgttggagctgctatgccagtgtgctgagggaagagcagaacttttgagccatgcagcaggtcttgccattgtgtccaaaaagattctaagggtttcgactttggcgaatgatagagctgttaagattattctgtctctttcgaggttctctgcgactccacatgttgttcaagaaatgctgaaactcggtgtggtcgcgaaattgtgcttggtgcttcaggtggatagtggaaacagggctaaggaaaaagctagagagatactcaaattgcatgctcgggcgtggaggaattctccatgcataccgaacaatttgcttaattcatacccgaattatgtgcaaaaaaaaaaaaaaaaaa

SEQ ID NO: 52993 - protein, 425 aa, Glycine max
  peptide (1)..(425): Ceres Seq. ID no. 15226390
  misc_feature (5)..(81): Pfam Name: U-box domain Pfam Description: U-box domain
  misc_feature (4)..(293): Homolog of NCBI NO: 39545718 NR Description: OSJNBa0033G16.8 [Oryza sativa (japonica
  misc_feature (3)..(396): Homolog of NCBI NO: 30013683 NR Description: Avr9/Cf-9 rapidly elicited protein 74 [Nicotiana
  misc_feature (4)..(411): Homolog of NCBI NO: 38346713 NR Description: OSJNBa0086O06.11 [Oryza sativa (japonica
  misc_feature (3)..(396): Homolog of NCBI NO: 14582200 NR Description: immediate-early fungal elicitor protein CMPG1
  misc_feature (5)..(417): Homolog of NCBI NO: 34908566 NR Description: P0505D12.10 [Oryza sativa (japonica
  misc_feature (3)..(293): Homolog of NCBI NO: 15231222 NR Description: expressed protein [Arabidopsis thaliana]
  misc_feature (105)..(416): Homolog of NCBI NO: 15231222 NR Description: expressed protein [Arabidopsis thaliana]
  misc_feature (3)..(417): Homolog of NCBI NO: 21741126 NR Description: OSJNBa0070M12.4 [Oryza sativa (japonica
  misc_feature (3)..(416): Homolog of NCBI NO: 30686609 NR Description: expressed protein [Arabidopsis thaliana]
  misc_feature (3)..(416): Homolog of NCBI NO: 25408431 NR Description: hypothetical protein At2g35930 [imported] -
MNEIDVPSFFLCPISLDIMKDPVTVSTGITYDRESIETWLFSKKNTTCPITKLPLIDYTDLTPNHTLRRLIQAWCSMNASHGIERIPTPKPPVNKNQISKLLKDASHSPLTCLRRLKSISSGSETNKRCMEASGAVEFLASIVINTNRNIDSSHEADSNDGSGFELKTSACDEALSLLHNLHLSEQGLKTLLSFRNGEFIESLTRVMQKGFFESRAYAVFLLKSISEVAEPVQLLHLIQELFVELVQVLKDQISQKTSKATLQTLIQFSPWGRNRIRAVEAAAVPVLIELLLDCKERKPCEMMLVLLELLCQCAEGRAELLSHAAGLAIVSKKILRVSTLANDRAVKIILSLSRFSATPHVVQEMLKLGVVAKLCLVLQVDSGNRAKEKAREILKLHARAWRNSPCIPNNLLNSYPNYVQKKKKK

SEQ ID NO: 52994 - protein, 407 aa, Glycine max
  peptide (1)..(407): Ceres Seq. ID no. 15226391
  misc_feature (1)..(63): Pfam Name: U-box domain Pfam Description: U-box domain
  misc_feature (1)..(275): Homolog of NCBI NO: 39545718 NR Description: OSJNBa0033G16.8 [Oryza sativa (japonica
  misc_feature (1)..(378): Homolog of NCBI NO: 30013683 NR Description: Avr9/Cf-9 rapidly elicited protein 74 [Nicotiana
  misc_feature (1)..(393): Homolog of NCBI NO: 38346713 NR Description: OSJNBa0086O06.11 [Oryza sativa (japonica
  misc_feature (1)..(378): Homolog of NCBI NO: 14582200 NR Description: immediate-early fungal elicitor protein CMPG1
  misc_feature (1)..(399): Homolog of NCBI NO: 34908566 NR Description: P0505D12.10 [Oryza sativa (japonica
  misc_feature (1)..(275): Homolog of NCBI NO: 15231222 NR Description: expressed protein [Arabidopsis thaliana]
  misc_feature (87)..(398): Homolog of NCBI NO: 15231222 NR Description: expressed protein [Arabidopsis thaliana]
  misc_feature (1)..(399): Homolog of NCBI NO: 21741126 NR Description: OSJNBa0070M12.4 [Oryza sativa (japonica
  misc_feature (1)..(398): Homolog of NCBI NO: 30686609 NR Description: expressed protein [Arabidopsis thaliana]
  misc_feature (1)..(398): Homolog of NCBI NO: 25408431 NR Description: hypothetical protein At2g35930 [imported] -
MKDPVTVSTGITYDRESIETWLFSKKNTTCPITKLPLIDYTDLTPNHTLRRLIQAWCSMNASHGIERIPTPKPPVNKNQISKLLKDASHSPLTCLRRLKSISSGSETNKRCMEASGAVEFLASIVINTNRNIDSSHEADSNDGSGFELKTSACDEALSLLHNLHLSEQGLKTLLSFRNGEFIESLTRVMQKGFFESRAYAVFLLKSISEVAEPVQLLHLIQELFVELVQVLKDQISQKTSKATLQTLIQFSPWGRNRIRAVEAAAVPVLIELLLDCKERKPCEMMLVLLELLCQCAEGRAELLSHAAGLAIVSKKILRVSTLANDRAVKIILSLSRFSATPHVVQEMLKLGVVAKLCLVLQVDSGNRAKEKAREILKLHARAWRNSPCIPNNLLNSYPNYVQKKKKK

SEQ ID NO: 52995 - protein, 349 aa, Glycine max
  peptide (1)..(349): Ceres Seq. ID no. 15226392
  misc_feature (1)..(217): Homolog of NCBI NO: 39545718 NR Description: OSJNBa0033G16.8 [Oryza sativa (japonica
  misc_feature (1)..(320): Homolog of NCBI NO: 30013683 NR Description: Avr9/Cf-9 rapidly elicited protein 74 [Nicotiana
  misc_feature (1)..(335): Homolog of NCBI NO: 38346713 NR Description: OSJNBa0086O06.11 [Oryza sativa (japonica
  misc_feature (1)..(320): Homolog of NCBI NO: 14582200 NR Description: immediate-early fungal elicitor protein CMPG1
  misc_feature (1)..(341): Homolog of NCBI NO: 34908566 NR Description: P0505D12.10 [Oryza sativa (japonica
  misc_feature (1)..(217): Homolog of NCBI NO: 15231222 NR Description: expressed protein [Arabidopsis thaliana]
  misc_feature (29)..(340): Homolog of NCBI NO: 15231222 NR Description: expressed protein [Arabidopsis thaliana]
  misc_feature (1)..(341): Homolog of NCBI NO: 21741126 NR Description: OSJNBa0070M12.4 [Oryza sativa (japonica
  misc_feature (1)..(340): Homolog of NCBI NO: 30686609 NR Description: expressed protein [Arabidopsis thaliana]
  misc_feature (1)..(340): Homolog of NCBI NO: 25408431 NR Description: hypothetical protein At2g35930 [imported] -
MNASHGIERIPTPKPPVNKNQISKLLKDASHSPLTCLRRLKSISSGSETNKRCMEASGAVEFLASIVINTNRNIDSSHEADSNDGSGFELKTSACDEALSLLHNLHLSEQGLKTLLSFRNGEFIESLTRVMQKGFFESRAYAVFLLKSISEVAEPVQLLHLIQELFVELVQVLKDQISQKTSKATLQTLIQFSPWGRNRIRAVEAAAVPVLIELLLDCKERKPCEMMLVLLELLCQCAEGRAELLSHAAGLAIVSKKILRVSTLANDRAVKIILSLSRFSATPHVVQEMLKLGVVAKLCLVLQVDSGNRAKEKAREILKLHARAWRNSPCIPNNLLNSYPNYVQKKKKK

SEQ ID NO: 52996 - DNA, 1351 bp, Glycine max
  misc_feature (1)..(1351): Ceres Seq. ID no. 14304925
gtgaaggctttcacttgtgagcttagaaaactgaagatgggtttcacaggggagttggtaagaagtgtcttctccaaaaatcgttctgatgggtctcatgaaaacaaagtgaggcgcaatagtgctaaaaatagaagaatgttatctgtgaggtcattcttgtgtggtgatgaattcaattcagtccttgcagagaatgattcagcttcagttaagagctctgaagtcacggtttcacagtccgtacatgagggcttgttaaacgatgaaggagacactgaaagtgaagaaactgtggagaatgtagcacagaacaggccaagttcaaactccaaaaagtcattgaatgaggaagaagcagctgttcttattcaatcagcatttagaggcttcctgttgaggcgtcaaaatggagaaatcaaatcacaaactggaaaagatgagttcaatttagtaacagaaagtccagacaaaaagtccataggcacatcaattgatgtccaaacctcaaactctacggaagttttctctgtcgaaggagaaataaagggcatttgccaccgtattcagcgcaggaccagaactcaagcaataaagcaaaaggaagattgggatgacagcacagtaagtagctatgtttcaaaaatgaggatgcagaatagaatggaggcttcaaccaggagggaaagagcactggcttatgctttctcacaacagctaagaatctgttcaaagaggaaatctccaaaatttaacagcatggagtcaaatatgagttggagttggcttgagcggtggatggcaacgcgccttccggagacatcatcagttgaaagccatgccatgaagcagtatgacccttctaatggtagtcacaaattcacaatcatgacaagattttttgatgctgctggggaagaaaaggagagctgcgggtcaaatgaagtgccccttcattttgataactattccatcaattcacgagaagaaaaagttagcttcaaaccacatacaccaaagaccaacttcaaagctaggagaactgtttcaaggcggaaaacagtgcctagttatcaattccatgaagagcagccaaaggtaagcaaaagagatggttcaggcgatgctagcaaggatattaagcaaaaacaaaagcaagtgggaagcaggacagaaattgcattaagcacctcgaaagcttctaatgtgtaacttgtaaaaaataaagtcaaagtatgtgtctagtattgagatgtaatggttggattctctagtagattcttgattccataaatcttatgtgtacattgtacataatatcaagtacaagattgagatggttgttctgatg

SEQ ID NO: 52997 - protein, 403 aa, Glycine max
  peptide (1)..(403): Ceres Seq. ID no. 14304926
  misc_feature (25)..(277): Homolog of NCBI NO: 7489344 NR Description: SF16 protein, pollen specific - common sunflower
  misc_feature (88)..(293): Homolog of NCBI NO: 15232474 NR Description: expressed protein [Arabidopsis thaliana]
  misc_feature (13)..(279): Homolog of NCBI NO: 18421483 NR Description: calmodulin-binding protein family [Arabidopsis
  misc_feature (13)..(312): Homolog of NCBI NO: 9758640 NR Description: gene_id:MXH1.1~pir||T00974~similar to unknown
  misc_feature (113)..(277): Homolog of NCBI NO: 15231175 NR Description: expressed protein [Arabidopsis thaliana]
  misc_feature (102)..(348): Homolog of NCBI NO: 15982840 NR Description: AT5g03040/F15A17_70 [Arabidopsis thaliana]
  misc_feature (102)..(284): Homolog of NCBI NO: 18414094 NR Description: expressed protein [Arabidopsis thaliana]
  misc_feature (20)..(371): Homolog of NCBI NO: 15232741 NR Description: SF16 protein -related [Arabidopsis thaliana]
  misc_feature (63)..(391): Homolog of NCBI NO: 9758640 NR Description: gene_id:MXH1.1~pir||T00974~similar to unknown
  misc_feature (63)..(391): Homolog of NCBI NO: 18421483 NR Description: calmodulin-binding protein family [Arabidopsis
VKAFTCELRKLKMGFTGELVRSVFSKNRSDGSHENKVRRNSAKNRRMLSVRSFLCGDEFNSVLAENDSASVKSSEVTVSQSVHEGLLNDEGDTESEETVENVAQNRPSSNSKKSLNEEEAAVLIQSAFRGFLLRRQNGEIKSQTGKDEFNLVTESPDKKSIGTSIDVQTSNSTEVFSVEGEIKGICHRIQRRTRTQAIKQKEDWDDSTVSSYVSKMRMQNRMEASTRRERALAYAFSQQLRICSKRKSPKFNSMESNMSWSWLERWMATRLPETSSVESHAMKQYDPSNGSHKFTIMTRFFDAAGEEKESCGSNEVPLHFDNYSINSREEKVSFKPHTPKTNFKARRTVSRRKTVPSYQFHEEQPKVSKRDGSGDASKDIKQKQKQVGSRTEIALSTSKASNV

SEQ ID NO: 52998 - protein, 391 aa, Glycine max
  peptide (1)..(391): Ceres Seq. ID no. 14304927
  misc_feature (13)..(265): Homolog of NCBI NO: 7489344 NR Description: SF16 protein, pollen specific - common sunflower
  misc_feature (76)..(281): Homolog of NCBI NO: 15232474 NR Description: expressed protein [Arabidopsis thaliana]
  misc_feature (1)..(267): Homolog of NCBI NO: 18421483 NR Description: calmodulin-binding protein family [Arabidopsis
  misc_feature (1)..(300): Homolog of NCBI NO: 9758640 NR Description: gene_id:MXH1.1~pir||T00974~similar to unknown
  misc_feature (101)..(265): Homolog of NCBI NO: 15231175 NR Description: expressed protein [Arabidopsis thaliana]
  misc_feature (90)..(336): Homolog of NCBI NO: 15982840 NR Description: AT5g03040/F15A17_70 [Arabidopsis thaliana]
  misc_feature (90)..(272): Homolog of NCBI NO: 18414094 NR Description: expressed protein [Arabidopsis thaliana]
  misc_feature (8)..(359): Homolog of NCBI NO: 15232741 NR Description: SF16 protein -related [Arabidopsis thaliana]
  misc_feature (51)..(379): Homolog of NCBI NO: 9758640 NR Description: gene_id:MXH1.1~pir||T00974~similar to unknown
  misc_feature (51)..(379): Homolog of NCBI NO: 18421483 NR Description: calmodulin-binding protein family [Arabidopsis
MGFTGELVRSVFSKNRSDGSHENKVRRNSAKNRRMLSVRSFLCGDEFNSVLAENDSASVKSSEVTVSQSVHEGLLNDEGDTESEETVENVAQNRPSSNSKKSLNEEEAAVLIQSAFRGFLLRRQNGEIKSQTGKDEFNLVTESPDKKSIGTSIDVQTSNSTEVFSVEGEIKGICHRIQRRTRTQAIKQKEDWDDSTVSSYVSKMRMQNRMEASTRRERALAYAFSQQLRICSKRKSPKFNSMESNMSWSWLERWMATRLPETSSVESHAMKQYDPSNGSHKFTIMTRFFDAAGEEKESCGSNEVPLHFDNYSINSREEKVSFKPHTPKTNFKARRTVSRRKTVPSYQFHEEQPKVSKRDGSGDASKDIKQKQKQVGSRTEIALSTSKASNV

SEQ ID NO: 52999 - protein, 357 aa, Glycine max
  peptide (1)..(357): Ceres Seq. ID no. 14304928
  misc_feature (1)..(231): Homolog of NCBI NO: 7489344 NR Description: SF16 protein, pollen specific - common sunflower
  misc_feature (42)..(247): Homolog of NCBI NO: 15232474 NR Description: expressed protein [Arabidopsis thaliana]
  misc_feature (1)..(233): Homolog of NCBI NO: 18421483 NR Description: calmodulin-binding protein family [Arabidopsis
  misc_feature (1)..(266): Homolog of NCBI NO: 9758640 NR Description: gene_id:MXH1.1~pir||T00974~similar to unknown
  misc_feature (67)..(231): Homolog of NCBI NO: 15231175 NR Description: expressed protein [Arabidopsis thaliana]
  misc_feature (56)..(302): Homolog of NCBI NO: 15982840 NR Description: AT5g03040/F15A17_70 [Arabidopsis thaliana]
  misc_feature (56)..(238): Homolog of NCBI NO: 18414094 NR Description: expressed protein [Arabidopsis thaliana]
  misc_feature (1)..(325): Homolog of NCBI NO: 15232741 NR Description: SF16 protein -related [Arabidopsis thaliana]
  misc_feature (17)..(345): Homolog of NCBI NO: 9758640 NR Description: gene_id:MXH1.1~pir||T00974~similar to unknown
  misc_feature (17)..(345): Homolog of NCBI NO: 18421483 NR Description: calmodulin-binding protein family [Arabidopsis
MLSVRSFLCGDEFNSVLAENDSASVKSSEVTVSQSVHEGLLNDEGDTESEETVENVAQNRPSSNSKKSLNEEEAAVLIQSAFRGFLLRRQNGEIKSQTGKDEFNLVTESPDKKSIGTSIDVQTSNSTEVFSVEGEIKGICHRIQRRTRTQAIKQKEDWDDSTVSSYVSKMRMQNRMEASTRRERALAYAFSQQLRICSKRKSPKFNSMESNMSWSWLERWMATRLPETSSVESHAMKQYDPSNGSHKFTIMTRFFDAAGEEKESCGSNEVPLHFDNYSINSREEKVSFKPHTPKTNFKARRTVSRRKTVPSYQFHEEQPKVSKRDGSGDASKDIKQKQKQVGSRTEIALSTSKASNV

SEQ ID NO: 53000 - DNA, 1715 bp, Glycine max
  misc_feature (1)..(1715): Ceres Seq. ID no. 14306565
acactagtactcactgttgttcattgtgaaatcatcatcatcatgggttgctcagcctcaagaaccatcaccatagtggccaacaacaataaccaattagaggatccatcttctgcttctcttgcttcttctttctcttcctcttctgcctcacacaaatccattaactctacttcttcaccagcagcagcaccagttagaagaagagctctttctctcccaatgcctcttgttcatcaccctcccataaaaaagggtgacacacaccaccttgtctccctcacctccaccacctatggctcccttctcctcattgaccaaaaagacccaaacttgacccaaaaaaaccaaccccgcctcaccaaaacctcaaaccaaactgacccagcacactcactctccccagactcagtcatcaacacttgggaactcatggatggcttagatgaagaagaagaagaagaagaagaagaaattgccaatgccaagaagaagcctccttacacttccattttggacaaaccaagttcatgcaggtacacagcatttgatggttctgcaaggaagaaactgcttgattcctttgaatcactgaaaacttcacagacagcaatggaaaaggaaaactcttcttcttctccagcaccaaccaagaagccactttggcagcacttatccgaggaagctttgcttgctaagttggatccgagtgtggcttggagttacagaagagcattatcatcaaggaatctaggtagaaacaccttatctagagatgtaaggtcaatggggtctagccctttgatatttcattcttcttctttttcatttggtaagaacaatagtttgtgccgtttgtctggcactgaggacagaatagtgctttattgcactagtttgagagggatccgaaagacctatgaggattgttgttcggttaggatgattctgaggggcttcatggttgcggttgatgagagggacatctcaatggactcgtcctataggaaggagttgaaggatgctcttggtggaaaagcagtgacattgccacaggtctttatcagagggaggtatgtggggaatgctgagcaaatgaagcatctgaatgagtctggagaattggcaaggcttttggagggtttccccactcaggatcctgggtttgtgtgtgacaactgtggtgatgccaggtttgtgccatgccccaattgcaatggtagcaggaaggtgtttgagcatgaggaaggagggttgagaaggtgccctgattgcaatgagaatggcttgataagatgtccaggttgctgcccatgattggtggaaattagtcatctgaatcaggtataccccgattcgtgaagagtaatttctagaactactgatatccatttaagagataagtatctcttaaggtatatttttcagtgcccagaaagcctatggatcgaattcctgaccacaagcttaaaaaatgattaattatctgtcaatcatatcacatcatattgataatgatgttcttgtgtttgtttattggagtagaatttgtcattataaattttgacaactaccaagaatgcacatttcagtttcgtcctttgtttttagttagtactactttcagctgttatttgtttatgtcagacttttgctttattagcgtttaattacccttgtgaacagcagaaaataaaaaactgacaaggttatgt

SEQ ID NO: 53001 - protein, 438 aa, Glycine max
  peptide (1)..(438): Ceres Seq. ID no. 14306566
  misc_feature (292)..(379): Pfam Name: Glutaredoxin Pfam Description: Glutaredoxin
  misc_feature (78)..(106): Homolog of NCBI NO: 22327469 NR Description: expressed protein [Arabidopsis thaliana]
  misc_feature (290)..(436): Homolog of NCBI NO: 22327469 NR Description: expressed protein [Arabidopsis thaliana]
  misc_feature (86)..(436): Homolog of NCBI NO: 15237554 NR Description: expressed protein [Arabidopsis thaliana]
  misc_feature (411)..(437): Homolog of NCBI NO: 15228503 NR Description: expressed protein [Arabidopsis thaliana]
  misc_feature (68)..(416): Homolog of NCBI NO: 15228503 NR Description: expressed protein [Arabidopsis thaliana]
  misc_feature (293)..(437): Homolog of NCBI NO: 34899098 NR Description: hypothetical protein~similar to Arabidopsis
  misc_feature (273)..(436): Homolog of NCBI NO: 15240723 NR Description: expressed protein [Arabidopsis thaliana]
  misc_feature (145)..(437): Homolog of NCBI NO: 15451042 NR Description: putative protein [Arabidopsis thaliana]
  misc_feature (37)..(437): Homolog of NCBI NO: 15227326 NR Description: expressed protein [Arabidopsis thaliana]
  misc_feature (38)..(437): Homolog of NCBI NO: 30694571 NR Description: expressed protein [Arabidopsis thaliana]
TLVLTVVHCEIIIIMGCSASRTITIVANNNNQLEDPSSASLASSFSSSSASHKSINSTSSPAAAPVRRRALSLPMPLVHHPPIKKGDTHHLVSLTSTTYGSLLLIDQKDPNLTQKNQPRLTKTSNQTDPAHSLSPDSVINTWELMDGLDEEEEEEEEEIANAKKKPPYTSILDKPSSCRYTAFDGSARKKLLDSFESLKTSQTAMEKENSSSSPAPTKKPLWQHLSEEALLAKLDPSVAWSYRRALSSRNLGRNTLSRDVRSMGSSPLIFHSSSFSFGKNNSLCRLSGTEDRIVLYCTSLRGIRKTYEDCCSVRMILRGFMVAVDERDISMDSSYRKELKDALGGKAVTLPQVFIRGRYVGNAEQMKHLNESGELARLLEGFPTQDPGFVCDNCGDARFVPCPNCNGSRKVFEHEEGGLRRCPDCNENGLIRCPGCCP

SEQ ID NO: 53002 - protein, 424 aa, Glycine max
  peptide (1)..(424): Ceres Seq. ID no. 14306567
  misc_feature (278)..(365): Pfam Name: Glutaredoxin Pfam Description: Glutaredoxin
  misc_feature (64)..(92): Homolog of NCBI NO: 22327469 NR Description: expressed protein [Arabidopsis thaliana]
  misc_feature (276)..(422): Homolog of NCBI NO: 22327469 NR Description: expressed protein [Arabidopsis thaliana]
  misc_feature (72)..(422): Homolog of NCBI NO: 15237554 NR Description: expressed protein [Arabidopsis thaliana]
  misc_feature (397)..(423): Homolog of NCBI NO: 15228503 NR Description: expressed protein [Arabidopsis thaliana]
  misc_feature (54)..(402): Homolog of NCBI NO: 15228503 NR Description: expressed protein [Arabidopsis thaliana]
  misc_feature (279)..(423): Homolog of NCBI NO: 34899098 NR Description: hypothetical protein~similar to Arabidopsis
  misc_feature (259)..(422): Homolog of NCBI NO: 15240723 NR Description: expressed protein [Arabidopsis thaliana]
  misc_feature (131)..(423): Homolog of NCBI NO: 15451042 NR Description: putative protein [Arabidopsis thaliana]
  misc_feature (23)..(423): Homolog of NCBI NO: 15227326 NR Description: expressed protein [Arabidopsis thaliana]
  misc_feature (24)..(423): Homolog of NCBI NO: 30694571 NR Description: expressed protein [Arabidopsis thaliana]
MGCSASRTITIVANNNNQLEDPSSASLASSFSSSSASHKSINSTSSPAAAPVRRRALSLPMPLVHHPPIKKGDTHHLVSLTSTTYGSLLLIDQKDPNLTQKNQPRLTKTSNQTDPAHSLSPDSVINTWELMDGLDEEEEEEEEEIANAKKKPPYTSILDKPSSCRYTAFDGSARKKLLDSFESLKTSQTAMEKENSSSSPAPTKKPLWQHLSEEALLAKLDPSVAWSYRRALSSRNLGRNTLSRDVRSMGSSPLIFHSSSFSFGKNNSLCRLSGTEDRIVLYCTSLRGIRKTYEDCCSVRMILRGFMVAVDERDISMDSSYRKELKDALGGKAVTLPQVFIRGRYVGNAEQMKHLNESGELARLLEGFPTQDPGFVCDNCGDARFVPCPNCNGSRKVFEHEEGGLRRCPDCNENGLIRCPGCCP

SEQ ID NO: 53003 - protein, 364 aa, Glycine max
  peptide (1)..(364): Ceres Seq. ID no. 14306568
  misc_feature (218)..(305): Pfam Name: Glutaredoxin Pfam Description: Glutaredoxin
  misc_feature (4)..(32): Homolog of NCBI NO: 22327469 NR Description: expressed protein [Arabidopsis thaliana]
  misc_feature (216)..(362): Homolog of NCBI NO: 22327469 NR Description: expressed protein [Arabidopsis thaliana]
  misc_feature (12)..(362): Homolog of NCBI NO: 15237554 NR Description: expressed protein [Arabidopsis thaliana]
  misc_feature (337)..(363): Homolog of NCBI NO: 15228503 NR Description: expressed protein [Arabidopsis thaliana]
  misc_feature (1)..(342): Homolog of NCBI NO: 15228503 NR Description: expressed protein [Arabidopsis thaliana]
  misc_feature (219)..(363): Homolog of NCBI NO: 34899098 NR Description: hypothetical protein~similar to Arabidopsis
  misc_feature (199)..(362): Homolog of NCBI NO: 15240723 NR Description: expressed protein [Arabidopsis thaliana]
  misc_feature (71)..(363): Homolog of NCBI NO: 15451042 NR Description: putative protein [Arabidopsis thaliana]
  misc_feature (1)..(363): Homolog of NCBI NO: 15227326 NR Description: expressed protein [Arabidopsis thaliana]
  misc_feature (1)..(363): Homolog of NCBI NO: 30694571 NR Description: expressed protein [Arabidopsis thaliana]
MPLVHHPPIKKGDTHHLVSLTSTTYGSLLLIDQKDPNLTQKNQPRLTKTSNQTDPAHSLSPDSVINTWELMDGLDEEEEEEEEEIANAKKKPPYTSILDKPSSCRYTAFDGSARKKLLDSFESLKTSQTAMEKENSSSSPAPTKKPLWQHLSEEALLAKLDPSVAWSYRRALSSRNLGRNTLSRDVRSMGSSPLIFHSSSFSFGKNNSLCRLSGTEDRIVLYCTSLRGIRKTYEDCCSVRMILRGFMVAVDERDISMDSSYRKELKDALGGKAVTLPQVFIRGRYVGNAEQMKHLNESGELARLLEGFPTQDPGFVCDNCGDARFVPCPNCNGSRKVFEHEEGGLRRCPDCNENGLIRCPGCCP

SEQ ID NO: 53004 - DNA, 1305 bp, Glycine max
  misc_feature (1)..(1305): Ceres Seq. ID no. 14304693
aaaccaatgaacacggtgtcaagccacctgaaaccctagttcaaaaatttgcatatcctacagtaacaacctcaatagacccaacaatcccagtcccagctcccccaatagatcaaggtcagaagatgaggaagaaaatgagaaagagaagtgcccttataagcaaaggagcagaacctgatgaacatgatgacaagccacctggaaccccagttcaaagatctatacatcctatagcagaaccctcaatagacccaacaattccagcaagccaaactcctccagtagacccagcaaccccagtagaccctgaaccgatgaccaagaaaaagaggaagaagaaaaggaacagtgcaaaaaatgaagggttagaatctgagaaacacaatgctgatcgaattgcaraaaccccagttcaaaaaactgaaggatccacaactgaaaattctatgggcagatgcaatgttgagccagctggtaaaaccctggttcagattactgacactctcagagtgactaaatccccctttaaacatcatggtgaaagttccttgagatgccgggcatgccgacagcctggtcatagattccaacaatgccagcggctgaaatgtctttccatggatgaggaagtttgcttcttttgtggggaaattggacattcccttggaaaatgcgatgtgtctcaagcagggggaggaaggtttgctaagtgcttactctgttatggacatggacacttcagctataactgtcctcaaaatggtcatggaattgatccaaaggtgcttgcagtcaatggggctatcaatagaacagcagtggaagctcgaagagagctcttgccgaggtttaatatgtgagcagggatggtctttcggatcactccaagtcaatttacacaagtactcgtgctcatgtatatagttctggatctcggttccttagcggcctaagttttgatgattttatatcatgtctggtagcatggtgcccaatttttttttttttttatttcaagttctcttatgtaacataaacggtaatattatttcagaccttgttgggtttttgaatccattttgtatttcttttctacgtggggactagttgggataatgcctcagtctactccttgcagaagttagaattaagatagtggagtagtaagttcaacacgggaattggcccccaaatttctgaattcagttgatgataatagttgagacaatttggtcgcagtccctcggaatatagaatggattgcctgagtaatgatgtatgaactttatttacgattttttt

SEQ ID NO: 53005 - protein, 286 aa, Glycine max
  peptide (1)..(286): Ceres Seq. ID no. 14304694
  misc_feature (167)..(260): Homolog of NCBI NO: 17532917 NR Description: zinc-finger protein like (43.0 kD) (2C344)
  misc_feature (140)..(261): Homolog of NCBI NO: 19115393 NR Description: hypothetical zinc-finger protein
  misc_feature (140)..(261): Homolog of NCBI NO: 10185129 NR Description: SPAC694.01c [Schizosaccharomyces pombe]
  misc_feature (140)..(266): Homolog of NCBI NO: 11359185 NR Description: hypothetical zinc-finger protein
  misc_feature (93)..(261): Homolog of NCBI NO: 38345588 NR Description: OSJNBb0012E24.6 [Oryza sativa (japonica
  misc_feature (93)..(260): Homolog of NCBI NO: 26452133 NR Description: unknown protein [Arabidopsis thaliana]
  misc_feature (93)..(260): Homolog of NCBI NO: 15237136 NR Description: expressed protein [Arabidopsis thaliana]
  misc_feature (135)..(135): Xaa is any aa, unknown or other
TNEHGVKPPETLVQKFAYPTVTTSIDPTIPVPAPPIDQGQKMRKKMRKRSALISKGAEPDEHDDKPPGTPVQRSIHPIAEPSIDPTIPASQTPPVDPATPVDPEPMTKKKRKKKRNSAKNEGLESEKHNADRIAXTPVQKTEGSTTENSMGRCNVEPAGKTLVQITDTLRVTKSPFKHHGESSLRCRACRQPGHRFQQCQRLKCLSMDEEVCFFCGEIGHSLGKCDVSQAGGGRFAKCLLCYGHGHFSYNCPQNGHGIDPKVLAVNGAINRTAVEARRELLPRFNM

SEQ ID NO: 53006 - protein, 245 aa, Glycine max
  peptide (1)..(245): Ceres Seq. ID no. 14304695
  misc_feature (126)..(219): Homolog of NCBI NO: 17532917 NR Description: zinc-finger protein like (43.0 kD) (2C344)
  misc_feature (99)..(220): Homolog of NCBI NO: 19115393 NR Description: hypothetical zinc-finger protein
  misc_feature (99)..(220): Homolog of NCBI NO: 10185129 NR Description: SPAC694.01c [Schizosaccharomyces pombe]
  misc_feature (99)..(225): Homolog of NCBI NO: 11359185 NR Description: hypothetical zinc-finger protein
  misc_feature (52)..(220): Homolog of NCBI NO: 38345588 NR Description: OSJNBb0012E24.6 [Oryza sativa (japonica
  misc_feature (52)..(219): Homolog of NCBI NO: 26452133 NR Description: unknown protein [Arabidopsis thaliana]
  misc_feature (52)..(219): Homolog of NCBI NO: 15237136 NR Description: expressed protein [Arabidopsis thaliana]
  misc_feature (94)..(94): Xaa is any aa, unknown or other
MRKKMRKRSALISKGAEPDEHDDKPPGTPVQRSIHPIAEPSIDPTIPASQTPPVDPATPVDPEPMTKKKRKKKRNSAKNEGLESEKHNADRIAXTPVQKTEGSTTENSMGRCNVEPAGKTLVQITDTLRVTKSPFKHHGESSLRCRACRQPGHRFQQCQRLKCLSMDEEVCFFCGEIGHSLGKCDVSQAGGGRFAKCLLCYGHGHFSYNCPQNGHGIDPKVLAVNGAINRTAVEARRELLPRFNM

SEQ ID NO: 53007 - protein, 241 aa, Glycine max
  peptide (1)..(241): Ceres Seq. ID no. 14304696
  misc_feature (122)..(215): Homolog of NCBI NO: 17532917 NR Description: zinc-finger protein like (43.0 kD) (2C344)
  misc_feature (95)..(216): Homolog of NCBI NO: 19115393 NR Description: hypothetical zinc-finger protein
  misc_feature (95)..(216): Homolog of NCBI NO: 10185129 NR Description: SPAC694.01c [Schizosaccharomyces pombe]
  misc_feature (95)..(221): Homolog of NCBI NO: 11359185 NR Description: hypothetical zinc-finger protein
  misc_feature (48)..(216): Homolog of NCBI NO: 38345588 NR Description: OSJNBb0012E24.6 [Oryza sativa (japonica
  misc_feature (48)..(215): Homolog of NCBI NO: 26452133 NR Description: unknown protein [Arabidopsis thaliana]
  misc_feature (48)..(215): Homolog of NCBI NO: 15237136 NR Description: expressed protein [Arabidopsis thaliana]
  misc_feature (90)..(90): Xaa is any aa, unknown or other
MRKRSALISKGAEPDEHDDKPPGTPVQRSIHPIAEPSIDPTIPASQTPPVDPATPVDPEPMTKKKRKKKRNSAKNEGLESEKHNADRIAXTPVQKTEGSTTENSMGRCNVEPAGKTLVQITDTLRVTKSPFKHHGESSLRCRACRQPGHRFQQCQRLKCLSMDEEVCFFCGEIGHSLGKCDVSQAGGGRFAKCLLCYGHGHFSYNCPQNGHGIDPKVLAVNGAINRTAVEARRELLPRFNM

SEQ ID NO: 53008 - DNA, 1574 bp, Glycine max
  misc_feature (1)..(1574): Ceres Seq. ID no. 14306569
actctctccatcaaataccaatcaatcaaaaagccagcgagaaaatgaaaattcgtggtggaataatcatagactgaagagaaaagttgtcgttgtgcagtgcactgtcatggaagaggatgaagagacgcagcaacgagtcactgactcgtccctctccaccgagtcacgcacttccactccttctgatggagcgccacccaactcggaaaccctagttcaccgctcctcgcttccgcatgaccttgccactcatatgcagggcagctctaccgcacataaaggtggaaaagctgagagtaaggtgtcagctcagcctcctgatgaggaaactattgaaaaagatgcagttgaggcacctcaaaaacagacagaaaatcaacttcagtctgtttgttcaacttcattatctgaactatcaccaacttctgtttcacattctttatcatctgcccttagtcccactgtatcacaacagagaccatctcctcccaaggctaatagtgtacaagtgtcgaaaggagacaaaggaacaccttctgatggtacaaccttatcttctgtttctgctgtaagggcatctgcatctgatggatacaactggcggaagtacggccagaagcaagtgaagaatcctatgggttctcgaagctattacaagtgtacccattcaaattgttgtgctaagaagattaaattttgtgaccattcaggacatgtgatagagattgtttataaaagtcaacataatcatgatcctccgcataaaattgataccaccaaggaaagtaagctcctgccttccagtgaacctaaagaagaaagcagtgttccaaagcagtctaccaaagttctgaataattctgatccatcatcttctccgaaagaacctttgcaagaagcaccctgcaatggtgataagaatctagaaaactcatctaatgttgagaatggtaaaattattttgaaggaaaagcatgtcaatgaccgagagccaaaaagaagattgaacaatggtgatttggattcagcagtaaaacatggcaagaaaccaaagtttgttgtacatgcgacagaggatgtggggatatcaggtgatggataccggtggcgcaagtagggacaaaagttggtgaagggaaatccacatttcagaaactactacagatgcacttcttctggatgtcctgtccgaaagcacattgagactgctgtggataattcaaaagctctcatcataacatacaagggagtgcatgatcatgacatgcctgtacccaagaaacgacatggcccgcctagtgcttcacttgtggctgcggcagcacctgcttcaatgaacaatgtgcagttcaaaaaaactggcttgctgcaaagccaggaaactgaagctcaatgttcagaggacacagaaggagaattgatgggggaagcgatggaccttgagggtgagaaagcaattgagtcggctcgaactcttttgagcataggttttgaaattaaaccttgttgaatacatcttttcataaactcatgcagttgcatctatataaattaattggtaggcctcatgt

SEQ ID NO: 53009 - protein, 372 aa, Glycine max
  peptide (1)..(372): Ceres Seq. ID no. 14306570
  misc_feature (197)..(252): Pfam Name: WRKY DNA -binding domain Pfam Description: WRKY DNA -binding domain
  misc_feature (109)..(372): Homolog of NCBI NO: 25348323 NR Description: DNA-binding protein WRKY2 [imported] - common
  misc_feature (75)..(372): Homolog of NCBI NO: 25407696 NR Description: hypothetical protein AT4g30930 [imported] -
  misc_feature (75)..(372): Homolog of NCBI NO: 22329039 NR Description: WRKY family transcription factor [Arabidopsis
  misc_feature (37)..(372): Homolog of NCBI NO: 29839502 NR Description: Probable WRKY transcription factor 32 (WRKY
LSPSNTNQSKSQRENENSWWNNHRLKRKVVVVQCTVMEEDEETQQRVTDSSLSTESRTSTPSDGAPPNSETLVHRSSLPHDLATHMQGSSTAHKGGKAESKVSAQPPDEETIEKDAVEAPQKQTENQLQSVCSTSLSELSPTSVSHSLSSALSPTVSQQRPSPPKANSVQVSKGDKGTPSDGTTLSSVSAVRASASDGYNWRKYGQKQVKNPMGSRSYYKCTHSNCCAKKIKFCDHSGHVIEIVYKSQHNHDPPHKIDTTKESKLLPSSEPKEESSVPKQSTKVLNNSDPSSSPKEPLQEAPCNGDKNLENSSNVENGKIILKEKHVNDREPKRRLNNGDLDSAVKHGKKPKFVVHATEDVGISGDGYRWRK

SEQ ID NO: 53010 - protein, 336 aa, Glycine max
  peptide (1)..(336): Ceres Seq. ID no. 14306571
  misc_feature (161)..(216): Pfam Name: WRKY DNA -binding domain Pfam Description: WRKY DNA -binding domain
  misc_feature (73)..(336): Homolog of NCBI NO: 25348323 NR Description: DNA-binding protein WRKY2 [imported] - common
  misc_feature (39)..(336): Homolog of NCBI NO: 25407696 NR Description: hypothetical protein AT4g30930 [imported] -
  misc_feature (39)..(336): Homolog of NCBI NO: 22329039 NR Description: WRKY family transcription factor [Arabidopsis
  misc_feature (1)..(336): Homolog of NCBI NO: 29839502 NR Description: Probable WRKY transcription factor 32 (WRKY
MEEDEETQQRVTDSSLSTESRTSTPSDGAPPNSETLVHRSSLPHDLATHMQGSSTAHKGGKAESKVSAQPPDEETIEKDAVEAPQKQTENQLQSVCSTSLSELSPTSVSHSLSSALSPTVSQQRPSPPKANSVQVSKGDKGTPSDGTTLSSVSAVRASASDGYNWRKYGQKQVKNPMGSRSYYKCTHSNCCAKKIKFCDHSGHVIEIVYKSQHNHDPPHKIDTTKESKLLPSSEPKEESSVPKQSTKVLNNSDPSSSPKEPLQEAPCNGDKNLENSSNVENGKIILKEKHVNDREPKRRLNNGDLDSAVKHGKKPKFVVHATEDVGISGDGYRWRK

SEQ ID NO: 53011 - protein, 287 aa, Glycine max
  peptide (1)..(287): Ceres Seq. ID no. 14306572
  misc_feature (112)..(167): Pfam Name: WRKY DNA -binding domain Pfam Description: WRKY DNA -binding domain
  misc_feature (24)..(287): Homolog of NCBI NO: 25348323 NR Description: DNA-binding protein WRKY2 [imported] - common
  misc_feature (1)..(287): Homolog of NCBI NO: 25407696 NR Description: hypothetical protein AT4g30930 [imported] -
  misc_feature (1)..(287): Homolog of NCBI NO: 22329039 NR Description: WRKY family transcription factor [Arabidopsis
  misc_feature (1)..(287): Homolog of NCBI NO: 29839502 NR Description: Probable WRKY transcription factor 32 (WRKY
MQGSSTAHKGGKAESKVSAQPPDEETIEKDAVEAPQKQTENQLQSVCSTSLSELSPTSVSHSLSSALSPTVSQQRPSPPKANSVQVSKGDKGTPSDGTTLSSVSAVRASASDGYNWRKYGQKQVKNPMGSRSYYKCTHSNCCAKKIKFCDHSGHVIEIVYKSQHNHDPPHKIDTTKESKLLPSSEPKEESSVPKQSTKVLNNSDPSSSPKEPLQEAPCNGDKNLENSSNVENGKIILKEKHVNDREPKRRLNNGDLDSAVKHGKKPKFVVHATEDVGISGDGYRWRK

SEQ ID NO: 53012 - DNA, 1608 bp, Glycine max
  misc_feature (1)..(1608): Ceres Seq. ID no. 13532807
atttttttcatatacaacaaacacggattcattgcatcaccgtcaccaccactttcatcatcataaaacatttttcatataaataaaatatattcattcattcacacatcgtaataatcattatctatcattctctctctttcaattttagacagaagactaaaagagtgaagagaacaaacagagcaatggaaggaggaggagctgctccgccggccgacaccgtgatgtccgacgcggcgcctccgccgcagcaagcgatggctatggggatcgagaatattccggcgacgctgagccacggtggcaggttcatccaatacaacatattcggaaacatattcgaagtcaccgccaaatacaagccacccatcatgcccatcggaaaaggcgcatacggcatcgtttgctcggctttgaactcggagacgaatgagcacgttgccatcaagaagattgcgaatgcgtttgataacaagattgatgcaaagaggaccctccgtgaaatcaagctgcttcgtcacatggatcatgaaaacgtggttgcaatcagggatatagtgccaccacctcaaagggagatattcaatgatgtttacattgcatatgagttgatggacactgaccttcaccaaattattcgttcaaaccaaggattatcagaggagcactgtcagtattttctgtatcaaatcctccgtgggttgaagtacatacattctgccaatgttctgcatagggacttaaaacctagcaaccttctcctgaatgccaactgtgacttaaaaatttgtgattttggactggctcgtgtcacgtctgaaactgattttatgactgaatatgttgttacaagatggtaccgtgcaccagagcttctgttgaactcttctgattacactgcagcaattgatgtatggtctgttggttgtattttcatggaactgatggatcgcaagcctttgtttcctggcagagatcatgtgcatcagttgcgtctacttatggagctgattggcaccccatcagaggctgatttggggttcctgaatgaaaatgctaagagatacattaggcaactacccctttaccgccgtcaatctttccaggaaaagtttccacatgtccatcctgaagctatagatcttgttgaaaaaatgttaacttttgatcctagaaaaaggattactgttgaagatgcactggcgcacccgtacttgacatctctgcatgacatcagtgatgaaccagtgtgcatgactcccttcaactttgactttgaacaacatgctttgacggaggaacagatgaaagaactgatataccgagaggctctagcatttaaccctgagtatcagcagtagtagtgatagtcttgttgtcattggatttggatcgtgtgatgtttgtgtccatagatcaagggatttcattgtgtatatatatctatcatctgaaaccagatgatcttggagttgaattatttccatcagagacatgattggtagactggaacaatcgtaaggtatttgtattggcttatttgcttcatattattattgtccaattcattggctccagccaactgataaatcttttcttggtctc

SEQ ID NO: 53013 - protein, 391 aa, Glycine max
  peptide (1)..(391): Ceres Seq. ID no. 13532808
  misc_feature (59)..(344): Pfam Name: Protein kinase domain Pfam Description: Protein kinase domain
  misc_feature (5)..(390): Homolog of NCBI NO: 8925323 NR Description: MAP kinase 2 [Capsicum annuum]
  misc_feature (6)..(391): Homolog of NCBI NO: 21165523 NR Description: mitogen-activated protein kinase [Solanum
  misc_feature (5)..(391): Homolog of NCBI NO: 25052802 NR Description: mitogen-activated protein kinase 6 [Petroselinum
  misc_feature (5)..(390): Homolog of NCBI NO: 21165525 NR Description: mitogen-activated protein kinase [Solanum
  misc_feature (5)..(391): Homolog of NCBI NO: 30171839 NR Description: mitogen-activated protein kinase 1 [Lycopersicon
  misc_feature (5)..(391): Homolog of NCBI NO: 30962145 NR Description: Mitogen-activated protein kinase [Lycopersicon
  misc_feature (5)..(390): Homolog of NCBI NO: 30171843 NR Description: mitogen-activated protein kinase 2 [Lycopersicon
  misc_feature (5)..(390): Homolog of NCBI NO: 2499615 NR Description: MITOGEN-ACTIVATED PROTEIN KINASE HOMOLOG NTF4
  misc_feature (1)..(391): Homolog of NCBI NO: 585454 NR Description: MITOGEN-ACTIVATED PROTEIN KINASE HOMOLOG D5
  misc_feature (1)..(391): Homolog of NCBI NO: 585519 NR Description: MITOGEN-ACTIVATED PROTEIN KINASE HOMOLOG MMK1
MEGGGAAPPADTVMSDAAPPPQQAMAMGIENIPATLSHGGRFIQYNIFGNIFEVTAKYKPPIMPIGKGAYGIVCSALNSETNEHVAIKKIANAFDNKIDAKRTLREIKLLRHMDHENVVAIRDIVPPPQREIFNDVYIAYELMDTDLHQIIRSNQGLSEEHCQYFLYQILRGLKYIHSANVLHRDLKPSNLLLNANCDLKICDFGLARVTSETDFMTEYVVTRWYRAPELLLNSSDYTAAIDVWSVGCIFMELMDRKPLFPGRDHVHQLRLLMELIGTPSEADLGFLNENAKRYIRQLPLYRRQSFQEKFPHVHPEAIDLVEKMLTFDPRKRITVEDALAHPYLTSLHDISDEPVCMTPFNFDFEQHALTEEQMKELIYREALAFNPEYQQ

SEQ ID NO: 53014 - protein, 378 aa, Glycine max
  peptide (1)..(378): Ceres Seq. ID no. 13532809
  misc_feature (46)..(331): Pfam Name: Protein kinase domain Pfam Description: Protein kinase domain
  misc_feature (1)..(377): Homolog of NCBI NO: 8925323 NR Description: MAP kinase 2 [Capsicum annuum]
  misc_feature (1)..(378): Homolog of NCBI NO: 21165523 NR Description: mitogen-activated protein kinase [Solanum
  misc_feature (1)..(378): Homolog of NCBI NO: 25052802 NR Description: mitogen-activated protein kinase 6 [Petroselinum
  misc_feature (1)..(377): Homolog of NCBI NO: 21165525 NR Description: mitogen-activated protein kinase [Solanum
  misc_feature (1)..(378): Homolog of NCBI NO: 30171839 NR Description: mitogen-activated protein kinase 1 [Lycopersicon
  misc_feature (1)..(378): Homolog of NCBI NO: 30962145 NR Description: Mitogen-activated protein kinase [Lycopersicon
  misc_feature (1)..(377): Homolog of NCBI NO: 30171843 NR Description: mitogen-activated protein kinase 2 [Lycopersicon
  misc_feature (1)..(377): Homolog of NCBI NO: 2499615 NR Description: MITOGEN-ACTIVATED PROTEIN KINASE HOMOLOG NTF4
  misc_feature (1)..(378): Homolog of NCBI NO: 585454 NR Description: MITOGEN-ACTIVATED PROTEIN KINASE HOMOLOG D5
  misc_feature (1)..(378): Homolog of NCBI NO: 585519 NR Description: MITOGEN-ACTIVATED PROTEIN KINASE HOMOLOG MMK1
MSDAAPPPQQAMAMGIENIPATLSHGGRFIQYNIFGNIFEVTAKYKPPIMPIGKGAYGIVCSALNSETNEHVAIKKIANAFDNKIDAKRTLREIKLLRHMDHENVVAIRDIVPPPQREIFNDVYIAYELMDTDLHQIIRSNQGLSEEHCQYFLYQILRGLKYIHSANVLHRDLKPSNLLLNANCDLKICDFGLARVTSETDFMTEYVVTRWYRAPELLLNSSDYTAAIDVWSVGCIFMELMDRKPLFPGRDHVHQLRLLMELIGTPSEADLGFLNENAKRYIRQLPLYRRQSFQEKFPHVHPEAIDLVEKMLTFDPRKRITVEDALAHPYLTSLHDISDEPVCMTPFNFDFEQHALTEEQMKELIYREALAFNPEYQQ

SEQ ID NO: 53015 - protein, 367 aa, Glycine max
  peptide (1)..(367): Ceres Seq. ID no. 13532810
  misc_feature (35)..(320): Pfam Name: Protein kinase domain Pfam Description: Protein kinase domain
  misc_feature (1)..(366): Homolog of NCBI NO: 8925323 NR Description: MAP kinase 2 [Capsicum annuum]
  misc_feature (1)..(367): Homolog of NCBI NO: 21165523 NR Description: mitogen-activated protein kinase [Solanum
  misc_feature (1)..(367): Homolog of NCBI NO: 25052802 NR Description: mitogen-activated protein kinase 6 [Petroselinum
  misc_feature (1)..(366): Homolog of NCBI NO: 21165525 NR Description: mitogen-activated protein kinase [Solanum
  misc_feature (1)..(367): Homolog of NCBI NO: 30171839 NR Description: mitogen-activated protein kinase 1 [Lycopersicon
  misc_feature (1)..(367): Homolog of NCBI NO: 30962145 NR Description: Mitogen-activated protein kinase [Lycopersicon
  misc_feature (1)..(366): Homolog of NCBI NO: 30171843 NR Description: mitogen-activated protein kinase 2 [Lycopersicon
  misc_feature (1)..(366): Homolog of NCBI NO: 2499615 NR Description: MITOGEN-ACTIVATED PROTEIN KINASE HOMOLOG NTF4
  misc_feature (1)..(367): Homolog of NCBI NO: 585454 NR Description: MITOGEN-ACTIVATED PROTEIN KINASE HOMOLOG D5
  misc_feature (1)..(367): Homolog of NCBI NO: 585519 NR Description: MITOGEN-ACTIVATED PROTEIN KINASE HOMOLOG MMK1
MAMGIENIPATLSHGGRFIQYNIFGNIFEVTAKYKPPIMPIGKGAYGIVCSALNSETNEHVAIKKIANAFDNKIDAKRTLREIKLLRHMDHENVVAIRDIVPPPQREIFNDVYIAYELMDTDLHQIIRSNQGLSEEHCQYFLYQILRGLKYIHSANVLHRDLKPSNLLLNANCDLKICDFGLARVTSETDFMTEYVVTRWYRAPELLLNSSDYTAAIDVWSVGCIFMELMDRKPLFPGRDHVHQLRLLMELIGTPSEADLGFLNENAKRYIRQLPLYRRQSFQEKFPHVHPEAIDLVEKMLTFDPRKRITVEDALAHPYLTSLHDISDEPVCMTPFNFDFEQHALTEEQMKELIYREALAFNPEYQQ

SEQ ID NO: 53016 - DNA, 998 bp, Glycine max
  misc_feature (1)..(998): Ceres Seq. ID no. 12606804
aggaaagagaatggaatttcctcactgctcccttcaaacagattacagctgttgcatcagtatgtgcggatccttgctgaactttcacaagaaaagtataatacaggattgtatctagagtcgcttgcagttgagttggtggttttagctatatggaaaaagactctagaaatttgtagcttttggatggcctcaattacaaagagtgagttgcctggaagcagttcggctaatgaatccatatctgctagtgatgttgacttgccacagtctacagaacagaaaataaattttagtgatccttcatctatctccttgtgggcgaaacatgagtttattgatgcagttgatcgtgctgagaaactatcatgtcatgttcaaaatatggatagggcagctgagatgccagatgcaatggaaattatattccaaaaagctctcttaattgggacaagtggtgctgtagatgaatatatggaggtccgagatagggctggtgcatcttactcaaaagcgatgcttctactttcatttatcgtggcagaagcagagaaccttgcagtgaacccaccattttncacttgtatccgctaataaggagcgaatcttacaatatattcacagcttgcagtctcgtaaaaaattttcagcggagtcctcttcagagaaagcacattcacttttatcaaagtaaataactggtttttatagtgactttgcatcaccacttttggaatcggtgaagcaatttgttgttggcatgaatgttgacttcctatgatgagtacggacgagaagcaacctttgacagataccatattgtatatagatagatatatatgacctatcatggccttgtaaggccactttgcctttactgcatgatttcatgtatagaatgtgtaattctttgacatggaatttgtaaatagtgtatagcttatagtcctgtgcaatttttaaaccactattatcaatgaattgagagtttttagggg

SEQ ID NO: 53017 - protein, 197 aa, Glycine max
  peptide (1)..(197): Ceres Seq. ID no. 12606805
  misc_feature (14)..(191): Homolog of NCBI NO: 30687274 NR Description: protein kinase family [Arabidopsis thaliana]
  misc_feature (14)..(191): Homolog of NCBI NO: 30693945 NR Description: protein kinase family [Arabidopsis thaliana]
  misc_feature (14)..(191): Homolog of NCBI NO: 11357820 NR Description: hypothetical protein F5K20.230 - Arabidopsis
  misc_feature (14)..(191): Homolog of NCBI NO: 26452168 NR Description: unknown protein [Arabidopsis thaliana]
  misc_feature (14)..(191): Homolog of NCBI NO: 30687278 NR Description: protein kinase family [Arabidopsis thaliana]
  misc_feature (14)..(191): Homolog of NCBI NO: 25408568 NR Description: hypothetical protein At2g37850 [imported] -
  misc_feature (14)..(190): Homolog of NCBI NO: 34902042 NR Description: putative S_TKc, Serine/Threonine protein kinases,
  misc_feature (14)..(166): Homolog of NCBI NO: 34902242 NR Description: Putative serine/threonine protein kinase
  misc_feature (6)..(192): Homolog of NCBI NO: 11358841 NR Description: serine/threonine-protein kinase-like protein -
  misc_feature (11)..(192): Homolog of NCBI NO: 18412205 NR Description: serine/threonine-protein kinase-like protein
  misc_feature (193)..(193): Xaa is any aa, unknown or other
RKENGISSLLPSNRLQLLHQYVRILAELSQEKYNTGLYLESLAVELVVLAIWKKTLEICSFWMASITKSELPGSSSANESISASDVDLPQSTEQKINFSDPSSISLWAKHEFIDAVDRAEKLSCHVQNMDRAAEMPDAMEIIFQKALLIGTSGAVDEYMEVRDRAGASYSKAMLLLSFIVAEAENLAVNPPFXTCIR

SEQ ID NO: 53018 - protein, 135 aa, Glycine max
  peptide (1)..(135): Ceres Seq. ID no. 12606806
  misc_feature (1)..(129): Homolog of NCBI NO: 30687274 NR Description: protein kinase family [Arabidopsis thaliana]
  misc_feature (1)..(129): Homolog of NCBI NO: 30693945 NR Description: protein kinase family [Arabidopsis thaliana]
  misc_feature (1)..(129): Homolog of NCBI NO: 11357820 NR Description: hypothetical protein F5K20.230 - Arabidopsis
  misc_feature (1)..(129): Homolog of NCBI NO: 26452168 NR Description: unknown protein [Arabidopsis thaliana]
  misc_feature (1)..(129): Homolog of NCBI NO: 30687278 NR Description: protein kinase family [Arabidopsis thaliana]
  misc_feature (1)..(129): Homolog of NCBI NO: 25408568 NR Description: hypothetical protein At2g37850 [imported] -
  misc_feature (1)..(128): Homolog of NCBI NO: 34902042 NR Description: putative S_TKc, Serine/Threonine protein kinases,
  misc_feature (1)..(104): Homolog of NCBI NO: 34902242 NR Description: Putative serine/threonine protein kinase
  misc_feature (1)..(130): Homolog of NCBI NO: 11358841 NR Description: serine/threonine-protein kinase-like protein -
  misc_feature (1)..(130): Homolog of NCBI NO: 18412205 NR Description: serine/threonine-protein kinase-like protein
  misc_feature (131)..(131): Xaa is any aa, unknown or other
MASITKSELPGSSSANESISASDVDLPQSTEQKINFSDPSSISLWAKHEFIDAVDRAEKLSCHVQNMDRAAEMPDAMEIIFQKALLIGTSGAVDEYMEVRDRAGASYSKAMLLLSFIVAEAENLAVNPPFXTCIR

SEQ ID NO: 53019 - DNA, 1350 bp, Glycine max
  misc_feature (1)..(1350): Ceres Seq. ID no. 14306781
ggcagaaccatcgctcaagctcacactcacagtaaaatccaaaccaaaatggcggaaaataaagccattgaagaagctcagagcaagttccgttcagagttccttcaagttctgcgtagtaggcgacccgctcaagttccattaacagtcgaattcgcgaagccagtggtgaatcctttgcatcagaactctcctccatcgatcgaagagatcaagataatggagtcgtgtccgagaactgatatagagaaccttgaagacttgctcgaggaggagaatctctatttgaatatagaggaaggagagcaaggacggttgcctttgttgattttgaagttgaaggaaagcgataagcagagaaaaaggcctgcagttgtttttcttcacagtacgaacaaatacaaagaagtcctacgtccattgcttaaggcgtatgcttcgcgaggatatatagcaatttctgttgattctcgttaccatggagaacgtgctaccagcgcaaccacctatcgcgatgcacttatttctgcatggaaaactggtgagacgatgccattcatatttgacacggtctgggacttgattagattggcagattatctaacacagagagaggatatagacccttctaggataggaatcactggaatatcacttggaggaatgcatgcatggtttgctgcagttgctgatactcgctatgctgtggttgctcctctgattggcattcagggatttcaatgggccataggcaacgataaatggcaggctcgagttgatagtataaagcctctttttgaggcggctcgtgatgatttgggtaaaggtgctattgacaaagaagtggtggagaaggtgtgggaccgaattgctcctggtttagcttcccaatttgactcaccttattcagttccaactatcgcaccacgtcctttgcttattgttaatggtgcggaagatcctcggtgtcccgttgcaggcttggaaattccaagggcacaagcaagccaggcatatggacagtttgactgtttagataatttcaagattattacagaacctggagttggacaccaattaacgagacttcaagtgaaagaatcatcttattggtttgacaggttcttgaacccttagcccgtgccctcatatgtgttcatcaagccctgtgtggttgttgctctagctcattgcctcatttctattgtcattgtgtcatgatatcaaagtcaataaattgtcaaatagaaatcatcatcatgatgactcttaaggtacagtcaataaatttattatgtatgatggtgtgtaattgaatgatagtaaaaaaaaaaattatattgtcattgc

SEQ ID NO: 53020 - protein, 378 aa, Glycine max
  peptide (1)..(378): Ceres Seq. ID no. 14306782
  misc_feature (304)..(376): Homolog of NCBI NO: 23098650 NR Description: hypothetical protein [Oceanobacillus iheyensis
  misc_feature (96)..(241): Homolog of NCBI NO: 23098650 NR Description: hypothetical protein [Oceanobacillus iheyensis
  misc_feature (15)..(147): Homolog of NCBI NO: 34898368 NR Description: ESTs C19441(E10423),C99201(E10423) correspond to
  misc_feature (172)..(376): Homolog of NCBI NO: 34898368 NR Description: ESTs C19441(E10423),C99201(E10423) correspond to
  misc_feature (30)..(376): Homolog of NCBI NO: 30689997 NR Description: expressed protein [Arabidopsis thaliana]
GRTIAQAHTHSKIQTKMAENKAIEEAQSKFRSEFLQVLRSRRPAQVPLTVEFAKPVVNPLHQNSPPSIEEIKIMESCPRTDIENLEDLLEEENLYLNIEEGEQGRLPLLILKLKESDKQRKRPAVVFLHSTNKYKEVLRPLLKAYASRGYIAISVDSRYHGERATSATTYRDALISAWKTGETMPFIFDTVWDLIRLADYLTQREDIDPSRIGITGISLGGMHAWFAAVADTRYAVVAPLIGIQGFQWAIGNDKWQARVDSIKPLFEAARDDLGKGAIDKEVVEKVWDRIAPGLASQFDSPYSVPTIAPRPLLIVNGAEDPRCPVAGLEIPRAQASQAYGQFDCLDNFKIITEPGVGHQLTRLQVKESSYWFDRFLNP

SEQ ID NO: 53021 - protein, 362 aa, Glycine max
  peptide (1)..(362): Ceres Seq. ID no. 14306783
  misc_feature (288)..(360): Homolog of NCBI NO: 23098650 NR Description: hypothetical protein [Oceanobacillus iheyensis
  misc_feature (80)..(225): Homolog of NCBI NO: 23098650 NR Description: hypothetical protein [Oceanobacillus iheyensis
  misc_feature (1)..(131): Homolog of NCBI NO: 34898368 NR Description: ESTs C19441(E10423),C99201(E10423) correspond to
  misc_feature (156)..(360): Homolog of NCBI NO: 34898368 NR Description: ESTs C19441(E10423),C99201(E10423) correspond to
  misc_feature (14)..(360): Homolog of NCBI NO: 30689997 NR Description: expressed protein [Arabidopsis thaliana]
MAENKAIEEAQSKFRSEFLQVLRSRRPAQVPLTVEFAKPVVNPLHQNSPPSIEEIKIMESCPRTDIENLEDLLEEENLYLNIEEGEQGRLPLLILKLKESDKQRKRPAVVFLHSTNKYKEVLRPLLKAYASRGYIAISVDSRYHGERATSATTYRDALISAWKTGETMPFIFDTVWDLIRLADYLTQREDIDPSRIGITGISLGGMHAWFAAVADTRYAVVAPLIGIQGFQWAIGNDKWQARVDSIKPLFEAARDDLGKGAIDKEVVEKVWDRIAPGLASQFDSPYSVPTIAPRPLLIVNGAEDPRCPVAGLEIPRAQASQAYGQFDCLDNFKIITEPGVGHQLTRLQVKESSYWFDRFLNP

SEQ ID NO: 53022 - protein, 305 aa, Glycine max
  peptide (1)..(305): Ceres Seq. ID no. 14306784
  misc_feature (231)..(303): Homolog of NCBI NO: 23098650 NR Description: hypothetical protein [Oceanobacillus iheyensis
  misc_feature (23)..(168): Homolog of NCBI NO: 23098650 NR Description: hypothetical protein [Oceanobacillus iheyensis
  misc_feature (1)..(74): Homolog of NCBI NO: 34898368 NR Description: ESTs C19441(E10423),C99201(E10423) correspond to
  misc_feature (99)..(303): Homolog of NCBI NO: 34898368 NR Description: ESTs C19441(E10423),C99201(E10423) correspond to
  misc_feature (1)..(303): Homolog of NCBI NO: 30689997 NR Description: expressed protein [Arabidopsis thaliana]
MESCPRTDIENLEDLLEEENLYLNIEEGEQGRLPLLILKLKESDKQRKRPAVVFLHSTNKYKEVLRPLLKAYASRGYIAISVDSRYHGERATSATTYRDALISAWKTGETMPFIFDTVWDLIRLADYLTQREDIDPSRIGITGISLGGMHAWFAAVADTRYAVVAPLIGIQGFQWAIGNDKWQARVDSIKPLFEAARDDLGKGAIDKEVVEKVWDRIAPGLASQFDSPYSVPTIAPRPLLIVNGAEDPRCPVAGLEIPRAQASQAYGQFDCLDNFKIITEPGVGHQLTRLQVKESSYWFDRFLNP

SEQ ID NO: 53023 - DNA, 1480 bp, Glycine max
  misc_feature (1)..(1480): Ceres Seq. ID no. 14306627
gataatacagcacaaaaaaacttcacacacacaacacaacactttcctctctctctctctctctctctctctagggttccaagtttgaacttgaaagtgttgaactttctctagctttttcacaaatttggttgcacttgcaactgaggcaggaaagagggatcaccagggggcacgagaggaggaagaggaaagagaagaaaaaacaagaaaagtagagaaaggggtaggtgttgtacagaaatagaaattaaaaaattgagtgaaaaattaaaagggaaatttttttagaagaagagtgatagggatatggggaggggaagagtggagttgaagaggatagagaacaagataaacaggcaagtcacttttgcaaagaggagaaatgggcttctcaagaaagcctatgagctatctgttctctgtgatgctgaggttgccctcatcatcttctccaaccgaggcaagctttatgagttctgtagcagctctagcatgctcaaaacacttgaaaggtaccagaaatgcagctatggtgctgtggaagttagcaaacctgccaaagagctcgagcagagcagctaccgtgaatacttgaagctgaaagcaagatttgaatcacttcaaaggacccaaagaaaccttttaggggaagacttaggcccactgaatatcaaagaacttgagcatcttgaacggcaattggattcatctctaaagcaagtgaggtccacaaagacacaattcatgctggaccagttatctgatcttcaaaccaagatgttagtagaagcaaacagatccttgacagtgaagctggaagaaatcaattcaagaaaccactacaggcaatcatgggaagctggtgatcaaagtatgccatatggtggtggtggtccagagaattctcactctcattctcactctcagggcttcttccaaccattggaatgcaaccctacactacatattggtcctgattacaggtacaatgctgtagcttcagatcagataactgccacaactcaacctcaacaagtgagtggctttattccagggtggatgctttgaactaattaggctcagtgcattcaggtggagacataaaaaagcaaacaccttacaaaagggcaaaagccaaaaatgcatcttggtgttggcaaggtgtaaatgcaaccctgcttctacagttattttggtgtataagaaactgatgttgtgacttgttcaaacttttgaacttttagccatagacatatatggcaatttataacattaggtatcttttaaaggatccctttttattattaaatatctgaacgaccgatttcaattttcttctattgcattacatattaatcttggcttgatgtaagctcagttttcttctaggtttttgcttgcattataagtgaaagattgtaaaatttcatgaagctctgaaatctcttttcaatctttcataaaaaaaatatacatc

SEQ ID NO: 53024 - protein, 253 aa, Glycine max
  peptide (1)..(253): Ceres Seq. ID no. 14306628
  misc_feature (75)..(172): Pfam Name: K-box region Pfam Description: K-box region
  misc_feature (75)..(172): Pfam Name: K-box region Pfam Description: K-box region
  misc_feature (1)..(253): Homolog of NCBI NO: 18417790 NR Description: MADS-box protein AGL2 [Arabidopsis thaliana]
  misc_feature (12)..(253): Homolog of NCBI NO: 28372976 NR Description: Apetala 1 protein [Populus tremuloides]
  misc_feature (1)..(253): Homolog of NCBI NO: 81610 NR Description: MADS box protein AGL2 - Arabidopsis thaliana
  misc_feature (1)..(253): Homolog of NCBI NO: 28628841 NR Description: MADS-RIN-like protein [Fragaria x ananassa]
  misc_feature (5)..(253): Homolog of NCBI NO: 3646336 NR Description: MdMADS9 [Malus x domestica]
  misc_feature (1)..(253): Homolog of NCBI NO: 18417790 NR Description: MADS-box protein AGL2 [Arabidopsis thaliana]
  misc_feature (1)..(253): Homolog of NCBI NO: 81610 NR Description: MADS box protein AGL2 - Arabidopsis thaliana
  misc_feature (5)..(253): Homolog of NCBI NO: 3646336 NR Description: MdMADS9 [Malus x domestica]
  misc_feature (1)..(253): Homolog of NCBI NO: 6683777 NR Description: CAGL2 [Cucumis sativus]
  misc_feature (1)..(253): Homolog of NCBI NO: 20385584 NR Description: MADS-box protein 2 [Vitis vinifera]
  misc_feature (1)..(253): Homolog of NCBI NO: 7488622 NR Description: MADS box protein 1 - apple tree
  misc_feature (1)..(253): Homolog of NCBI NO: 3646334 NR Description: MdMADS8 [Malus x domestica]
  misc_feature (1)..(253): Homolog of NCBI NO: 28372802 NR Description: transcription factor MAGL4 [Populus tremuloides]
  misc_feature (1)..(253): Homolog of NCBI NO: 28628841 NR Description: MADS-RIN-like protein [Fragaria x ananassa]
  misc_feature (12)..(253): Homolog of NCBI NO: 28372976 NR Description: Apetala 1 protein [Populus tremuloides]
  misc_feature (1)..(253): Homolog of NCBI NO: 28372802 NR Description: transcription factor MAGL4 [Populus tremuloides]
  misc_feature (1)..(253): Homolog of NCBI NO: 3646334 NR Description: MdMADS8 [Malus x domestica]
  misc_feature (1)..(253): Homolog of NCBI NO: 7488622 NR Description: MADS box protein 1 - apple tree
  misc_feature (1)..(253): Homolog of NCBI NO: 20385584 NR Description: MADS-box protein 2 [Vitis vinifera]
  misc_feature (1)..(253): Homolog of NCBI NO: 6683777 NR Description: CAGL2 [Cucumis sativus]
MGRGRVELKRIENKINRQVTFAKRRNGLLKKAYELSVLCDAEVALIIFSNRGKLYEFCSSSSMLKTLERYQKCSYGAVEVSKPAKELEQSSYREYLKLKARFESLQRTQRNLLGEDLGPLNIKELEHLERQLDSSLKQVRSTKTQFMLDQLSDLQTKMLVEANRSLTVKLEEINSRNHYRQSWEAGDQSMPYGGGGPENSHSHSHSQGFFQPLECNPTLHIGPDYRYNAVASDQITATTQPQQVSGFIPGWML

SEQ ID NO: 53025 - protein, 191 aa, Glycine max
  peptide (1)..(191): Ceres Seq. ID no. 14306629
  misc_feature (13)..(110): Pfam Name: K-box region Pfam Description: K-box region
  misc_feature (13)..(110): Pfam Name: K-box region Pfam Description: K-box region
  misc_feature (1)..(191): Homolog of NCBI NO: 18417790 NR Description: MADS-box protein AGL2 [Arabidopsis thaliana]
  misc_feature (1)..(191): Homolog of NCBI NO: 28372976 NR Description: Apetala 1 protein [Populus tremuloides]
  misc_feature (1)..(191): Homolog of NCBI NO: 81610 NR Description: MADS box protein AGL2 - Arabidopsis thaliana
  misc_feature (1)..(191): Homolog of NCBI NO: 28628841 NR Description: MADS-RIN-like protein [Fragaria x ananassa]
  misc_feature (1)..(191): Homolog of NCBI NO: 3646336 NR Description: MdMADS9 [Malus x domestica]
  misc_feature (1)..(191): Homolog of NCBI NO: 18417790 NR Description: MADS-box protein AGL2 [Arabidopsis thaliana]
  misc_feature (1)..(191): Homolog of NCBI NO: 81610 NR Description: MADS box protein AGL2 - Arabidopsis thaliana
  misc_feature (1)..(191): Homolog of NCBI NO: 3646336 NR Description: MdMADS9 [Malus x domestica]
  misc_feature (1)..(191): Homolog of NCBI NO: 6683777 NR Description: CAGL2 [Cucumis sativus]
  misc_feature (1)..(191): Homolog of NCBI NO: 20385584 NR Description: MADS-box protein 2 [Vitis vinifera]
  misc_feature (1)..(191): Homolog of NCBI NO: 7488622 NR Description: MADS box protein 1 - apple tree
  misc_feature (1)..(191): Homolog of NCBI NO: 3646334 NR Description: MdMADS8 [Malus x domestica]
  misc_feature (1)..(191): Homolog of NCBI NO: 28372802 NR Description: transcription factor MAGL4 [Populus tremuloides]
  misc_feature (1)..(191): Homolog of NCBI NO: 28628841 NR Description: MADS-RIN-like protein [Fragaria x ananassa]
  misc_feature (1)..(191): Homolog of NCBI NO: 28372976 NR Description: Apetala 1 protein [Populus tremuloides]
  misc_feature (1)..(191): Homolog of NCBI NO: 28372802 NR Description: transcription factor MAGL4 [Populus tremuloides]
  misc_feature (1)..(191): Homolog of NCBI NO: 3646334 NR Description: MdMADS8 [Malus x domestica]
  misc_feature (1)..(191): Homolog of NCBI NO: 7488622 NR Description: MADS box protein 1 - apple tree
  misc_feature (1)..(191): Homolog of NCBI NO: 20385584 NR Description: MADS-box protein 2 [Vitis vinifera]
  misc_feature (1)..(191): Homolog of NCBI NO: 6683777 NR Description: CAGL2 [Cucumis sativus]
MLKTLERYQKCSYGAVEVSKPAKELEQSSYREYLKLKARFESLQRTQRNLLGEDLGPLNIKELEHLERQLDSSLKQVRSTKTQFMLDQLSDLQTKMLVEANRSLTVKLEEINSRNHYRQSWEAGDQSMPYGGGGPENSHSHSHSQGFFQPLECNPTLHIGPDYRYNAVASDQITATTQPQQVSGFIPGWML

SEQ ID NO: 53026 - DNA, 1277 bp, Glycine max
  misc_feature (1)..(1277): Ceres Seq. ID no. 14306617
aattcttccactaccccttttcgttattcttcttcaattctcccaaaaatcatatttttacactctgagtggtttttcagcttgtgggtcgatgtcaactgtgtcaaaagatgacaacttggcgctttcttcggaggactcttcatgcccagaagagtctgagcttgaattgggtcttgggttgagcctctcctctggctcttcatcaaaatctcatcaccaccatcatgctagaatttacactgctaaggattttccttcttctgcagcagcagcagcagcagcagcatcatcaccttcctcttcttcttcctctcccaacaacatcactgctggcaccaagagagctgctgccgattctcttgttgccaataaccgtcccagtcaagtagttggatggcctccacttcgaacatatagagtgaatagcttcaatagccatgcaaaatcaactgaagtattcaactctgtggctgagaaaagtaagaccgataatactgtggccaggaagactaatgacaatggcaatgataataacataaatgccaaagagaaaagacacctcaggagttccctgtttgtcaaggtaaatatggatgggataccaattggaaggaaggttgatttgagtgctcatagttcctatgaaaccttagcgcaaacattagaggatatgtttaatgaatcaactacagtcaccacttgcaaaggatcaaatggtgaggattatggctttattatcggaggagaaaggcattcaaaattattagatggatcttccaagtttgtgctcacttatgaagacaaggaaggagattggatgcttgttggggatgttccctgggggatgttctttagctcagtgaggaggctaagaatcatgaggacatctgaggctaatggacttgcaccgagattggaagaaaacataaaaaagagatgcaagcccatatagattccgttttcatggctaaggacatgaaaaacctgtcaaatagatgaagaggaaaaaccgaaacagaaaagtataggaatactgcaaatgtatgaagttttgagatttgaatgataaaatctcacacttttgcttaattaattcagtttgtttgtttaatttggtatctttgttgcggcctctctattcatctcacttggagggtgcaggcatcatagattttcatgcaatacaactaatcatacaagtcagactgcttgttagtgttgtaaatgtggaatgtttgctaactatttcagctataaagttttgtttgaacttc

SEQ ID NO: 53027 - protein, 317 aa, Glycine max
  peptide (1)..(317): Ceres Seq. ID no. 14306618
  misc_feature (56)..(302): Pfam Name: AUX/IAA family Pfam Description: AUX/IAA family
  misc_feature (107)..(313): Homolog of NCBI NO: 20269059 NR Description: aux/IAA protein [Populus tremula x Populus
  misc_feature (127)..(298): Homolog of NCBI NO: 21594025 NR Description: auxin regulated protein IAA18, putative
  misc_feature (179)..(303): Homolog of NCBI NO: 20466408 NR Description: early auxin-inducible protein 11 [Arabidopsis
  misc_feature (179)..(303): Homolog of NCBI NO: 15235385 NR Description: auxin-responsive protein IAA11 (Indoleacetic
  misc_feature (110)..(317): Homolog of NCBI NO: 15219761 NR Description: auxin-responsive protein IAA12 (Indoleacetic
  misc_feature (110)..(317): Homolog of NCBI NO: 21593621 NR Description: putative auxin-induced protein, IAA12
  misc_feature (110)..(317): Homolog of NCBI NO: 15225833 NR Description: auxin-responsive protein IAA13 (Indoleacetic
  misc_feature (110)..(317): Homolog of NCBI NO: 30685642 NR Description: auxin-responsive protein IAA13 (Indoleacetic
  misc_feature (97)..(302): Homolog of NCBI NO: 15219646 NR Description: auxin-responsive protein IAA10 (Indoleacetic
  misc_feature (23)..(302): Homolog of NCBI NO: 20269057 NR Description: aux/IAA protein [Populus tremula x Populus
ILPLPLFVILLQFSQKSYFYTLSGFSACGSMSTVSKDDNLALSSEDSSCPEESELELGLGLSLSSGSSSKSHHHHHARIYTAKDFPSSAAAAAAAASSPSSSSSSPNNITAGTKRAAADSLVANNRPSQVVGWPPLRTYRVNSFNSHAKSTEVFNSVAEKSKTDNTVARKTNDNGNDNNINAKEKRHLRSSLFVKVNMDGIPIGRKVDLSAHSSYETLAQTLEDMFNESTTVTTCKGSNGEDYGFIIGGERHSKLLDGSSKFVLTYEDKEGDWMLVGDVPWGMFFSSVRRLRIMRTSEANGLAPRLEENIKKRCKPI

SEQ ID NO: 53028 - protein, 287 aa, Glycine max
  peptide (1)..(287): Ceres Seq. ID no. 14306619
  misc_feature (26)..(272): Pfam Name: AUX/IAA family Pfam Description: AUX/IAA family
  misc_feature (77)..(283): Homolog of NCBI NO: 20269059 NR Description: aux/IAA protein [Populus tremula x Populus
  misc_feature (97)..(268): Homolog of NCBI NO: 21594025 NR Description: auxin regulated protein IAA18, putative
  misc_feature (149)..(273): Homolog of NCBI NO: 20466408 NR Description: early auxin-inducible protein 11 [Arabidopsis
  misc_feature (149)..(273): Homolog of NCBI NO: 15235385 NR Description: auxin-responsive protein IAA11 (Indoleacetic
  misc_feature (80)..(287): Homolog of NCBI NO: 15219761 NR Description: auxin-responsive protein IAA12 (Indoleacetic
  misc_feature (80)..(287): Homolog of NCBI NO: 21593621 NR Description: putative auxin-induced protein, IAA12
  misc_feature (80)..(287): Homolog of NCBI NO: 15225833 NR Description: auxin-responsive protein IAA13 (Indoleacetic
  misc_feature (80)..(287): Homolog of NCBI NO: 30685642 NR Description: auxin-responsive protein IAA13 (Indoleacetic
  misc_feature (67)..(272): Homolog of NCBI NO: 15219646 NR Description: auxin-responsive protein IAA10 (Indoleacetic
  misc_feature (1)..(272): Homolog of NCBI NO: 20269057 NR Description: aux/IAA protein [Populus tremula x Populus
MSTVSKDDNLALSSEDSSCPEESELELGLGLSLSSGSSSKSHHHHHARIYTAKDFPSSAAAAAAAASSPSSSSSSPNNITAGTKRAAADSLVANNRPSQVVGWPPLRTYRVNSFNSHAKSTEVFNSVAEKSKTDNTVARKTNDNGNDNNINAKEKRHLRSSLFVKVNMDGIPIGRKVDLSAHSSYETLAQTLEDMFNESTTVTTCKGSNGEDYGFIIGGERHSKLLDGSSKFVLTYEDKEGDWMLVGDVPWGMFFSSVRRLRIMRTSEANGLAPRLEENIKKRCKPI

SEQ ID NO: 53029 - DNA, 1318 bp, Glycine max
  misc_feature (1)..(1318): Ceres Seq. ID no. 14315634
atgaaaagtacatgcagatgtgtatgaacttcatatcatctttccttcagctatatcttcgtgaggatgatctattgtttgaagtgcttttgctattgtttagcatatcatcttctctccaggaacagtctgaaagtaaggatgctgcgtatcatgatgtaatgaaagattttccttttgagctgtcagacatttttaattctgtgcacctttttcatctgtttctttcagagatacattatgatcaccaagtgcttcttgattacctcatttcaaaagatactggaataagctgtgctaaatatcttctaagatgcttgcatttgatatgcaactcatggaagttatttgtggaatttccattatttggagaatttttggatcaatcatcttgcaagagaagaaaaattgtaggggatggtctacactttctagcagatggaatgcctacgtcaattgacaacagtggaagtatcatattgcatatcaagaattataaggaagacaggggtggcttcaagtactacaatattaagccattcaagaaagccggagaatgtttactatctttgaacaattctgtatataatcttcatcaaaagaagttgtttccgtataatcctaaagtgcttctgaaacgtctaagaagatttcaagagttatgctgtcaggaaaagggattccatggactgaagactgagtaataattaccaaaactgcatgtctgattctgaaagcttggctatcttatgctattaatggctatagaactacatttttgggtattggtggcacggatggacaggaaatagagaaattttgtgctggttcatagttgtatgggtaagatggctactacactggcttagatcagacttagtgcccacagctgtcaacattgtgctactggtgtccatctagtgacagtcttggttcacttcaaatccgtcgattattctatgggtttggggttacatgtcatctctggagaatctggtgagccatatcatggatccagggtgcatgaatggttcctaccagtcttcaatcttgaatttgtaaaggtactaatccattccctcaacttttagccagcagcatgatcttccctttgcgataccttttgtactatatcctccaggtaatccaagcaattatcgcattgaaggatgtctttcttgcggatacctgcctttctcttggtacttggagcttgcattcatgctcctacaaaaaagcatgtaatgagtagaagaccaaaagtgtaaaacttcgttggtttggttaagctagtaccccttcgtttgaaggctggggt

SEQ ID NO: 53030 - protein, 233 aa, Glycine max
  peptide (1)..(233): Ceres Seq. ID no. 14315635
  misc_feature (14)..(212): Homolog of NCBI NO: 34915430 NR Description: hypothetical protein~similar to Arabidopsis
  misc_feature (14)..(224): Homolog of NCBI NO: 33146559 NR Description: unknown protein [Oryza sativa (japonica
  misc_feature (180)..(213): Homolog of NCBI NO: 30693310 NR Description: expressed protein [Arabidopsis thaliana]
  misc_feature (180)..(213): Homolog of NCBI NO: 11280712 NR Description: hypothetical protein T20E23.30 - Arabidopsis
  misc_feature (3)..(137): Homolog of NCBI NO: 30693310 NR Description: expressed protein [Arabidopsis thaliana]
  misc_feature (3)..(137): Homolog of NCBI NO: 11280712 NR Description: hypothetical protein T20E23.30 - Arabidopsis
  misc_feature (180)..(221): Homolog of NCBI NO: 28973649 NR Description: unknown protein [Arabidopsis thaliana]
  misc_feature (3)..(137): Homolog of NCBI NO: 28973649 NR Description: unknown protein [Arabidopsis thaliana]
EKYMQMCMNFISSFLQLYLREDDLLFEVLLLLFSISSSLQEQSESKDAAYHDVMKDFPFELSDIFNSVHLFHLFLSEIHYDHQVLLDYLISKDTGISCAKYLLRCLHLICNSWKLFVEFPLFGEFLDQSSCKRRKIVGDGLHFLADGMPTSIDNSGSIILHIKNYKEDRGGFKYYNIKPFKKAGECLLSLNNSVYNLHQKKLFPYNPKVLLKRLRRFQELCCQEKGFHGLKTE

SEQ ID NO: 53031 - protein, 230 aa, Glycine max
  peptide (1)..(230): Ceres Seq. ID no. 14315636
  misc_feature (11)..(209): Homolog of NCBI NO: 34915430 NR Description: hypothetical protein~similar to Arabidopsis
  misc_feature (11)..(221): Homolog of NCBI NO: 33146559 NR Description: unknown protein [Oryza sativa (japonica
  misc_feature (177)..(210): Homolog of NCBI NO: 30693310 NR Description: expressed protein [Arabidopsis thaliana]
  misc_feature (177)..(210): Homolog of NCBI NO: 11280712 NR Description: hypothetical protein T20E23.30 - Arabidopsis
  misc_feature (1)..(134): Homolog of NCBI NO: 30693310 NR Description: expressed protein [Arabidopsis thaliana]
  misc_feature (1)..(134): Homolog of NCBI NO: 11280712 NR Description: hypothetical protein T20E23.30 - Arabidopsis
  misc_feature (177)..(218): Homolog of NCBI NO: 28973649 NR Description: unknown protein [Arabidopsis thaliana]
  misc_feature (1)..(134): Homolog of NCBI NO: 28973649 NR Description: unknown protein [Arabidopsis thaliana]
MQMCMNFISSFLQLYLREDDLLFEVLLLLFSISSSLQEQSESKDAAYHDVMKDFPFELSDIFNSVHLFHLFLSEIHYDHQVLLDYLISKDTGISCAKYLLRCLHLICNSWKLFVEFPLFGEFLDQSSCKRRKIVGDGLHFLADGMPTSIDNSGSIILHIKNYKEDRGGFKYYNIKPFKKAGECLLSLNNSVYNLHQKKLFPYNPKVLLKRLRRFQELCCQEKGFHGLKTE

SEQ ID NO: 53032 - protein, 228 aa, Glycine max
  peptide (1)..(228): Ceres Seq. ID no. 14315637
  misc_feature (9)..(207): Homolog of NCBI NO: 34915430 NR Description: hypothetical protein~similar to Arabidopsis
  misc_feature (9)..(219): Homolog of NCBI NO: 33146559 NR Description: unknown protein [Oryza sativa (japonica
  misc_feature (175)..(208): Homolog of NCBI NO: 30693310 NR Description: expressed protein [Arabidopsis thaliana]
  misc_feature (175)..(208): Homolog of NCBI NO: 11280712 NR Description: hypothetical protein T20E23.30 - Arabidopsis
  misc_feature (1)..(132): Homolog of NCBI NO: 30693310 NR Description: expressed protein [Arabidopsis thaliana]
  misc_feature (1)..(132): Homolog of NCBI NO: 11280712 NR Description: hypothetical protein T20E23.30 - Arabidopsis
  misc_feature (175)..(216): Homolog of NCBI NO: 28973649 NR Description: unknown protein [Arabidopsis thaliana]
  misc_feature (1)..(132): Homolog of NCBI NO: 28973649 NR Description: unknown protein [Arabidopsis thaliana]
MCMNFISSFLQLYLREDDLLFEVLLLLFSISSSLQEQSESKDAAYHDVMKDFPFELSDIFNSVHLFHLFLSEIHYDHQVLLDYLISKDTGISCAKYLLRCLHLICNSWKLFVEFPLFGEFLDQSSCKRRKIVGDGLHFLADGMPTSIDNSGSIILHIKNYKEDRGGFKYYNIKPFKKAGECLLSLNNSVYNLHQKKLFPYNPKVLLKRLRRFQELCCQEKGFHGLKTE

SEQ ID NO: 53033 - DNA, 1130 bp, Glycine max
  misc_feature (1)..(1130): Ceres Seq. ID no. 14306479
gcttaaattaatcttcgttttggcctcaaccaacaataattctagtttctctcattccttctgtcccttaattgcgaagcaaatctttcttcttcccatggaaatggaaccgacgtgcgtcgacacttccctcaaccttaacgttattccttccccacacatcgaccacctcgcgggagaagttttgtttgaagagttgcggcgtctaagcagtgagaacaagaggctaactgagacgctgaaccacttgtgcgagagctatgttgccttgcagaaacatttgagtgaattcagccaacttaggaacgcaaattttgataaagaaggaacttgtgcagttccgtcgctaaagagaaagcccgagagtgagaattgtgtgaatctgtttggtactgagtgcaacaccatcacagaggaagaaacattcaaaaggcccaagcatagcaccgagccaaaggtttccaaagttcttacacggacagatgcatctgatactggcttatatgtgagggacggatatcagtggagaaaatacggtcagaaagtcactagagataacccttctcctagggcttacttcaagtgttcatatgcccctagctgtccagtaaaaaagaaggtgcaaagaagtgtagaagatccaagtgtgttggtaacaacttacgaaggggagcacaaccatgggcaacaacatcaaactgcagaaatatcaattaattcatcaagcaaaagtgaaacacctaggcctgcagtttcaccctcagccatgaatattcggagtagtgcagcagcaggtccaattgtaacacttgacttggtcaagtcaaaagttgttgacattaatgcgcaaaagtcatctctccagcagtttttagttcaccaaatggctacttctttgacaagagatcctaatttcacagccgcacttgcttctgccatctctggaagaattctagatgatacttctgtgggaaaacgttgaattattaagagatatatatgtattaatttcactgatgaacatatatgaattttgtcacttttcttcgttttaatatttaataacagctagtcacgaggagtagtgttctatgcagcatctatatttatcttatacaagtaaattttat

SEQ ID NO: 53034 - protein, 326 aa, Glycine max
  peptide (1)..(326): Ceres Seq. ID no. 14306480
  misc_feature (169)..(227): Pfam Name: WRKY DNA -binding domain Pfam Description: WRKY DNA -binding domain
  misc_feature (288)..(322): Homolog of NCBI NO: 40645752 NR Description: WRKY transcription factor 1 [Spinacia oleracea]
  misc_feature (50)..(268): Homolog of NCBI NO: 40645752 NR Description: WRKY transcription factor 1 [Spinacia oleracea]
  misc_feature (285)..(319): Homolog of NCBI NO: 6683537 NR Description: TMV response-related gene product [Nicotiana
  misc_feature (43)..(249): Homolog of NCBI NO: 6683537 NR Description: TMV response-related gene product [Nicotiana
  misc_feature (284)..(326): Homolog of NCBI NO: 6472585 NR Description: WIZZ [Nicotiana tabacum]
  misc_feature (58)..(287): Homolog of NCBI NO: 6472585 NR Description: WIZZ [Nicotiana tabacum]
  misc_feature (62)..(318): Homolog of NCBI NO: 11493822 NR Description: transcription factor WRKY4 [Petroselinum crispum]
  misc_feature (40)..(325): Homolog of NCBI NO: 21594015 NR Description: transcription factor, putative [Arabidopsis
  misc_feature (40)..(325): Homolog of NCBI NO: 15220859 NR Description: WRKY family transcription factor [Arabidopsis
  misc_feature (42)..(325): Homolog of NCBI NO: 40060529 NR Description: putative WRKY4 transcription factor [Vitis
LKLIFVLASTNNNSSFSHSFCPLIAKQIFLLPMEMEPTCVDTSLNLNVIPSPHIDHLAGEVLFEELRRLSSENKRLTETLNHLCESYVALQKHLSEFSQLRNANFDKEGTCAVPSLKRKPESENCVNLFGTECNTITEEETFKRPKHSTEPKVSKVLTRTDASDTGLYVRDGYQWRKYGQKVTRDNPSPRAYFKCSYAPSCPVKKKVQRSVEDPSVLVTTYEGEHNHGQQHQTAEISINSSSKSETPRPAVSPSAMNIRSSAAAGPIVTLDLVKSKVVDINAQKSSLQQFLVHQMATSLTRDPNFTAALASAISGRILDDTSVGKR

SEQ ID NO: 53035 - protein, 294 aa, Glycine max
  peptide (1)..(294): Ceres Seq. ID no. 14306481
  misc_feature (137)..(195): Pfam Name: WRKY DNA -binding domain Pfam Description: WRKY DNA -binding domain
  misc_feature (256)..(290): Homolog of NCBI NO: 40645752 NR Description: WRKY transcription factor 1 [Spinacia oleracea]
  misc_feature (18)..(236): Homolog of NCBI NO: 40645752 NR Description: WRKY transcription factor 1 [Spinacia oleracea]
  misc_feature (253)..(287): Homolog of NCBI NO: 6683537 NR Description: TMV response-related gene product [Nicotiana
  misc_feature (11)..(217): Homolog of NCBI NO: 6683537 NR Description: TMV response-related gene product [Nicotiana
  misc_feature (252)..(294): Homolog of NCBI NO: 6472585 NR Description: WIZZ [Nicotiana tabacum]
  misc_feature (26)..(255): Homolog of NCBI NO: 6472585 NR Description: WIZZ [Nicotiana tabacum]
  misc_feature (30)..(286): Homolog of NCBI NO: 11493822 NR Description: transcription factor WRKY4 [Petroselinum crispum]
  misc_feature (8)..(293): Homolog of NCBI NO: 21594015 NR Description: transcription factor, putative [Arabidopsis
  misc_feature (8)..(293): Homolog of NCBI NO: 15220859 NR Description: WRKY family transcription factor [Arabidopsis
  misc_feature (10)..(293): Homolog of NCBI NO: 40060529 NR Description: putative WRKY4 transcription factor [Vitis
MEMEPTCVDTSLNLNVIPSPHIDHLAGEVLFEELRRLSSENKRLTETLNHLCESYVALQKHLSEFSQLRNANFDKEGTCAVPSLKRKPESENCVNLFGTECNTITEEETFKRPKHSTEPKVSKVLTRTDASDTGLYVRDGYQWRKYGQKVTRDNPSPRAYFKCSYAPSCPVKKKVQRSVEDPSVLVTTYEGEHNHGQQHQTAEISINSSSKSETPRPAVSPSAMNIRSSAAAGPIVTLDLVKSKVVDINAQKSSLQQFLVHQMATSLTRDPNFTAALASAISGRILDDTSVGKR

SEQ ID NO: 53036 - protein, 292 aa, Glycine max
  peptide (1)..(292): Ceres Seq. ID no. 14306482
  misc_feature (135)..(193): Pfam Name: WRKY DNA -binding domain Pfam Description: WRKY DNA -binding domain
  misc_feature (254)..(288): Homolog of NCBI NO: 40645752 NR Description: WRKY transcription factor 1 [Spinacia oleracea]
  misc_feature (16)..(234): Homolog of NCBI NO: 40645752 NR Description: WRKY transcription factor 1 [Spinacia oleracea]
  misc_feature (251)..(285): Homolog of NCBI NO: 6683537 NR Description: TMV response-related gene product [Nicotiana
  misc_feature (9)..(215): Homolog of NCBI NO: 6683537 NR Description: TMV response-related gene product [Nicotiana
  misc_feature (250)..(292): Homolog of NCBI NO: 6472585 NR Description: WIZZ [Nicotiana tabacum]
  misc_feature (24)..(253): Homolog of NCBI NO: 6472585 NR Description: WIZZ [Nicotiana tabacum]
  misc_feature (28)..(284): Homolog of NCBI NO: 11493822 NR Description: transcription factor WRKY4 [Petroselinum crispum]
  misc_feature (6)..(291): Homolog of NCBI NO: 21594015 NR Description: transcription factor, putative [Arabidopsis
  misc_feature (6)..(291): Homolog of NCBI NO: 15220859 NR Description: WRKY family transcription factor [Arabidopsis
  misc_feature (8)..(291): Homolog of NCBI NO: 40060529 NR Description: putative WRKY4 transcription factor [Vitis
MEPTCVDTSLNLNVIPSPHIDHLAGEVLFEELRRLSSENKRLTETLNHLCESYVALQKHLSEFSQLRNANFDKEGTCAVPSLKRKPESENCVNLFGTECNTITEEETFKRPKHSTEPKVSKVLTRTDASDTGLYVRDGYQWRKYGQKVTRDNPSPRAYFKCSYAPSCPVKKKVQRSVEDPSVLVTTYEGEHNHGQQHQTAEISINSSSKSETPRPAVSPSAMNIRSSAAAGPIVTLDLVKSKVVDINAQKSSLQQFLVHQMATSLTRDPNFTAALASAISGRILDDTSVGKR

SEQ ID NO: 53037 - DNA, 1289 bp, Glycine max
  misc_feature (1)..(1289): Ceres Seq. ID no. 15176069
aaataaaattaactcctaaatttttcaacacataaaatggaattctccttccctattcatgatgtgctctccattgaccatgaaggtttcgccatcctgaatgctgcaaccactaaatccacttcccgtctcagcgaaaccccttcctattacaagccctacaccaaaactaaagccgatcccgttaaccaaggcttaacggagatcttggatcgcatgggtgctgccagtagcaaggctcaaggactaaagcaagtgataacaaatcatataaagtttacaacaagtggtgataatagattatatataaaagcagaagagaatagagtatatgggattctcaaagtgggaaagaagaacttgttttacagagactcaagaggaactgtaaaggaacttcaacctctgtgtgtattggacttttatgtgcatgaatcttgtcaaagaagtggtctcggaaaacagatttttgagatgatgttggaaaaagagaatattgatcctagtaaaatagcttatgatcgtccttctccgaaacttattggcttcttgaagaaacactacggacttgtcagctatgtccctcaaaataacaactttgtcgttttcaatgccttttgggataatcccaataagactttccaaggaaatagagctccaactagccatagcaatcatcatgggcatcatcatgaggaaagaaagaataatttgcatagtgatagaggttattcaagaggaactctggcaaatcaagaaagaaattatcataatagaaatggaaatacttcatataacagtcttccccaagagcaagaaagagttatagtaaaagatgatattaaaggtagaggaggtgctaatagtatgaaagatgattttgctgtttcttcgatgaatgataatatgaagtcaacagagacattgataaaagaaacagaggccaaaattcaaaaattgaatttggaaaaacagaaattaatggttccagaagaaagaagacaaaaagaatatcatagtacgactcctccatgggcaaatcatgctgaccatttcaataactataaaacatcaaattgttatggaaatcattacaatagattccaacctttaggtcgacatggaaaataaggaaattataggagagtttttttagataatttatttgtaaaagaaataaatataaatgtttgtttttgacgtatatgataaatattgataagaagatttattgaagcgaaaaaagtatcaataagtatatgcgtatgatttttattactcactacact

SEQ ID NO: 53038 - protein, 364 aa, Glycine max
  peptide (1)..(364): Ceres Seq. ID no. 15176070
  misc_feature (93)..(195): Pfam Name: Protein of unknown function (DUF738) Pfam Description: Protein of unknown function (DUF738)
  misc_feature (36)..(213): Homolog of NCBI NO: 13543925 NR Description: C6orf134 protein [Homo sapiens]
  misc_feature (46)..(197): Homolog of NCBI NO: 34784851 NR Description: Unknown (protein for MGC:65893) [Danio rerio]
  misc_feature (36)..(212): Homolog of NCBI NO: 21739343 NR Description: hypothetical protein [Homo sapiens]
  misc_feature (36)..(212): Homolog of NCBI NO: 13376369 NR Description: hypothetical protein FLJ13158 [Homo sapiens]
  misc_feature (36)..(213): Homolog of NCBI NO: 27754164 NR Description: RIKEN cDNA 3110080J08 [Mus musculus]
  misc_feature (36)..(213): Homolog of NCBI NO: 21040499 NR Description: 3110080J08Rik protein [Mus musculus]
  misc_feature (54)..(195): Homolog of NCBI NO: 31214465 NR Description: ENSANGP00000017438 [Anopheles gambiae]
  misc_feature (36)..(212): Homolog of NCBI NO: 34852055 NR Description: similar to 3110080J08Rik protein [Rattus
  misc_feature (36)..(212): Homolog of NCBI NO: 26390241 NR Description: unnamed protein product [Mus musculus]
  misc_feature (36)..(212): Homolog of NCBI NO: 22137720 NR Description: 3110080J08Rik protein [Mus musculus]
MEFSFPIHDVLSIDHEGFAILNAATTKSTSRLSETPSYYKPYTKTKADPVNQGLTEILDRMGAASSKAQGLKQVITNHIKFTTSGDNRLYIKAEENRVYGILKVGKKNLFYRDSRGTVKELQPLCVLDFYVHESCQRSGLGKQIFEMMLEKENIDPSKIAYDRPSPKLIGFLKKHYGLVSYVPQNNNFVVFNAFWDNPNKTFQGNRAPTSHSNHHGHHHEERKNNLHSDRGYSRGTLANQERNYHNRNGNTSYNSLPQEQERVIVKDDIKGRGGANSMKDDFAVSSMNDNMKSTETLIKETEAKIQKLNLEKQKLMVPEERRQKEYHSTTPPWANHADHFNNYKTSNCYGNHYNRFQPLGRHGK

SEQ ID NO: 53039 - protein, 304 aa, Glycine max
  peptide (1)..(304): Ceres Seq. ID no. 15176071
  misc_feature (33)..(135): Pfam Name: Protein of unknown function (DUF738) Pfam Description: Protein of unknown function (DUF738)
  misc_feature (1)..(153): Homolog of NCBI NO: 13543925 NR Description: C6orf134 protein [Homo sapiens]
  misc_feature (1)..(137): Homolog of NCBI NO: 34784851 NR Description: Unknown (protein for MGC:65893) [Danio rerio]
  misc_feature (1)..(152): Homolog of NCBI NO: 21739343 NR Description: hypothetical protein [Homo sapiens]
  misc_feature (1)..(152): Homolog of NCBI NO: 13376369 NR Description: hypothetical protein FLJ13158 [Homo sapiens]
  misc_feature (1)..(153): Homolog of NCBI NO: 27754164 NR Description: RIKEN cDNA 3110080J08 [Mus musculus]
  misc_feature (1)..(153): Homolog of NCBI NO: 21040499 NR Description: 3110080J08Rik protein [Mus musculus]
  misc_feature (1)..(135): Homolog of NCBI NO: 31214465 NR Description: ENSANGP00000017438 [Anopheles gambiae]
  misc_feature (1)..(152): Homolog of NCBI NO: 26390241 NR Description: unnamed protein product [Mus musculus]
  misc_feature (1)..(152): Homolog of NCBI NO: 34852055 NR Description: similar to 3110080J08Rik protein [Rattus
  misc_feature (1)..(152): Homolog of NCBI NO: 22137720 NR Description: 3110080J08Rik protein [Mus musculus]
MGAASSKAQGLKQVITNHIKFTTSGDNRLYIKAEENRVYGILKVGKKNLFYRDSRGTVKELQPLCVLDFYVHESCQRSGLGKQIFEMMLEKENIDPSKIAYDRPSPKLIGFLKKHYGLVSYVPQNNNFVVFNAFWDNPNKTFQGNRAPTSHSNHHGHHHEERKNNLHSDRGYSRGTLANQERNYHNRNGNTSYNSLPQEQERVIVKDDIKGRGGANSMKDDFAVSSMNDNMKSTETLIKETEAKIQKLNLEKQKLMVPEERRQKEYHSTTPPWANHADHFNNYKTSNCYGNHYNRFQPLGRHGK

SEQ ID NO: 53040 - protein, 218 aa, Glycine max
  peptide (1)..(218): Ceres Seq. ID no. 15176072
  misc_feature (1)..(67): Homolog of NCBI NO: 13543925 NR Description: C6orf134 protein [Homo sapiens]
  misc_feature (1)..(51): Homolog of NCBI NO: 34784851 NR Description: Unknown (protein for MGC:65893) [Danio rerio]
  misc_feature (1)..(66): Homolog of NCBI NO: 21739343 NR Description: hypothetical protein [Homo sapiens]
  misc_feature (1)..(66): Homolog of NCBI NO: 13376369 NR Description: hypothetical protein FLJ13158 [Homo sapiens]
  misc_feature (1)..(67): Homolog of NCBI NO: 27754164 NR Description: RIKEN cDNA 3110080J08 [Mus musculus]
  misc_feature (1)..(67): Homolog of NCBI NO: 21040499 NR Description: 3110080J08Rik protein [Mus musculus]
  misc_feature (1)..(49): Homolog of NCBI NO: 31214465 NR Description: ENSANGP00000017438 [Anopheles gambiae]
  misc_feature (1)..(66): Homolog of NCBI NO: 26390241 NR Description: unnamed protein product [Mus musculus]
  misc_feature (1)..(66): Homolog of NCBI NO: 34852055 NR Description: similar to 3110080J08Rik protein [Rattus
  misc_feature (1)..(66): Homolog of NCBI NO: 22137720 NR Description: 3110080J08Rik protein [Mus musculus]
MMLEKENIDPSKIAYDRPSPKLIGFLKKHYGLVSYVPQNNNFVVFNAFWDNPNKTFQGNRAPTSHSNHHGHHHEERKNNLHSDRGYSRGTLANQERNYHNRNGNTSYNSLPQEQERVIVKDDIKGRGGANSMKDDFAVSSMNDNMKSTETLIKETEAKIQKLNLEKQKLMVPEERRQKEYHSTTPPWANHADHFNNYKTSNCYGNHYNRFQPLGRHGK

SEQ ID NO: 53041 - DNA, 1379 bp, Glycine max
  misc_feature (1)..(1379): Ceres Seq. ID no. 14304944
attttttataagtcgcttgctttttttcttcttcttcttcttcttcttttttcattcattcatttgtatttaatctacattacaacttttttttttcattcattcatttgtgttagccttgtatgtttatttataagttttaaccttaagtatatatcatttgttttctgttgatattttatacctattaacctgtgcataataagtgcagtatatctttatagagtgaatagcttctgtacgctttctgcttcaatgaaagactctaactaaatataaactgactggagctggttattgtttagctgtgtaagcagagttgtgtccataaacttagtcctgtatggagagaaacatgcacgttccttgctttctaagttttgtcattgactacatcaggacagtgtccccgattcattagtatgcatgcagatatatgaaggggtataggccttgggaaggaaaagaaggattttgctcctctaaataagggaggaaaaatttgagaaaatcacattccttgttgtttgtttccttcttttggaatttaactatgtaggggctctaagctgattttgagagtgttgttaaatatctgctatagtggtattgcattgcagaattccttggatctgtaattgagactccgtccactactgcaactgctatgggtcttgtggttgtggcatgtgtcatacatcctcttgtcatctttgatcctcacccagacaaagaacccctaagttggagtactcgaatgaagattgctgttggagctgctcgtggccttgaatatctccattgtaaagcagatccacctgttatctacagggacttgaaatctgcgaacatcttgttagataatgaattcaacccaaaactgtcagattttgggcttgctaaacttggacctgttggagacaatacccatgtttcaaccagagtgatgggaacatatggttactgtgcaccagagtatgccatgagcggcaaattaactcttaaatctgatatatatagctttggtgtgcttttgttggagttgatcactggacgtagggcaatagatactaatagaagaccaggagagcaaaacttggtttcatgggtaaatatttagtttgtatagtttatttaaaaagaaattcccctttaagtttagtatgttagtcttagctttgtatgcaagtgattccttttagattttcatcttttcactagcatattgagatttctcatataaaattttatgagaaagtgtggaaaaactagaaattagagcatgtctcatctcattaatcattatgaaaactctagcgtgttataaggcgtttcctgccttcttcataaattataatgaatccttgggattctttgac

SEQ ID NO: 53042 - protein, 150 aa, Glycine max
  peptide (1)..(150): Ceres Seq. ID no. 14304945
  misc_feature (15)..(147): Homolog of NCBI NO: 10445209 NR Description: protein serine/threonine kinase BNK1 [Brassica
  misc_feature (15)..(147): Homolog of NCBI NO: 21740745 NR Description: OSJNBa0072K14.3 [Oryza sativa (japonica
  misc_feature (15)..(147): Homolog of NCBI NO: 34394036 NR Description: putative protein serine/threonine kinase BNK1
  misc_feature (15)..(147): Homolog of NCBI NO: 30679773 NR Description: protein kinase family [Arabidopsis thaliana]
  misc_feature (15)..(147): Homolog of NCBI NO: 11259782 NR Description: protein kinase-like - Arabidopsis thaliana
  misc_feature (15)..(147): Homolog of NCBI NO: 34907210 NR Description: putative serine/threonine kinase PBS1 protein
  misc_feature (15)..(147): Homolog of NCBI NO: 15223033 NR Description: protein kinase, putative [Arabidopsis thaliana]
  misc_feature (15)..(147): Homolog of NCBI NO: 15238886 NR Description: protein kinase family [Arabidopsis thaliana]
  misc_feature (15)..(147): Homolog of NCBI NO: 15217992 NR Description: protein kinase -related [Arabidopsis thaliana]
  misc_feature (15)..(147): Homolog of NCBI NO: 8778594 NR Description: F5M15.3 [Arabidopsis thaliana]
MGLVVVACVIHPLVIFDPHPDKEPLSWSTRMKIAVGAARGLEYLHCKADPPVIYRDLKSANILLDNEFNPKLSDFGLAKLGPVGDNTHVSTRVMGTYGYCAPEYAMSGKLTLKSDIYSFGVLLLELITGRRAIDTNRRPGEQNLVSWVNI

SEQ ID NO: 53043 - protein, 120 aa, Glycine max
  peptide (1)..(120): Ceres Seq. ID no. 14304946
  misc_feature (1)..(117): Homolog of NCBI NO: 10445209 NR Description: protein serine/threonine kinase BNK1 [Brassica
  misc_feature (1)..(117): Homolog of NCBI NO: 21740745 NR Description: OSJNBa0072K14.3 [Oryza sativa (japonica
  misc_feature (1)..(117): Homolog of NCBI NO: 34394036 NR Description: putative protein serine/threonine kinase BNK1
  misc_feature (1)..(117): Homolog of NCBI NO: 30679773 NR Description: protein kinase family [Arabidopsis thaliana]
  misc_feature (1)..(117): Homolog of NCBI NO: 11259782 NR Description: protein kinase-like - Arabidopsis thaliana
  misc_feature (1)..(117): Homolog of NCBI NO: 34907210 NR Description: putative serine/threonine kinase PBS1 protein
  misc_feature (1)..(117): Homolog of NCBI NO: 15223033 NR Description: protein kinase, putative [Arabidopsis thaliana]
  misc_feature (1)..(117): Homolog of NCBI NO: 15238886 NR Description: protein kinase family [Arabidopsis thaliana]
  misc_feature (1)..(117): Homolog of NCBI NO: 15217992 NR Description: protein kinase -related [Arabidopsis thaliana]
  misc_feature (1)..(117): Homolog of NCBI NO: 8778594 NR Description: F5M15.3 [Arabidopsis thaliana]
MKIAVGAARGLEYLHCKADPPVIYRDLKSANILLDNEFNPKLSDFGLAKLGPVGDNTHVSTRVMGTYGYCAPEYAMSGKLTLKSDIYSFGVLLLELITGRRAIDTNRRPGEQNLVSWVNI

SEQ ID NO: 53044 - DNA, 821 bp, Glycine max
  misc_feature (1)..(821): Ceres Seq. ID no. 12606912
atgatttctctctatatagaatatcgaaattttagaactgaagtgttgaatcgatgtagttttggtgaagatccatgtttatatactcgaaaagcgttaatttgatgtttgaaaggttgttcataatttttgtttcttgttaacagttgttttttgttgatttggttgtggtgcagacaaaaaacaaggatcagaaccgttgaatcaagttgaggaagatggcactagtctctggaggaagatcaacactgaaccctaacgcccctctttacattcctgccgcgtttcgccaagtggaggatttctctccggaatggtggcagctggtgacgacgctgacatggtaccatgactactggctaagccagcagcacgatgagggagccttctacggcgaggacgacgggtttgatggcaatgatgtcgttgatttgcttcctgattcgtttgatcttgatgctggcgaggatctttttgaagagtttataagatcttctgaatcccaagaagaaactgggcccaaagtaactgcatgaggcttagagatgaacccatttaaagaatctacctaccaacctaagagactggacccaaggccttagctttaggtcagttagatgatatgtttgcatcatgttatccgtagcttcaactttctgtaacttcttgtataggcaaaggtttcaaaccttcaatctatccttctcttgcttttgccaaaatgttatggtgaatagggaaggaaaaagatggaaaaaaatgtgactgtttcatgtactgatattgtaaaagctgctaaaagtattcaaattacaaaatgt

SEQ ID NO: 53045 - protein, 105 aa, Glycine max
  peptide (1)..(105): Ceres Seq. ID no. 12606913
  misc_feature (9)..(62): Homolog of NCBI NO: 21592596 NR Description: unknown [Arabidopsis thaliana]
  misc_feature (9)..(62): Homolog of NCBI NO: 18414176 NR Description: Expressed protein
  misc_feature (9)..(86): Homolog of NCBI NO: 34899128 NR Description: P0496C02.30 [Oryza sativa (japonica
  misc_feature (9)..(86): Homolog of NCBI NO: 34395186 NR Description: unknown protein [Oryza sativa (japonica
  misc_feature (9)..(86): Homolog of NCBI NO: 32352142 NR Description: hypothetical protein [Oryza sativa (japonica
  misc_feature (1)..(87): Homolog of NCBI NO: 21592689 NR Description: ERD15 protein [Arabidopsis thaliana]
  misc_feature (1)..(87): Homolog of NCBI NO: 15227351 NR Description: ERD15 protein
  misc_feature (1)..(105): Homolog of NCBI NO: 8489786 NR Description: dehydration-induced protein ERD15 [Lycopersicon
MALVSGGRSTLNPNAPLYIPAAFRQVEDFSPEWWQLVTTLTWYHDYWLSQQHDEGAFYGEDDGFDGNDVVDLLPDSFDLDAGEDLFEEFIRSSESQEETGPKVTA

SEQ ID NO: 53046 - DNA, 1418 bp, Glycine max
  misc_feature (1)..(1418): Ceres Seq. ID no. 15177221
gataggtacattgtcagacatctctgccaatgacgcttattattctagtattttaagaattttcagtcaaaagtgacatgatcctgcaatcatcaaacacatctttttaaggctcaatttaaaagttcaagaggtgtcatcaggcgttgagatagaaaagaaaacatgaggggaaaggcaggttcaggaaagaccattttgtttgtatgcattgcatgctttcttgcgggaaccctcttcaatggccagatgtggacacgcccctccaaccatgaaaatgaaaatacactactacgtctaccacccagacctgattgtgatcataagcgaaaactgattgaaggcaaacctggtgatgtaatggaggaagtcgtaaagactcatcaagctatcaagtcactggataaggcagtttcgacactggaaatggaactgacagcaagccaaactggtgggcggcaacggtcttctaaccacagtgtacagaaggcttttgtggtgattggtattaacacagcatttagcagcaaaaggcgaagagactcgatacgccaaacatggttatctaaacgaaatcagctgaaggaattagagaaagagaagggcattgttgtaaggttcgtgatcgggcacagtacaacaccgggtggcattcttgataaagcaattgatgcagaagaggcagaacacaaggacttcctcaggttagaccatgttgagggctaccatgagctatccaccaagactcgcctctacttttccactattacttctatgtgggatgctgatttctatgtcaaggtcgacgatgatatccatttaaatctaggtatgttagtgagtacacttgctaagtaccgatcaagacccaggatttatattggttgcatgaaatctggtcctgttctatatcaaaaaggagtaaagtatcatgaggctgagaactggaagtttggagaggaaggaaacaagtattttaggcatgccactggccaaatatatgccatctccaaggatctcgctacttatatatccatcaattggcccatattgcacagatacgcaaatgaagacgtatctttaggttcatggttattgggcctagaagttgaacatgtcgatgaacgctctatgtgttgcgggacccctccagattgtgattggaaggcaaggacgggaaatgtgtgcgtggcatccttcgactggtcatgcagtggtatctgtaagtcggtagagagaatgagagatatacacaaaacttgtggggagggtgacggagctgtttggaacgttgacctttaattctcaaattgagacatagaaaatcttatagctttactacttttgcattaagaggaattgaatccattttccttatattttaatgaaatttgagggacaatatctatactaaaaag

SEQ ID NO: 53047 - protein, 378 aa, Glycine max
  peptide (1)..(378): Ceres Seq. ID no. 15177222
  misc_feature (123)..(321): Pfam Name: Galactosyltransferase Pfam Description: Galactosyltransferase
  misc_feature (43)..(373): Homolog of NCBI NO: 18416895 NR Description: galactosyltransferase family [Arabidopsis
  misc_feature (14)..(378): Homolog of NCBI NO: 18395060 NR Description: galactosyltransferase family [Arabidopsis
  misc_feature (7)..(373): Homolog of NCBI NO: 7485336 NR Description: hypothetical protein F10M23.280 - Arabidopsis
  misc_feature (7)..(375): Homolog of NCBI NO: 15223337 NR Description: galactosyltransferase family [Arabidopsis
  misc_feature (1)..(375): Homolog of NCBI NO: 34365705 NR Description: At1g77810 [Arabidopsis thaliana]
  misc_feature (1)..(375): Homolog of NCBI NO: 12323294 NR Description: putative (Avr9) elicitor response protein;
  misc_feature (1)..(375): Homolog of NCBI NO: 30699558 NR Description: Avr9 elicitor response protein -related
  misc_feature (7)..(375): Homolog of NCBI NO: 4138265 NR Description: Avr9 elicitor response protein [Nicotiana tabacum]
  misc_feature (8)..(376): Homolog of NCBI NO: 34907342 NR Description: putative elicitor response protein
  misc_feature (1)..(375): Homolog of NCBI NO: 15217544 NR Description: galactosyltransferase family [Arabidopsis
MRGKAGSGKTILFVCIACFLAGTLFNGQMWTRPSNHENENTLLRLPPRPDCDHKRKLIEGKPGDVMEEVVKTHQAIKSLDKAVSTLEMELTASQTGGRQRSSNHSVQKAFVVIGINTAFSSKRRRDSIRQTWLSKRNQLKELEKEKGIVVRFVIGHSTTPGGILDKAIDAEEAEHKDFLRLDHVEGYHELSTKTRLYFSTITSMWDADFYVKVDDDIHLNLGMLVSTLAKYRSRPRIYIGCMKSGPVLYQKGVKYHEAENWKFGEEGNKYFRHATGQIYAISKDLATYISINWPILHRYANEDVSLGSWLLGLEVEHVDERSMCCGTPPDCDWKARTGNVCVASFDWSCSGICKSVERMRDIHKTCGEGDGAVWNVDL

SEQ ID NO: 53048 - protein, 350 aa, Glycine max
  peptide (1)..(350): Ceres Seq. ID no. 15177223
  misc_feature (95)..(293): Pfam Name: Galactosyltransferase Pfam Description: Galactosyltransferase
  misc_feature (15)..(345): Homolog of NCBI NO: 18416895 NR Description: galactosyltransferase family [Arabidopsis
  misc_feature (1)..(350): Homolog of NCBI NO: 18395060 NR Description: galactosyltransferase family [Arabidopsis
  misc_feature (1)..(345): Homolog of NCBI NO: 7485336 NR Description: hypothetical protein F10M23.280 - Arabidopsis
  misc_feature (1)..(347): Homolog of NCBI NO: 15223337 NR Description: galactosyltransferase family [Arabidopsis
  misc_feature (1)..(347): Homolog of NCBI NO: 34365705 NR Description: At1g77810 [Arabidopsis thaliana]
  misc_feature (1)..(347): Homolog of NCBI NO: 12323294 NR Description: putative (Avr9) elicitor response protein;
  misc_feature (1)..(347): Homolog of NCBI NO: 30699558 NR Description: Avr9 elicitor response protein -related
  misc_feature (1)..(347): Homolog of NCBI NO: 4138265 NR Description: Avr9 elicitor response protein [Nicotiana tabacum]
  misc_feature (1)..(348): Homolog of NCBI NO: 34907342 NR Description: putative elicitor response protein
  misc_feature (1)..(347): Homolog of NCBI NO: 15217544 NR Description: galactosyltransferase family [Arabidopsis
MWTRPSNHENENTLLRLPPRPDCDHKRKLIEGKPGDVMEEVVKTHQAIKSLDKAVSTLEMELTASQTGGRQRSSNHSVQKAFVVIGINTAFSSKRRRDSIRQTWLSKRNQLKELEKEKGIVVRFVIGHSTTPGGILDKAIDAEEAEHKDFLRLDHVEGYHELSTKTRLYFSTITSMWDADFYVKVDDDIHLNLGMLVSTLAKYRSRPRIYIGCMKSGPVLYQKGVKYHEAENWKFGEEGNKYFRHATGQIYAISKDLATYISINWPILHRYANEDVSLGSWLLGLEVEHVDERSMCCGTPPDCDWKARTGNVCVASFDWSCSGICKSVERMRDIHKTCGEGDGAVWNVDL

SEQ ID NO: 53049 - protein, 313 aa, Glycine max
  peptide (1)..(313): Ceres Seq. ID no. 15177224
  misc_feature (58)..(256): Pfam Name: Galactosyltransferase Pfam Description: Galactosyltransferase
  misc_feature (1)..(308): Homolog of NCBI NO: 18416895 NR Description: galactosyltransferase family [Arabidopsis
  misc_feature (1)..(313): Homolog of NCBI NO: 18395060 NR Description: galactosyltransferase family [Arabidopsis
  misc_feature (1)..(308): Homolog of NCBI NO: 7485336 NR Description: hypothetical protein F10M23.280 - Arabidopsis
  misc_feature (1)..(310): Homolog of NCBI NO: 15223337 NR Description: galactosyltransferase family [Arabidopsis
  misc_feature (1)..(310): Homolog of NCBI NO: 34365705 NR Description: At1g77810 [Arabidopsis thaliana]
  misc_feature (1)..(310): Homolog of NCBI NO: 12323294 NR Description: putative (Avr9) elicitor response protein;
  misc_feature (1)..(310): Homolog of NCBI NO: 30699558 NR Description: Avr9 elicitor response protein -related
  misc_feature (1)..(310): Homolog of NCBI NO: 4138265 NR Description: Avr9 elicitor response protein [Nicotiana tabacum]
  misc_feature (1)..(311): Homolog of NCBI NO: 34907342 NR Description: putative elicitor response protein
  misc_feature (1)..(310): Homolog of NCBI NO: 15217544 NR Description: galactosyltransferase family [Arabidopsis
MEEVVKTHQAIKSLDKAVSTLEMELTASQTGGRQRSSNHSVQKAFVVIGINTAFSSKRRRDSIRQTWLSKRNQLKELEKEKGIVVRFVIGHSTTPGGILDKAIDAEEAEHKDFLRLDHVEGYHELSTKTRLYFSTITSMWDADFYVKVDDDIHLNLGMLVSTLAKYRSRPRIYIGCMKSGPVLYQKGVKYHEAENWKFGEEGNKYFRHATGQIYAISKDLATYISINWPILHRYANEDVSLGSWLLGLEVEHVDERSMCCGTPPDCDWKARTGNVCVASFDWSCSGICKSVERMRDIHKTCGEGDGAVWNVDL

SEQ ID NO: 53050 - DNA, 1893 bp, Glycine max
  misc_feature (1)..(1893): Ceres Seq. ID no. 15226954
ccccccccccccccccataaggagctttgactagtgctgatatgctgctggaaatttattcttaaatgtgttgctactatttgttaacttgtccattatctacagctagggatcttgtgtaaaccttttgacatccctcaagagaaagaggaatagagtgaagtatgagtattggaatatagttcgataggatttatatgattatgaaaggatttcatttcattacttaggcatattcgtttaatctggtaagttaatagcagttctgaacattggtaatggattcatggccaactatagaacttaagaagttaaaataatcttttgctaatgtgtggattccatactgtgataaatgtgctgctgtttgtttacttgtcctttatctgcggctaggaatcttgtgtaagccttttgacatcctttaaatgaaataggaatagaatgaagtttgagaattggaatatagttcaatagggggttatatgattatgaaaggatttcatttctttactaaggcatattcgtttgatctggcaagttagtagcggtaataacctgagaagttaactaatgtatgggaaatgtgcggattccatacttgtctaaaagtaacctagaacagagttgctatttaggtttggaatatatgctttcatgttgcaaattagcaatattccttgttgacataatatgctctccatcaatcagacattatcttgtaactgaaaatgtttacttggaaaacattattctcctcctataagaacagtaggtaacattatttcctgttatcctgaacttgtttcttcagaatctaaagttaaagtaaattttggccttctgttttgtctgtgttttatcaaggtcgaagttgttttcttttggataggctatgctaatcatttgtgtttaattttcaatgttactttaataaagagtgctctcatcaggaatttactgaatgagactatccacttgtttagaagcacgatttacaacccccaacaatttacatcccagatgtgaaaatctcagaagcaacagctagtagcattatcggatgtgaaaaatcacgtctccgattcatttccaaacatgctacggagtttctgtcatgtcaaagggtttagtgatatgttgcaatatatatgtatgtgaatttgatatctgtttgaaattctttatttaaaaactgtaagtacatcattgaataccaaattccaattctaatactctacttttcagtaagctctcatattttagcaaccatccagtacctgttgtattagaaccacataccataaaccaaaacctcatgtgtctttataaagctgaaatccgataactgttgtttgatttttgacagatgatgtattcattcctagaccgagttatcaacctgggacttcctaggacaagagatttccaaggtgtgaaccccaacagctttgatgggcatgggaactacagcattggcattaaggaccagggtgtgttcccagagatcagagccgatgttgttggtaagcctcggggaatggatatctgcatcgtgacgacggctaataccgaccaagaagcacagaaattgttagctcttatgggtatgcccttcagagagggaagtggtcctgccacgacaattcggaaaaagaagcttaagtctcatcattttgatgcaaaatcaaagggaagaggaaggaggtgacatagttttgatgcaaaatcataggataaaaggaagtaaggttggaaccagaagagactgtgttgtattcctggtttcattcagatgtaatattatttttgattctttatgtaagaggcttggacatgccatcaactatgtcgctatgaggttataatgtggtcttgcagatcttgcttgct

SEQ ID NO: 53051 - protein, 113 aa, Glycine max
  peptide (1)..(113): Ceres Seq. ID no. 15226955
  misc_feature (1)..(84): Pfam Name: ribosomal L5P family C-terminus Pfam Description: ribosomal L5P family C-terminus
  misc_feature (1)..(84): Homolog of NCBI NO: 23042780 NR Description: COG0094: Ribosomal protein L5 [Trichodesmium
  misc_feature (1)..(85): Homolog of NCBI NO: 132987 NR Description: 50S RIBOSOMAL PROTEIN L5
  misc_feature (2)..(85): Homolog of NCBI NO: 11466362 NR Description: ribosomal protein L5 [Mesostigma viride]
  misc_feature (1)..(85): Homolog of NCBI NO: 14719574 NR Description: Chain A, 5s-Rrna Binding Ribosomal Protein L5
  misc_feature (1)..(85): Homolog of NCBI NO: 22297637 NR Description: 50S ribosomal protein L5 [Thermosynechococcus
  misc_feature (1)..(85): Homolog of NCBI NO: 34811557 NR Description: Chain D, Crystal Structure Of A Streptomycin Ribosome From Escherichia Coli, 50s Subunit Of 70s Ribosome. This
  misc_feature (1)..(85): Homolog of NCBI NO: 15805352 NR Description: ribosomal protein L5 [Deinococcus radiodurans]
  misc_feature (1)..(113): Homolog of NCBI NO: 3777600 NR Description: 50S ribosomal protein L5 [Oryza sativa]
  misc_feature (1)..(110): Homolog of NCBI NO: 15234136 NR Description: ribosomal protein L5p family [Arabidopsis
  misc_feature (1)..(110): Homolog of NCBI NO: 7582405 NR Description: plastid ribosomal protein PRPL5 [Spinacia
MMYSFLDRVINLGLPRTRDFQGVNPNSFDGHGNYSIGIKDQGVFPEIRADVVGKPRGMDICIVTTANTDQEAQKLLALMGMPFREGSGPATTIRKKKLKSHHFDAKSKGRGRR

SEQ ID NO: 53052 - protein, 112 aa, Glycine max
  peptide (1)..(112): Ceres Seq. ID no. 15226956
  misc_feature (1)..(83): Pfam Name: ribosomal L5P family C-terminus Pfam Description: ribosomal L5P family C-terminus
  misc_feature (1)..(83): Homolog of NCBI NO: 23042780 NR Description: COG0094: Ribosomal protein L5 [Trichodesmium
  misc_feature (1)..(84): Homolog of NCBI NO: 132987 NR Description: 50S RIBOSOMAL PROTEIN L5
  misc_feature (1)..(84): Homolog of NCBI NO: 11466362 NR Description: ribosomal protein L5 [Mesostigma viride]
  misc_feature (1)..(84): Homolog of NCBI NO: 14719574 NR Description: Chain A, 5s-Rrna Binding Ribosomal Protein L5
  misc_feature (1)..(84): Homolog of NCBI NO: 22297637 NR Description: 50S ribosomal protein L5 [Thermosynechococcus
  misc_feature (1)..(84): Homolog of NCBI NO: 34811557 NR Description: Chain D, Crystal Structure Of A Streptomycin Ribosome From Escherichia Coli, 50s Subunit Of 70s Ribosome. This
  misc_feature (1)..(84): Homolog of NCBI NO: 15805352 NR Description: ribosomal protein L5 [Deinococcus radiodurans]
  misc_feature (1)..(112): Homolog of NCBI NO: 3777600 NR Description: 50S ribosomal protein L5 [Oryza sativa]
  misc_feature (1)..(109): Homolog of NCBI NO: 15234136 NR Description: ribosomal protein L5p family [Arabidopsis
  misc_feature (1)..(109): Homolog of NCBI NO: 7582405 NR Description: plastid ribosomal protein PRPL5 [Spinacia
MYSFLDRVINLGLPRTRDFQGVNPNSFDGHGNYSIGIKDQGVFPEIRADVVGKPRGMDICIVTTANTDQEAQKLLALMGMPFREGSGPATTIRKKKLKSHHFDAKSKGRGRR

SEQ ID NO: 53053 - protein, 62 aa, Glycine max
  peptide (1)..(62): Ceres Seq. ID no. 15226957
MQNQREEEGGDIVLMQNHRIKGSKVGTRRDCVVFLVSFRCNIIFDSLCKRLGHAINYVAMRL

SEQ ID NO: 53054 - DNA, 1691 bp, Glycine max
  misc_feature (1)..(1691): Ceres Seq. ID no. 15174842
gtaatgctcacatctcagaccctttcatttatatgcatagaaatgtgacgaaaagaaaaaaacttgatctgtttcatgagttgagttaatacccactttgcctatgtttacttcaaactcttgttctgcattgtccactcttactctgatttgcctgctgcaatggttctttaggttgctttctcttacaatttttgtgggtaaactttagatctgtccattatgttgagatttagcttctttgagtaaaaagtaaaagcacattaccaaagttaatgagatgttttacctaattcaaatgagaagtgaatatactatctcattttacatatatgggatccccccccccccccgaaggaatatctagctatgggagacattgatccagcttttatacaatccacagaacaccgtcccatagcaaaggtggtggaagttagagagattccagtgatagacctttcagaaggtagaaaagaattactcatttcagaaattggcaaagcatgtgaggagtggggatttttccaagtaataaatcatggggtaccctttgagattagtagagaggttgagattgtctccaagaagttctttgagacgagcttagaggagaagaagaaagtgaaaagagatgaatttaatgcaatggggtaccatgatggggagcacaccaagaacgtaagagactggaaagaggtgtttgattaccttgttgaaaacactgcacaagtcccatcttcccatgagccaaatgatttggatttgaggactctcaccaaccaatggccccaaaactctcctcattttagggaaacattgcaagagtatgctcgagaagtggaaaagctagcttacaagttgttggagctgatttcacagagcttgggtttggctgctgacaaattccatggctgtttcaagaaccaactcagcatggtgcgactcaattactatcccgcatgccctttccctgacctggcacttggtgttggtcgccacaaggattccagtgctttaactgtgcttgcccaagatgatgttggaggattacaagttaagagaaaatcagatggagaatggattcctgttaaacctaccccaaatgcatttattatcaatgtgggggatatagttcaggtttggagcaatgacaagtacgagagcgtggagcacagggtggtggtgaatacagaaaaggaaaggttttcaattccattcttctttttccctgctcaccatgttatggtgaagcctgccgaggagctggtaaatgagcaaaatccagcaagatatagagaatacaagtatggtaagttctttgccaacagaaaccggagtgatttcaagaagcgtgatgtggagaatatccaaattcatcacttcaggatcttggatgaggcatttgggttggcatcctcaatatcatccatatctgagcataactagttctatctgctagttccatcatttcaaatccaaacaaaattgtgttggttcgattctgccaataaataataaaatattgagctttagttctagtatgtgttgttctctaaatttttattctatataaagagttcaagacatggactagtgtaagttgtagtgtgagtatctggtaacaccttagaagtcctggttgagtataaaatcactgtgaaatcaatacaaaagaagacattttatcc

SEQ ID NO: 53055 - protein, 359 aa, Glycine max
  peptide (1)..(359): Ceres Seq. ID no. 15174843
  misc_feature (187)..(288): Pfam Name: 2OG-Fe(II) oxygenase superfamily Pfam Description: 2OG-Fe(II) oxygenase superfamily
  misc_feature (8)..(317): Homolog of NCBI NO: 34907194 NR Description: putative ethylene-forming enzyme
  misc_feature (8)..(318): Homolog of NCBI NO: 15235124 NR Description: oxidoreductase, 2OG-Fe(II) oxygenase family
  misc_feature (25)..(317): Homolog of NCBI NO: 18402992 NR Description: oxidoreductase, 2OG-Fe(II) oxygenase family
  misc_feature (39)..(243): Homolog of NCBI NO: 18103924 NR Description: putative oxylase protein [Pinus pinaster]
  misc_feature (213)..(340): Homolog of NCBI NO: 40253917 NR Description: putative Isopenicillin N synthase and related
  misc_feature (4)..(148): Homolog of NCBI NO: 40253917 NR Description: putative Isopenicillin N synthase and related
  misc_feature (1)..(258): Homolog of NCBI NO: 30685157 NR Description: flavonol synthase family [Arabidopsis thaliana]
  misc_feature (1)..(341): Homolog of NCBI NO: 18402081 NR Description: flavonol synthase family [Arabidopsis thaliana]
  misc_feature (1)..(341): Homolog of NCBI NO: 21593702 NR Description: unknown [Arabidopsis thaliana]
  misc_feature (1)..(340): Homolog of NCBI NO: 18402079 NR Description: oxidoreductase, 2OG-Fe(II) oxygenase family
MGDIDPAFIQSTEHRPIAKVVEVREIPVIDLSEGRKELLISEIGKACEEWGFFQVINHGVPFEISREVEIVSKKFFETSLEEKKKVKRDEFNAMGYHDGEHTKNVRDWKEVFDYLVENTAQVPSSHEPNDLDLRTLTNQWPQNSPHFRETLQEYAREVEKLAYKLLELISQSLGLAADKFHGCFKNQLSMVRLNYYPACPFPDLALGVGRHKDSSALTVLAQDDVGGLQVKRKSDGEWIPVKPTPNAFIINVGDIVQVWSNDKYESVEHRVVVNTEKERFSIPFFFFPAHHVMVKPAEELVNEQNPARYREYKYGKFFANRNRSDFKKRDVENIQIHHFRILDEAFGLASSISSISEHN

SEQ ID NO: 53056 - protein, 266 aa, Glycine max
  peptide (1)..(266): Ceres Seq. ID no. 15174844
  misc_feature (94)..(195): Pfam Name: 2OG-Fe(II) oxygenase superfamily Pfam Description: 2OG-Fe(II) oxygenase superfamily
  misc_feature (1)..(224): Homolog of NCBI NO: 34907194 NR Description: putative ethylene-forming enzyme
  misc_feature (1)..(225): Homolog of NCBI NO: 15235124 NR Description: oxidoreductase, 2OG-Fe(II) oxygenase family
  misc_feature (1)..(224): Homolog of NCBI NO: 18402992 NR Description: oxidoreductase, 2OG-Fe(II) oxygenase family
  misc_feature (1)..(150): Homolog of NCBI NO: 18103924 NR Description: putative oxylase protein [Pinus pinaster]
  misc_feature (120)..(247): Homolog of NCBI NO: 40253917 NR Description: putative Isopenicillin N synthase and related
  misc_feature (1)..(55): Homolog of NCBI NO: 40253917 NR Description: putative Isopenicillin N synthase and related
  misc_feature (1)..(165): Homolog of NCBI NO: 30685157 NR Description: flavonol synthase family [Arabidopsis thaliana]
  misc_feature (1)..(248): Homolog of NCBI NO: 18402081 NR Description: flavonol synthase family [Arabidopsis thaliana]
  misc_feature (1)..(248): Homolog of NCBI NO: 21593702 NR Description: unknown [Arabidopsis thaliana]
  misc_feature (1)..(247): Homolog of NCBI NO: 18402079 NR Description: oxidoreductase, 2OG-Fe(II) oxygenase family
MGYHDGEHTKNVRDWKEVFDYLVENTAQVPSSHEPNDLDLRTLTNQWPQNSPHFRETLQEYAREVEKLAYKLLELISQSLGLAADKFHGCFKNQLSMVRLNYYPACPFPDLALGVGRHKDSSALTVLAQDDVGGLQVKRKSDGEWIPVKPTPNAFIINVGDIVQVWSNDKYESVEHRVVVNTEKERFSIPFFFFPAHHVMVKPAEELVNEQNPARYREYKYGKFFANRNRSDFKKRDVENIQIHHFRILDEAFGLASSISSISEHN

SEQ ID NO: 53057 - DNA, 1357 bp, Glycine max
  misc_feature (1)..(1357): Ceres Seq. ID no. 14306773
tcagcgctacgtaggcccccccccccaagaacgataacaaaattgaaatcgaattgggtgcgaagtgaaatgttgcaaaccctaggaggcgtaatccctcgcttcgtgagtcgctcatggctccgaaacctgacggtgcgtgcaatggcattctcttcctcctcctccgattatggagaccagtcacgtggtggccttccccgcttctactccgaaactcttcctccttccaagggtagtgttatacgcgtgcaaggtgatgaattctggcatatgacaaaagttttgaggttaaccaccaatgatagggtacagctcttcaatgggaaaggaagtctggtagaaggatgcatacagagcattgatcgaactggacttgattttgttgcattgaatgatttgatatcaatccctccacaaaatacacaattgcatgtatttgctggttttggtactctgaagggtggccgtgctgactggcttgtagagaaatgcacagaatttggagccaatagtgttactcctctattgactgaacattctccgtcaatctcagaaaatcgggtggacagattgaaacgtgtcattttagcagcatccaaacaaagtcaacgactgcatgaaatggtcttgaaacatcctatagagattgatgaccttttgcaccttattgcgcaatcaaagctatctcttgttgcaactgcgaaggcaactcctgttcttagtgcattggcatcgttggaaaaggaaactagtggcttaatcataattggaccagaaggagatttcactgagaaagaagtgagtatgatgatggaagcaggtgctacagctgttagtcttggacctcatcgtcttcgggttgaaactgccacgatagcacttttggcaactgtcatgttatggtctgactcacagcaaatttcagtctgttgattcctcagtgtagctgagagagtacgtggatgacacagaggagtgggaggactacataatcattgccctggattgagaaacaaaaccgtctcctgcaagtgggagtgaagctttgcacagcaagtgtgcttttgaatgccttaatttgtgtgactggtgtatttgccatgaatattcatattaagctatttgatacagggatgcctcagttcctcgggactatttttggaggcattgctgcttgcatattcttgtatttggttaccgttttttggtatatggtggactagctgcccaccaaattgtgttccaaatataaatgtaatttgatttgaaagttagttttctatgtaggtgctagaaattttttcactacaagacaactacgggaagtcagtaacaatttctttctaatatattc

SEQ ID NO: 53058 - protein, 311 aa, Glycine max
  peptide (1)..(311): Ceres Seq. ID no. 14306774
  misc_feature (193)..(300): Pfam Name: Protein of unknown function (DUF558) Pfam Description: Protein of unknown function (DUF558)
  misc_feature (84)..(299): Homolog of NCBI NO: 21674816 NR Description: conserved hypothetical protein [Chlorobium
  misc_feature (91)..(294): Homolog of NCBI NO: 23138295 NR Description: hypothetical protein [Cytophaga hutchinsonii]
  misc_feature (66)..(304): Homolog of NCBI NO: 23060562 NR Description: hypothetical protein [Pseudomonas fluorescens
  misc_feature (66)..(304): Homolog of NCBI NO: 23103487 NR Description: hypothetical protein [Azotobacter vinelandii]
  misc_feature (66)..(300): Homolog of NCBI NO: 23022026 NR Description: hypothetical protein [Clostridium thermocellum
  misc_feature (66)..(304): Homolog of NCBI NO: 28872189 NR Description: conserved hypothetical protein TIGR00046
  misc_feature (66)..(304): Homolog of NCBI NO: 23469784 NR Description: hypothetical protein [Pseudomonas syringae pv.
  misc_feature (79)..(304): Homolog of NCBI NO: 23054125 NR Description: hypothetical protein [Geobacter metallireducens]
  misc_feature (66)..(304): Homolog of NCBI NO: 26991662 NR Description: conserved hypothetical protein TIGR00046
  misc_feature (46)..(308): Homolog of NCBI NO: 15222855 NR Description: hypothetical protein [Arabidopsis thaliana]
SALRRPPPPRTITKLKSNWVRSEMLQTLGGVIPRFVSRSWLRNLTVRAMAFSSSSSDYGDQSRGGLPRFYSETLPPSKGSVIRVQGDEFWHMTKVLRLTTNDRVQLFNGKGSLVEGCIQSIDRTGLDFVALNDLISIPPQNTQLHVFAGFGTLKGGRADWLVEKCTEFGANSVTPLLTEHSPSISENRVDRLKRVILAASKQSQRLHEMVLKHPIEIDDLLHLIAQSKLSLVATAKATPVLSALASLEKETSGLIIIGPEGDFTEKEVSMMMEAGATAVSLGPHRLRVETATIALLATVMLWSDSQQISVC

SEQ ID NO: 53059 - protein, 288 aa, Glycine max
  peptide (1)..(288): Ceres Seq. ID no. 14306775
  misc_feature (170)..(277): Pfam Name: Protein of unknown function (DUF558) Pfam Description: Protein of unknown function (DUF558)
  misc_feature (61)..(276): Homolog of NCBI NO: 21674816 NR Description: conserved hypothetical protein [Chlorobium
  misc_feature (68)..(271): Homolog of NCBI NO: 23138295 NR Description: hypothetical protein [Cytophaga hutchinsonii]
  misc_feature (43)..(281): Homolog of NCBI NO: 23060562 NR Description: hypothetical protein [Pseudomonas fluorescens
  misc_feature (43)..(281): Homolog of NCBI NO: 23103487 NR Description: hypothetical protein [Azotobacter vinelandii]
  misc_feature (43)..(277): Homolog of NCBI NO: 23022026 NR Description: hypothetical protein [Clostridium thermocellum
  misc_feature (43)..(281): Homolog of NCBI NO: 28872189 NR Description: conserved hypothetical protein TIGR00046
  misc_feature (43)..(281): Homolog of NCBI NO: 23469784 NR Description: hypothetical protein [Pseudomonas syringae pv.
  misc_feature (56)..(281): Homolog of NCBI NO: 23054125 NR Description: hypothetical protein [Geobacter metallireducens]
  misc_feature (43)..(281): Homolog of NCBI NO: 26991662 NR Description: conserved hypothetical protein TIGR00046
  misc_feature (23)..(285): Homolog of NCBI NO: 15222855 NR Description: hypothetical protein [Arabidopsis thaliana]
MLQTLGGVIPRFVSRSWLRNLTVRAMAFSSSSSDYGDQSRGGLPRFYSETLPPSKGSVIRVQGDEFWHMTKVLRLTTNDRVQLFNGKGSLVEGCIQSIDRTGLDFVALNDLISIPPQNTQLHVFAGFGTLKGGRADWLVEKCTEFGANSVTPLLTEHSPSISENRVDRLKRVILAASKQSQRLHEMVLKHPIEIDDLLHLIAQSKLSLVATAKATPVLSALASLEKETSGLIIIGPEGDFTEKEVSMMMEAGATAVSLGPHRLRVETATIALLATVMLWSDSQQISVC

SEQ ID NO: 53060 - protein, 263 aa, Glycine max
  peptide (1)..(263): Ceres Seq. ID no. 14306776
  misc_feature (145)..(252): Pfam Name: Protein of unknown function (DUF558) Pfam Description: Protein of unknown function (DUF558)
  misc_feature (36)..(251): Homolog of NCBI NO: 21674816 NR Description: conserved hypothetical protein [Chlorobium
  misc_feature (43)..(246): Homolog of NCBI NO: 23138295 NR Description: hypothetical protein [Cytophaga hutchinsonii]
  misc_feature (18)..(256): Homolog of NCBI NO: 23060562 NR Description: hypothetical protein [Pseudomonas fluorescens
  misc_feature (18)..(256): Homolog of NCBI NO: 23103487 NR Description: hypothetical protein [Azotobacter vinelandii]
  misc_feature (18)..(252): Homolog of NCBI NO: 23022026 NR Description: hypothetical protein [Clostridium thermocellum
  misc_feature (18)..(256): Homolog of NCBI NO: 28872189 NR Description: conserved hypothetical protein TIGR00046
  misc_feature (18)..(256): Homolog of NCBI NO: 23469784 NR Description: hypothetical protein [Pseudomonas syringae pv.
  misc_feature (31)..(256): Homolog of NCBI NO: 23054125 NR Description: hypothetical protein [Geobacter metallireducens]
  misc_feature (18)..(256): Homolog of NCBI NO: 26991662 NR Description: conserved hypothetical protein TIGR00046
  misc_feature (1)..(260): Homolog of NCBI NO: 15222855 NR Description: hypothetical protein [Arabidopsis thaliana]
MAFSSSSSDYGDQSRGGLPRFYSETLPPSKGSVIRVQGDEFWHMTKVLRLTTNDRVQLFNGKGSLVEGCIQSIDRTGLDFVALNDLISIPPQNTQLHVFAGFGTLKGGRADWLVEKCTEFGANSVTPLLTEHSPSISENRVDRLKRVILAASKQSQRLHEMVLKHPIEIDDLLHLIAQSKLSLVATAKATPVLSALASLEKETSGLIIIGPEGDFTEKEVSMMMEAGATAVSLGPHRLRVETATIALLATVMLWSDSQQISVC

SEQ ID NO: 53061 - DNA, 1575 bp, Glycine max
  misc_feature (1)..(1575): Ceres Seq. ID no. 14311171
gatgaacaatcaaccaagaaaacagtgagcacagttcagttgcacaccttctctgtgcttcttcttcgatgttcaattacaataacaccaactcgcttcatgaaacaccccactccaatttcgccctgtcacaatcgcatcactcatgcattggccactgtcacataaccgcgatcgctggatacgacaccctttcgttctagggtttcccctccaccactatggccatcagaggcgtcaatttcaaatggttcgatggctttttcttgtccatgctcgccaccagcatagctattgtggcaattaattggaagcggtatcaatcttgtactcaccctttgcacatatggactgtggttgactacgctgctgttttcactttccggcttttgatgtttgttgataacgggcttgcttcgggaatgggtttagattttgggtggccgcagagatatgctcgcttctgtggaagagtagttgtactttcaattcttgcattgcttctctatccatttctttgggcttggacaataattggtaccctgtggttcagcaacactaaaatctgcttgcctggagggggccagaaatggggcttccttatctggttactttttagctactgtggactcctctgtattgcttgcttggcaatgcggaagtggttaaaacgaagacaagcacgcatgttaggtgctcaagagggtatccctgtatccgcatttggggttctagttgaaatgatccgagtacctgattgggcatttgaagctgcaggtcaagaaacaaggagtatggcccaagatgctgcatatcatcctggactttacctaactccagcccagagagaagcagttgaagctttaattcaggaactcccatcgttcaggttaactgctgttcctactaattgcagtgaatgcctcatctgcttagaagaattccatgtaggaaatcaggtccgtggcctgccctgtgctcacaattttcatgttgaatgcattgatgagtggcttcggcttaatgtgaattgtcctcggtgccgttgctcagtatttcctaatcttgatctcagtgctctgtccaatatccgttctgagtctgaacagtcttctgccactgctgtgacaagcagagatatgacaggacaaacttctagtcagagttaccttctgagattacaggggcctctccacccagtttgtgttgactttgcagggccagctggtgagacagacaatgctttggaaaatgctgaaaatggtgttgtacctgttgtgactcaaaatatgtcaactagagatcaggccacttctggtgaacacatgcctgttggtctttcctcttcccaaaattagattgcttctcaactctgttatattcctaacccattcgtgagaagttgcaggttacatatcagtatccagccattgcctgaagctttatatatgatgtactttctaacatgaaaatttctggactgattcataaagaaatggatcagcttcctttttttctgagggatcttgtagaaataaagacttgaagggtgaaaatataccttttttttacttc

SEQ ID NO: 53062 - protein, 378 aa, Glycine max
  peptide (1)..(378): Ceres Seq. ID no. 14311172
  misc_feature (234)..(274): Pfam Name: Zinc finger, C3HC4 type (RING finger) Pfam Description: Zinc finger, C3HC4 type (RING finger)
  misc_feature (194)..(304): Homolog of NCBI NO: 39589113 NR Description: Hypothetical protein CBG00875 [Caenorhabditis
  misc_feature (194)..(304): Homolog of NCBI NO: 17531437 NR Description: ring finger protein (19.3 kD) (2J562)
  misc_feature (216)..(278): Homolog of NCBI NO: 23490777 NR Description: 23281-24001-related [Plasmodium yoelii yoelii]
  misc_feature (5)..(134): Homolog of NCBI NO: 23490777 NR Description: 23281-24001-related [Plasmodium yoelii yoelii]
  misc_feature (216)..(278): Homolog of NCBI NO: 23508079 NR Description: hypothetical protein [Plasmodium falciparum 3D7]
  misc_feature (22)..(138): Homolog of NCBI NO: 23508079 NR Description: hypothetical protein [Plasmodium falciparum 3D7]
  misc_feature (135)..(269): Homolog of NCBI NO: 19172014 NR Description: hypothetical protein T17F15.140-like protein
  misc_feature (81)..(358): Homolog of NCBI NO: 7487119 NR Description: hypothetical protein T17F15.140 - Arabidopsis
  misc_feature (1)..(358): Homolog of NCBI NO: 26449875 NR Description: unknown protein [Arabidopsis thaliana]
  misc_feature (1)..(358): Homolog of NCBI NO: 30692957 NR Description: zinc finger (C3HC4-type RING finger) protein
MAIRGVNFKWFDGFFLSMLATSIAIVAINWKRYQSCTHPLHIWTVVDYAAVFTFRLLMFVDNGLASGMGLDFGWPQRYARFCGRVVVLSILALLLYPFLWAWTIIGTLWFSNTKICLPGGGQKWGFLIWLLFSYCGLLCIACLAMRKWLKRRQARMLGAQEGIPVSAFGVLVEMIRVPDWAFEAAGQETRSMAQDAAYHPGLYLTPAQREAVEALIQELPSFRLTAVPTNCSECLICLEEFHVGNQVRGLPCAHNFHVECIDEWLRLNVNCPRCRCSVFPNLDLSALSNIRSESEQSSATAVTSRDMTGQTSSQSYLLRLQGPLHPVCVDFAGPAGETDNALENAENGVVPVVTQNMSTRDQATSGEHMPVGLSSSQN

SEQ ID NO: 53063 - protein, 361 aa, Glycine max
  peptide (1)..(361): Ceres Seq. ID no. 14311173
  misc_feature (217)..(257): Pfam Name: Zinc finger, C3HC4 type (RING finger) Pfam Description: Zinc finger, C3HC4 type (RING finger)
  misc_feature (177)..(287): Homolog of NCBI NO: 39589113 NR Description: Hypothetical protein CBG00875 [Caenorhabditis
  misc_feature (177)..(287): Homolog of NCBI NO: 17531437 NR Description: ring finger protein (19.3 kD) (2J562)
  misc_feature (199)..(261): Homolog of NCBI NO: 23490777 NR Description: 23281-24001-related [Plasmodium yoelii yoelii]
  misc_feature (1)..(117): Homolog of NCBI NO: 23490777 NR Description: 23281-24001-related [Plasmodium yoelii yoelii]
  misc_feature (199)..(261): Homolog of NCBI NO: 23508079 NR Description: hypothetical protein [Plasmodium falciparum 3D7]
  misc_feature (5)..(121): Homolog of NCBI NO: 23508079 NR Description: hypothetical protein [Plasmodium falciparum 3D7]
  misc_feature (118)..(252): Homolog of NCBI NO: 19172014 NR Description: hypothetical protein T17F15.140-like protein
  misc_feature (64)..(341): Homolog of NCBI NO: 7487119 NR Description: hypothetical protein T17F15.140 - Arabidopsis
  misc_feature (1)..(341): Homolog of NCBI NO: 26449875 NR Description: unknown protein [Arabidopsis thaliana]
  misc_feature (1)..(341): Homolog of NCBI NO: 30692957 NR Description: zinc finger (C3HC4-type RING finger) protein
MLATSIAIVAINWKRYQSCTHPLHIWTVVDYAAVFTFRLLMFVDNGLASGMGLDFGWPQRYARFCGRVVVLSILALLLYPFLWAWTIIGTLWFSNTKICLPGGGQKWGFLIWLLFSYCGLLCIACLAMRKWLKRRQARMLGAQEGIPVSAFGVLVEMIRVPDWAFEAAGQETRSMAQDAAYHPGLYLTPAQREAVEALIQELPSFRLTAVPTNCSECLICLEEFHVGNQVRGLPCAHNFHVECIDEWLRLNVNCPRCRCSVFPNLDLSALSNIRSESEQSSATAVTSRDMTGQTSSQSYLLRLQGPLHPVCVDFAGPAGETDNALENAENGVVPVVTQNMSTRDQATSGEHMPVGLSSSQN

SEQ ID NO: 53064 - protein, 321 aa, Glycine max
  peptide (1)..(321): Ceres Seq. ID no. 14311174
  misc_feature (177)..(217): Pfam Name: Zinc finger, C3HC4 type (RING finger) Pfam Description: Zinc finger, C3HC4 type (RING finger)
  misc_feature (137)..(247): Homolog of NCBI NO: 39589113 NR Description: Hypothetical protein CBG00875 [Caenorhabditis
  misc_feature (137)..(247): Homolog of NCBI NO: 17531437 NR Description: ring finger protein (19.3 kD) (2J562)
  misc_feature (159)..(221): Homolog of NCBI NO: 23490777 NR Description: 23281-24001-related [Plasmodium yoelii yoelii]
  misc_feature (1)..(77): Homolog of NCBI NO: 23490777 NR Description: 23281-24001-related [Plasmodium yoelii yoelii]
  misc_feature (159)..(221): Homolog of NCBI NO: 23508079 NR Description: hypothetical protein [Plasmodium falciparum 3D7]
  misc_feature (1)..(81): Homolog of NCBI NO: 23508079 NR Description: hypothetical protein [Plasmodium falciparum 3D7]
  misc_feature (78)..(212): Homolog of NCBI NO: 19172014 NR Description: hypothetical protein T17F15.140-like protein
  misc_feature (24)..(301): Homolog of NCBI NO: 7487119 NR Description: hypothetical protein T17F15.140 - Arabidopsis
  misc_feature (1)..(301): Homolog of NCBI NO: 26449875 NR Description: unknown protein [Arabidopsis thaliana]
  misc_feature (1)..(301): Homolog of NCBI NO: 30692957 NR Description: zinc finger (C3HC4-type RING finger) protein
MFVDNGLASGMGLDFGWPQRYARFCGRVVVLSILALLLYPFLWAWTIIGTLWFSNTKICLPGGGQKWGFLIWLLFSYCGLLCIACLAMRKWLKRRQARMLGAQEGIPVSAFGVLVEMIRVPDWAFEAAGQETRSMAQDAAYHPGLYLTPAQREAVEALIQELPSFRLTAVPTNCSECLICLEEFHVGNQVRGLPCAHNFHVECIDEWLRLNVNCPRCRCSVFPNLDLSALSNIRSESEQSSATAVTSRDMTGQTSSQSYLLRLQGPLHPVCVDFAGPAGETDNALENAENGVVPVVTQNMSTRDQATSGEHMPVGLSSSQN

SEQ ID NO: 53065 - DNA, 1431 bp, Glycine max
  misc_feature (1)..(1431): Ceres Seq. ID no. 15177561
attaatttttttgggttaaatttctatgcacttttactctcaaccaatcagaaaatcattgttggtatgacttttaagatagttattgtaaaagtcaataaacttaccatataactatgtgattggataacaatgtaaaaaccatttacactataagtgcatacactatttagtatttactatttactcaatcaagtttaatttctatgcacagtcaatgtaaaaattttacatggtcaatcaatcataaattatggtttgcgcttttaagataattattatagaagtctttcaaacttatcatactatcaaaacgcatacactacttacccagtctttgtattattaaatgtatagttttctgaattcttatttgcttttatcctatgcagatatcagtctggaagaagacgaatttgatatttttgttcttcctattgaggaaacttatactccccttctactccttcaccctgttttgcatcatactacccttgaccatgttcatacccgagtctgaactacccctttgggtgatatgttatgtccccatcatcatgtctttcctaaacatccttccatccccaaaatctatccctttcctagttccttatcttctgtttgagaacaccatgtcagtcacaaagttcaatgccatgatttctggattgtttcagctaggaagtgcttatgagtgggtagtgacaaagaagacagggagatcctcagagtcagatttgttggccttggctgagagagagtcaaagtcttcaaatgaagaaaagattctaagaagacactcagagtctggcttggagttattaggcaaacttaagcaatcagaagtaccttcaaagaaaaaaagaaacaagctctataggaaggagctagcacttgcacttcttttgctcacagcatctgcaagaagtcttttgtcagcacatggtgttcacttctattttttgctcttccaaggattgtcatttctcataatgggtctggacttgattggtgagcaagtgagctgaaataactaataaggattggaaattgttttacttgtttttgacaccaatacttttggttgaatccagattttagttgaagttcattaagatacaatcgtaagattacatagcagctggcaagacaatgaaatatatagattaaagttgattgtcccatcataaaatataaaaaataatgataataataagcattgaggatcatagacaaaaacaaatgcaattttttttaatttcttttcccatttttgtgtagactttgtcagggagtgatgatttattgcctttttttttgtggattttcacttatgtaaagctttaggattgagagaatattgttggaacataactgtatctattgtctttcagaatagattgtgaaatgagtaacccctactgtattaag

SEQ ID NO: 53066 - protein, 213 aa, Glycine max
  peptide (1)..(213): Ceres Seq. ID no. 15177562
  misc_feature (2)..(212): Homolog of NCBI NO: 17385963 NR Description: CSLC9 [Oryza sativa]
  misc_feature (2)..(212): Homolog of NCBI NO: 16974749 NR Description: CSLC9 [Oryza sativa]
  misc_feature (1)..(212): Homolog of NCBI NO: 34909854 NR Description: putative glucosyltransferase
  misc_feature (2)..(212): Homolog of NCBI NO: 28201308 NR Description: putative CSLC9(cellulose synthase-like)
  misc_feature (2)..(213): Homolog of NCBI NO: 15224178 NR Description: glycosyltransferase family 2 [Arabidopsis
  misc_feature (2)..(212): Homolog of NCBI NO: 34419218 NR Description: TPA: cellulose synthase-like C2
  misc_feature (2)..(212): Homolog of NCBI NO: 17385981 NR Description: CSLC2 [Oryza sativa]
  misc_feature (2)..(213): Homolog of NCBI NO: 15236004 NR Description: glycosyltransferase family 2 [Arabidopsis
  misc_feature (2)..(213): Homolog of NCBI NO: 7635490 NR Description: putative glucosyltransferase [Cicer arietinum]
  misc_feature (2)..(213): Homolog of NCBI NO: 18405677 NR Description: glycosyltransferase family 2 [Arabidopsis
MQISVWKKTNLIFLFFLLRKLILPFYSFTLFCIILPLTMFIPESELPLWVICYVPIIMSFLNILPSPKSIPFLVPYLLFENTMSVTKFNAMISGLFQLGSAYEWVVTKKTGRSSESDLLALAERESKSSNEEKILRRHSESGLELLGKLKQSEVPSKKKRNKLYRKELALALLLLTASARSLLSAHGVHFYFLLFQGLSFLIMGLDLIGEQVS

SEQ ID NO: 53067 - protein, 175 aa, Glycine max
  peptide (1)..(175): Ceres Seq. ID no. 15177563
  misc_feature (1)..(174): Homolog of NCBI NO: 17385963 NR Description: CSLC9 [Oryza sativa]
  misc_feature (1)..(174): Homolog of NCBI NO: 16974749 NR Description: CSLC9 [Oryza sativa]
  misc_feature (1)..(174): Homolog of NCBI NO: 34909854 NR Description: putative glucosyltransferase
  misc_feature (1)..(174): Homolog of NCBI NO: 28201308 NR Description: putative CSLC9(cellulose synthase-like)
  misc_feature (1)..(175): Homolog of NCBI NO: 15224178 NR Description: glycosyltransferase family 2 [Arabidopsis
  misc_feature (1)..(174): Homolog of NCBI NO: 34419218 NR Description: TPA: cellulose synthase-like C2
  misc_feature (1)..(174): Homolog of NCBI NO: 17385981 NR Description: CSLC2 [Oryza sativa]
  misc_feature (1)..(175): Homolog of NCBI NO: 15236004 NR Description: glycosyltransferase family 2 [Arabidopsis
  misc_feature (1)..(175): Homolog of NCBI NO: 7635490 NR Description: putative glucosyltransferase [Cicer arietinum]
  misc_feature (1)..(175): Homolog of NCBI NO: 18405677 NR Description: glycosyltransferase family 2 [Arabidopsis
MFIPESELPLWVICYVPIIMSFLNILPSPKSIPFLVPYLLFENTMSVTKFNAMISGLFQLGSAYEWVVTKKTGRSSESDLLALAERESKSSNEEKILRRHSESGLELLGKLKQSEVPSKKKRNKLYRKELALALLLLTASARSLLSAHGVHFYFLLFQGLSFLIMGLDLIGEQVS

SEQ ID NO: 53068 - protein, 156 aa, Glycine max
  peptide (1)..(156): Ceres Seq. ID no. 15177564
  misc_feature (1)..(155): Homolog of NCBI NO: 17385963 NR Description: CSLC9 [Oryza sativa]
  misc_feature (1)..(155): Homolog of NCBI NO: 16974749 NR Description: CSLC9 [Oryza sativa]
  misc_feature (1)..(155): Homolog of NCBI NO: 34909854 NR Description: putative glucosyltransferase
  misc_feature (1)..(155): Homolog of NCBI NO: 28201308 NR Description: putative CSLC9(cellulose synthase-like)
  misc_feature (1)..(156): Homolog of NCBI NO: 15224178 NR Description: glycosyltransferase family 2 [Arabidopsis
  misc_feature (1)..(155): Homolog of NCBI NO: 34419218 NR Description: TPA: cellulose synthase-like C2
  misc_feature (1)..(155): Homolog of NCBI NO: 17385981 NR Description: CSLC2 [Oryza sativa]
  misc_feature (1)..(156): Homolog of NCBI NO: 15236004 NR Description: glycosyltransferase family 2 [Arabidopsis
  misc_feature (1)..(156): Homolog of NCBI NO: 7635490 NR Description: putative glucosyltransferase [Cicer arietinum]
  misc_feature (1)..(156): Homolog of NCBI NO: 18405677 NR Description: glycosyltransferase family 2 [Arabidopsis
MSFLNILPSPKSIPFLVPYLLFENTMSVTKFNAMISGLFQLGSAYEWVVTKKTGRSSESDLLALAERESKSSNEEKILRRHSESGLELLGKLKQSEVPSKKKRNKLYRKELALALLLLTASARSLLSAHGVHFYFLLFQGLSFLIMGLDLIGEQVS

SEQ ID NO: 53069 - DNA, 1660 bp, Glycine max
  misc_feature (1)..(1660): Ceres Seq. ID no. 15170151
atgagttctaatatatcattcaaaagtttttgaaatgttgtcaccccttcttctatttctatgcctaactcttcctttgtttttgttgtccttcttcaaataccgtaaaaccttcaagaatccaccacttccaccaggtcctagaggccttcccataatagggaatcttcatcaactagatagtccttctcttcatgagcagctatggcatctctcaaagaaatatggtcctttattttcccttcaatttggattaaggccagccatagttgtttcctctccaaaattggccaaagaggtaatgaaagacaatgaccttgagtgctgtggacgacctaaattactaggccaacagaaactaacctataatgggttagacatgggattttcctcatacgatagttattggagagaaatcagaaaaatttgtgttgtccatgtccttagctccaaacgtgtccaaagctttacctcaataagacattttgaggtcaagcagatgataaaaaaaatatctaggcatgcctcatcttcaaaagttacaaatttaaatgaagtgcttatatctcttattagtactattgtatgtagaattgttttggggagaaggtatgaagaggagggatctgaaggtagcagattccataagttgttcaatgagtgtgaagctatgttgggtaacttctttgtttcagattatattcctttcatgggttggattgataaactcaggggactggatgcacgtcttgaacgcaatttcaaggagatggataagttctaccaagaagccattgatgaacacatgaattctaagaaaaaaactccagaggaagaggatttagttgatgtcttacttcaactgaaagagaacaacacgtttcccatagatctcaccaatgataacatcaaagcagtgctcttgaacttacttgtaggagctacaggtacaactgaagtcacaacaatctgggccatgactgaactaataaaaaatccaagcattatgaagaaagtgcaagaagaaattagaggcttaagtggtaagaaagatttcttggatgaagatgatattcaaaagttttcctacttaagggcagtgataaaagagacacttagattgcacttaccagcaccactacttataccaagagaaacaaataaaaaatgcatgttagatggctacgaaattccagccaagacattattatatgtgaatgcttgggcaattcatagagatcctaaggcttggaaagatccagaagagtttatacctgagaggtttttaaattgcgacatagatctttatggacaagattttgagtttattccattcggtgctggtcgtagattgtgccctggtatgaatatggcatttgctgcattggatcttatacttgctaatcttctttattcctttgactgggaattgccacaaggaatgaaaaaggaagacattgatactgaagtgttgccaggagttacacagcataagaagaatcctctgtgtgttgtggccaagtgctatatgtaaaatccaaaagtcgtaactactgctgaaaaaaataaaataaaataattaatgattgtactcttccaacgaagattattaaataaagatgtaagcactccaaaataaaaatatttctgttgtgtttat

SEQ ID NO: 53070 - protein, 499 aa, Glycine max
  peptide (1)..(499): Ceres Seq. ID no. 15170152
  misc_feature (33)..(494): Pfam Name: Cytochrome P450 Pfam Description: Cytochrome P450
  misc_feature (11)..(499): Homolog of NCBI NO: 16507125 NR Description: cytochrome P450 [Citrus sinensis]
  misc_feature (7)..(498): Homolog of NCBI NO: 13516748 NR Description: cytochrome P450 [Asparagus officinalis]
  misc_feature (19)..(491): Homolog of NCBI NO: 15235968 NR Description: cytochrome P450 83B1 [Arabidopsis thaliana]
  misc_feature (7)..(494): Homolog of NCBI NO: 28393289 NR Description: putative cytochrome p450 [Arabidopsis thaliana]
  misc_feature (7)..(494): Homolog of NCBI NO: 30696845 NR Description: cytochrome P450 71B10 [Arabidopsis thaliana]
  misc_feature (7)..(494): Homolog of NCBI NO: 13878390 NR Description: Cytochrome P450 71B10
  misc_feature (4)..(499): Homolog of NCBI NO: 15231542 NR Description: cytochrome p450 family [Arabidopsis thaliana]
  misc_feature (6)..(499): Homolog of NCBI NO: 15231541 NR Description: cytochrome P450 71B36 [Arabidopsis thaliana]
  misc_feature (1)..(498): Homolog of NCBI NO: 17644125 NR Description: cytochrome P450-1 [Musa acuminata]
  misc_feature (6)..(499): Homolog of NCBI NO: 25282608 NR Description: cytochrome P-450LXXIA1 [similarity] - avocado
MLSPLLLFLCLTLPLFLLSFFKYRKTFKNPPLPPGPRGLPIIGNLHQLDSPSLHEQLWHLSKKYGPLFSLQFGLRPAIVVSSPKLAKEVMKDNDLECCGRPKLLGQQKLTYNGLDMGFSSYDSYWREIRKICVVHVLSSKRVQSFTSIRHFEVKQMIKKISRHASSSKVTNLNEVLISLISTIVCRIVLGRRYEEEGSEGSRFHKLFNECEAMLGNFFVSDYIPFMGWIDKLRGLDARLERNFKEMDKFYQEAIDEHMNSKKKTPEEEDLVDVLLQLKENNTFPIDLTNDNIKAVLLNLLVGATGTTEVTTIWAMTELIKNPSIMKKVQEEIRGLSGKKDFLDEDDIQKFSYLRAVIKETLRLHLPAPLLIPRETNKKCMLDGYEIPAKTLLYVNAWAIHRDPKAWKDPEEFIPERFLNCDIDLYGQDFEFIPFGAGRRLCPGMNMAFAALDLILANLLYSFDWELPQGMKKEDIDTEVLPGVTQHKKNPLCVVAKCYM

SEQ ID NO: 53071 - protein, 410 aa, Glycine max
  peptide (1)..(410): Ceres Seq. ID no. 15170153
  misc_feature (1)..(405): Pfam Name: Cytochrome P450 Pfam Description: Cytochrome P450
  misc_feature (1)..(410): Homolog of NCBI NO: 16507125 NR Description: cytochrome P450 [Citrus sinensis]
  misc_feature (1)..(409): Homolog of NCBI NO: 13516748 NR Description: cytochrome P450 [Asparagus officinalis]
  misc_feature (1)..(402): Homolog of NCBI NO: 15235968 NR Description: cytochrome P450 83B1 [Arabidopsis thaliana]
  misc_feature (1)..(405): Homolog of NCBI NO: 28393289 NR Description: putative cytochrome p450 [Arabidopsis thaliana]
  misc_feature (1)..(405): Homolog of NCBI NO: 30696845 NR Description: cytochrome P450 71B10 [Arabidopsis thaliana]
  misc_feature (1)..(405): Homolog of NCBI NO: 13878390 NR Description: Cytochrome P450 71B10
  misc_feature (1)..(410): Homolog of NCBI NO: 15231542 NR Description: cytochrome p450 family [Arabidopsis thaliana]
  misc_feature (1)..(410): Homolog of NCBI NO: 15231541 NR Description: cytochrome P450 71B36 [Arabidopsis thaliana]
  misc_feature (1)..(409): Homolog of NCBI NO: 17644125 NR Description: cytochrome P450-1 [Musa acuminata]
  misc_feature (1)..(410): Homolog of NCBI NO: 25282608 NR Description: cytochrome P-450LXXIA1 [similarity] - avocado
MKDNDLECCGRPKLLGQQKLTYNGLDMGFSSYDSYWREIRKICVVHVLSSKRVQSFTSIRHFEVKQMIKKISRHASSSKVTNLNEVLISLISTIVCRIVLGRRYEEEGSEGSRFHKLFNECEAMLGNFFVSDYIPFMGWIDKLRGLDARLERNFKEMDKFYQEAIDEHMNSKKKTPEEEDLVDVLLQLKENNTFPIDLTNDNIKAVLLNLLVGATGTTEVTTIWAMTELIKNPSIMKKVQEEIRGLSGKKDFLDEDDIQKFSYLRAVIKETLRLHLPAPLLIPRETNKKCMLDGYEIPAKTLLYVNAWAIHRDPKAWKDPEEFIPERFLNCDIDLYGQDFEFIPFGAGRRLCPGMNMAFAALDLILANLLYSFDWELPQGMKKEDIDTEVLPGVTQHKKNPLCVVAKCYM

SEQ ID NO: 53072 - protein, 384 aa, Glycine max
  peptide (1)..(384): Ceres Seq. ID no. 15170154
  misc_feature (1)..(379): Pfam Name: Cytochrome P450 Pfam Description: Cytochrome P450
  misc_feature (1)..(384): Homolog of NCBI NO: 16507125 NR Description: cytochrome P450 [Citrus sinensis]
  misc_feature (1)..(383): Homolog of NCBI NO: 13516748 NR Description: cytochrome P450 [Asparagus officinalis]
  misc_feature (1)..(376): Homolog of NCBI NO: 15235968 NR Description: cytochrome P450 83B1 [Arabidopsis thaliana]
  misc_feature (1)..(379): Homolog of NCBI NO: 28393289 NR Description: putative cytochrome p450 [Arabidopsis thaliana]
  misc_feature (1)..(379): Homolog of NCBI NO: 30696845 NR Description: cytochrome P450 71B10 [Arabidopsis thaliana]
  misc_feature (1)..(379): Homolog of NCBI NO: 13878390 NR Description: Cytochrome P450 71B10
  misc_feature (1)..(384): Homolog of NCBI NO: 15231542 NR Description: cytochrome p450 family [Arabidopsis thaliana]
  misc_feature (1)..(384): Homolog of NCBI NO: 15231541 NR Description: cytochrome P450 71B36 [Arabidopsis thaliana]
  misc_feature (1)..(383): Homolog of NCBI NO: 17644125 NR Description: cytochrome P450-1 [Musa acuminata]
  misc_feature (1)..(384): Homolog of NCBI NO: 25282608 NR Description: cytochrome P-450LXXIA1 [similarity] - avocado
MGFSSYDSYWREIRKICVVHVLSSKRVQSFTSIRHFEVKQMIKKISRHASSSKVTNLNEVLISLISTIVCRIVLGRRYEEEGSEGSRFHKLFNECEAMLGNFFVSDYIPFMGWIDKLRGLDARLERNFKEMDKFYQEAIDEHMNSKKKTPEEEDLVDVLLQLKENNTFPIDLTNDNIKAVLLNLLVGATGTTEVTTIWAMTELIKNPSIMKKVQEEIRGLSGKKDFLDEDDIQKFSYLRAVIKETLRLHLPAPLLIPRETNKKCMLDGYEIPAKTLLYVNAWAIHRDPKAWKDPEEFIPERFLNCDIDLYGQDFEFIPFGAGRRLCPGMNMAFAALDLILANLLYSFDWELPQGMKKEDIDTEVLPGVTQHKKNPLCVVAKCYM

SEQ ID NO: 53073 - DNA, 1184 bp, Glycine max
  misc_feature (1)..(1184): Ceres Seq. ID no. 14311232
agtgcagaaggaatcaaaatttgaattcagatacttaaaatttgaagaactgctatgaaagaacatcccaccatttagatttttgagagtatttatttgggtgggtcccgtgagatgtatgtgcaattgtccctgttttgataacagaaaaaaaggggaaaggggtaagaatatgtaattaggatacattctgcaagaaatttttttcttaaaatgtcatgaacattagtgttttggatttcatgaaaatttgttgcatcatttataaattaggactaaatgtgacataagaattgcaacaaaagatagatagacatttcttgattgcttttatattaacattgtttgacaattgacctaggtatggagaatctggcctttgggacacccaataaatcaatttatgaatgcattcaccgaccaccgtgactctgatcttctcattgtcagccatttctcactcttactgggatgtgcgcttcctatttggatgtctactgggtacaatgatcgacctcttgctccttttgcgggaatattgagtctaggaattggagacacaatggcatcaatggttggacacaagtatggtgttctgaggtggagtaaaacaggcaagaaaactgttgaaggtactgcagctggtataacttctgtattggctgcttgttctttactccttccactcttagcatcgactggatacattctcactcagcattggttctctcttcttctagctgtgactgtaagtggtttgttggaggcttacacaacacaacttgacaatgcatttataccactttttttctatagtcttctctgtttgtagacacagcttagttaatcttggacgagcgacgaggctctgcaaatatatgttgtctctgggcacattgtttatgcagaggtcagataactattaaccaatgcaattgtactttaccagtttagggttgtggtatacatagtagatagtagttaggattgtatctatacagaaatgatagatatacgagtgttcatttaaagggtttatacccaacacgcataacacaatgtatgcagagtgacagtttcccatttttgttggaacctatgtgaggccatgacaagaggagagttgttgaacatctagtggacaatggtaaagaaattgttaatatctcatttttcattcgtag

SEQ ID NO: 53074 - protein, 142 aa, Glycine max
  peptide (1)..(142): Ceres Seq. ID no. 14311233
  misc_feature (1)..(141): Homolog of NCBI NO: 6323655 NR Description: catalyzes the CTP-mediated phosphorylation of the terminal step in dolichyl monophosphate (Dol-P) biosynthesis. for viability, normal rates of lipid intermediate synthesis,
  misc_feature (1)..(139): Homolog of NCBI NO: 19075483 NR Description: putative dolichol kinase [Schizosaccharomyces
  misc_feature (1)..(142): Homolog of NCBI NO: 24654201 NR Description: CG8311-PA [Drosophila melanogaster]
  misc_feature (1)..(140): Homolog of NCBI NO: 29244058 NR Description: cDNA sequence BC026973 [Mus musculus]
  misc_feature (1)..(140): Homolog of NCBI NO: 27706618 NR Description: similar to Hypothetical protein KIAA1094 [Rattus
  misc_feature (1)..(140): Homolog of NCBI NO: 40789043 NR Description: KIAA1094 protein [Homo sapiens]
  misc_feature (1)..(140): Homolog of NCBI NO: 7662482 NR Description: KIAA1094 protein [Homo sapiens]
  misc_feature (1)..(142): Homolog of NCBI NO: 18389248 NR Description: unknown protein [Arabidopsis thaliana]
  misc_feature (1)..(142): Homolog of NCBI NO: 22331608 NR Description: expressed protein [Arabidopsis thaliana]
  misc_feature (1)..(142): Homolog of NCBI NO: 11357412 NR Description: hypothetical protein F14D17.110 - Arabidopsis
MNAFTDHRDSDLLIVSHFSLLLGCALPIWMSTGYNDRPLAPFAGILSLGIGDTMASMVGHKYGVLRWSKTGKKTVEGTAAGITSVLAACSLLLPLLASTGYILTQHWFSLLLAVTVSGLLEAYTTQLDNAFIPLFFYSLLCL

SEQ ID NO: 53075 - protein, 113 aa, Glycine max
  peptide (1)..(113): Ceres Seq. ID no. 14311234
  misc_feature (1)..(112): Homolog of NCBI NO: 6323655 NR Description: catalyzes the CTP-mediated phosphorylation of the terminal step in dolichyl monophosphate (Dol-P) biosynthesis. for viability, normal rates of lipid intermediate synthesis,
  misc_feature (1)..(110): Homolog of NCBI NO: 19075483 NR Description: putative dolichol kinase [Schizosaccharomyces
  misc_feature (1)..(113): Homolog of NCBI NO: 24654201 NR Description: CG8311-PA [Drosophila melanogaster]
  misc_feature (1)..(111): Homolog of NCBI NO: 29244058 NR Description: cDNA sequence BC026973 [Mus musculus]
  misc_feature (1)..(111): Homolog of NCBI NO: 27706618 NR Description: similar to Hypothetical protein KIAA1094 [Rattus
  misc_feature (1)..(111): Homolog of NCBI NO: 40789043 NR Description: KIAA1094 protein [Homo sapiens]
  misc_feature (1)..(111): Homolog of NCBI NO: 7662482 NR Description: KIAA1094 protein [Homo sapiens]
  misc_feature (1)..(113): Homolog of NCBI NO: 18389248 NR Description: unknown protein [Arabidopsis thaliana]
  misc_feature (1)..(113): Homolog of NCBI NO: 22331608 NR Description: expressed protein [Arabidopsis thaliana]
  misc_feature (1)..(113): Homolog of NCBI NO: 11357412 NR Description: hypothetical protein F14D17.110 - Arabidopsis
MSTGYNDRPLAPFAGILSLGIGDTMASMVGHKYGVLRWSKTGKKTVEGTAAGITSVLAACSLLLPLLASTGYILTQHWFSLLLAVTVSGLLEAYTTQLDNAFIPLFFYSLLCL

SEQ ID NO: 53076 - protein, 89 aa, Glycine max
  peptide (1)..(89): Ceres Seq. ID no. 14311235
  misc_feature (1)..(88): Homolog of NCBI NO: 6323655 NR Description: catalyzes the CTP-mediated phosphorylation of the terminal step in dolichyl monophosphate (Dol-P) biosynthesis. for viability, normal rates of lipid intermediate synthesis,
  misc_feature (1)..(86): Homolog of NCBI NO: 19075483 NR Description: putative dolichol kinase [Schizosaccharomyces
  misc_feature (1)..(89): Homolog of NCBI NO: 24654201 NR Description: CG8311-PA [Drosophila melanogaster]
  misc_feature (1)..(87): Homolog of NCBI NO: 29244058 NR Description: cDNA sequence BC026973 [Mus musculus]
  misc_feature (1)..(87): Homolog of NCBI NO: 27706618 NR Description: similar to Hypothetical protein KIAA1094 [Rattus
  misc_feature (1)..(87): Homolog of NCBI NO: 40789043 NR Description: KIAA1094 protein [Homo sapiens]
  misc_feature (1)..(87): Homolog of NCBI NO: 7662482 NR Description: KIAA1094 protein [Homo sapiens]
  misc_feature (1)..(89): Homolog of NCBI NO: 18389248 NR Description: unknown protein [Arabidopsis thaliana]
  misc_feature (1)..(89): Homolog of NCBI NO: 22331608 NR Description: expressed protein [Arabidopsis thaliana]
  misc_feature (1)..(89): Homolog of NCBI NO: 11357412 NR Description: hypothetical protein F14D17.110 - Arabidopsis
MASMVGHKYGVLRWSKTGKKTVEGTAAGITSVLAACSLLLPLLASTGYILTQHWFSLLLAVTVSGLLEAYTTQLDNAFIPLFFYSLLCL

SEQ ID NO: 53077 - DNA, 828 bp, Glycine max
  misc_feature (1)..(828): Ceres Seq. ID no. 13637658
gacatcaaggtttgtgaagcatctaagtgagatacacagtagttaggtagcaagcataagtgtctaaccttagaaacatatctgctacatatcgtgtgcattttggaattgtgccactaaaattctattcatctatggctgcctcatcttatgctatgcaatcaatccttgcaaaccctatgatccgcatttccagcgggtctagggagaaccattttggtgttcctgcttatcacatgagaaggaatgttggcctgagagttaggtccatggctgaggaagagcaaccaagtcagcctgcgaccccagttacaccaccaccagcagaacccaaaccacagccagtctctactccttcaccaaaggtgagcaccaagttttctgatgtgttggcgttcagtgggccagcacctgagaggatcaatggaaggttggccatgattgggtttgtgggtgcaatggcagtggaagtagccaaagggcaaggtgtgtttgaacaaatatccaatggtggtatcccatggttcttgggaacaagtgtggtccttacccttgcttccttgattccactcttccaagggatcagcgtggagtctaagtccaaagggttcatgtcctcagatgcagaactgtggaatgggagatttgctatgttgggtttggttgctctggcttttactgagtatgttaagggtggtaccttggtgtaattcagtcatgaatgcacaccaaaatggtcttaagtcattcgtggttagaaagaccaatctctttttgtacttggtgcctttatttaatcagcatataaaattatcatttttttttttc

SEQ ID NO: 53078 - protein, 191 aa, Glycine max
  peptide (1)..(191): Ceres Seq. ID no. 13637659
  misc_feature (68)..(184): Pfam Name: Chlorophyll A-B binding protein Pfam Description: Chlorophyll A-B binding protein
MAASSYAMQSILANPMIRISSGSRENHFGVPAYHMRRNVGLRVRSMAEEEQPSQPATPVTPPPAEPKPQPVSTPSPKVSTKFSDVLAFSGPAPERINGRLAMIGFVGAMAVEVAKGQGVFEQISNGGIPWFLGTSVVLTLASLIPLFQGISVESKSKGFMSSDAELWNGRFAMLGLVALAFTEYVKGGTLV

SEQ ID NO: 53079 - protein, 184 aa, Glycine max
  peptide (1)..(184): Ceres Seq. ID no. 13637660
  misc_feature (61)..(177): Pfam Name: Chlorophyll A-B binding protein Pfam Description: Chlorophyll A-B binding protein
MQSILANPMIRISSGSRENHFGVPAYHMRRNVGLRVRSMAEEEQPSQPATPVTPPPAEPKPQPVSTPSPKVSTKFSDVLAFSGPAPERINGRLAMIGFVGAMAVEVAKGQGVFEQISNGGIPWFLGTSVVLTLASLIPLFQGISVESKSKGFMSSDAELWNGRFAMLGLVALAFTEYVKGGTLV

SEQ ID NO: 53080 - protein, 176 aa, Glycine max
  peptide (1)..(176): Ceres Seq. ID no. 13637661
  misc_feature (53)..(169): Pfam Name: Chlorophyll A-B binding protein Pfam Description: Chlorophyll A-B binding protein
MIRISSGSRENHFGVPAYHMRRNVGLRVRSMAEEEQPSQPATPVTPPPAEPKPQPVSTPSPKVSTKFSDVLAFSGPAPERINGRLAMIGFVGAMAVEVAKGQGVFEQISNGGIPWFLGTSVVLTLASLIPLFQGISVESKSKGFMSSDAELWNGRFAMLGLVALAFTEYVKGGTLV

SEQ ID NO: 53081 - DNA, 991 bp, Glycine max
  misc_feature (1)..(991): Ceres Seq. ID no. 13593910
atccattccatttctttccaacacacacttttctctctctatctctctctctctctctctctggttgtctttcattttgttcattgttgttgatgatgtcacgcgccgccgtgttattacacgcgcaggaggaggaggaggaggaggaggaggagtgtagtacttcgacgtcgtcgtcgatcgggaggaacagcgacgtgtcgtcggagagatcaatggaggaaggagaaaacgaggtggaaagtgcctaccatggacctttgcatgccatggaaactttggaagaggttcttcccatcaggagaggcatctcgaacttttataatggtaagtctaagtcattcacaaccctggctgatgcagtgtcttccccatcagtgaaagacatagcaaagccagagaatgcatacaccagaaggcgtaggaacttgatggcattgaaccatgtcttggacaagaataatagaaactaccctctaagaagcagtggtggtggcatttgcaagagatcaatcagcttgagtagaagttctctagctcttgcagttgccatgaacaactccgacagcagtagtagtatcacaagcgaagattccggttccagctcgaattcgttacactctccctctcctctaccgcctctccatccccgaaatagagtgtcttcttcttccggctcaggtccatcctctcctttgttgcggaatttctctccctggagatcattttccgtggctgatctacagcagcattgtgccattgctgcaacaataaagatttcaagtccctccgttggaaataaaacagctcatccatcatagtaaaaaaaaaaaaaaaacaaagaggataacaaactatatgttattaacttttagcttatttgaatgaatatcttgctctagtcctatttgtttgagggagcaaaaacttgtagaagcaatgcctttacgtacgtacgatcacttcagattaacttccgtaagatatgatg

SEQ ID NO: 53082 - protein, 272 aa, Glycine max
  peptide (1)..(272): Ceres Seq. ID no. 15221252
  misc_feature (43)..(153): Homolog of NCBI NO: 15241248 NR Description: expressed protein [Arabidopsis thaliana]
  misc_feature (54)..(153): Homolog of NCBI NO: 28393161 NR Description: unknown protein [Arabidopsis thaliana]
  misc_feature (54)..(153): Homolog of NCBI NO: 15238642 NR Description: expressed protein [Arabidopsis thaliana]
  misc_feature (33)..(145): Homolog of NCBI NO: 15724184 NR Description: At2g24550/F25P17.15 [Arabidopsis thaliana]
  misc_feature (33)..(145): Homolog of NCBI NO: 25412223 NR Description: hypothetical protein At2g24550 [imported] -
  misc_feature (33)..(145): Homolog of NCBI NO: 18400574 NR Description: expressed protein [Arabidopsis thaliana]
  misc_feature (42)..(248): Homolog of NCBI NO: 34905120 NR Description: P0686C03.43 [Oryza sativa (japonica
  misc_feature (47)..(190): Homolog of NCBI NO: 15229793 NR Description: hypothetical protein [Arabidopsis thaliana]
  misc_feature (53)..(246): Homolog of NCBI NO: 22326936 NR Description: expressed protein [Arabidopsis thaliana]
  misc_feature (33)..(253): Homolog of NCBI NO: 9294810 NR Description: MTD1 [Medicago truncatula]
PFHFFPTHTFLSLSLSLSLSGCLSFCSLLLMMSRAAVLLHAQEEEEEEEEECSTSTSSSIGRNSDVSSERSMEEGENEVESAYHGPLHAMETLEEVLPIRRGISNFYNGKSKSFTTLADAVSSPSVKDIAKPENAYTRRRRNLMALNHVLDKNNRNYPLRSSGGGICKRSISLSRSSLALAVAMNNSDSSSSITSEDSGSSSNSLHSPSPLPPLHPRNRVSSSSGSGPSSPLLRNFSPWRSFSVADLQQHCAIAATIKISSPSVGNKTAHPS

SEQ ID NO: 53083 - protein, 242 aa, Glycine max
  peptide (1)..(242): Ceres Seq. ID no. 15221253
  misc_feature (13)..(123): Homolog of NCBI NO: 15241248 NR Description: expressed protein [Arabidopsis thaliana]
  misc_feature (24)..(123): Homolog of NCBI NO: 28393161 NR Description: unknown protein [Arabidopsis thaliana]
  misc_feature (24)..(123): Homolog of NCBI NO: 15238642 NR Description: expressed protein [Arabidopsis thaliana]
  misc_feature (3)..(115): Homolog of NCBI NO: 15724184 NR Description: At2g24550/F25P17.15 [Arabidopsis thaliana]
  misc_feature (3)..(115): Homolog of NCBI NO: 25412223 NR Description: hypothetical protein At2g24550 [imported] -
  misc_feature (3)..(115): Homolog of NCBI NO: 18400574 NR Description: expressed protein [Arabidopsis thaliana]
  misc_feature (12)..(218): Homolog of NCBI NO: 34905120 NR Description: P0686C03.43 [Oryza sativa (japonica
  misc_feature (17)..(160): Homolog of NCBI NO: 15229793 NR Description: hypothetical protein [Arabidopsis thaliana]
  misc_feature (23)..(216): Homolog of NCBI NO: 22326936 NR Description: expressed protein [Arabidopsis thaliana]
  misc_feature (3)..(223): Homolog of NCBI NO: 9294810 NR Description: MTD1 [Medicago truncatula]
MMSRAAVLLHAQEEEEEEEEECSTSTSSSIGRNSDVSSERSMEEGENEVESAYHGPLHAMETLEEVLPIRRGISNFYNGKSKSFTTLADAVSSPSVKDIAKPENAYTRRRRNLMALNHVLDKNNRNYPLRSSGGGICKRSISLSRSSLALAVAMNNSDSSSSITSEDSGSSSNSLHSPSPLPPLHPRNRVSSSSGSGPSSPLLRNFSPWRSFSVADLQQHCAIAATIKISSPSVGNKTAHPS

SEQ ID NO: 53084 - protein, 241 aa, Glycine max
  peptide (1)..(241): Ceres Seq. ID no. 15221254
  misc_feature (12)..(122): Homolog of NCBI NO: 15241248 NR Description: expressed protein [Arabidopsis thaliana]
  misc_feature (23)..(122): Homolog of NCBI NO: 28393161 NR Description: unknown protein [Arabidopsis thaliana]
  misc_feature (23)..(122): Homolog of NCBI NO: 15238642 NR Description: expressed protein [Arabidopsis thaliana]
  misc_feature (2)..(114): Homolog of NCBI NO: 15724184 NR Description: At2g24550/F25P17.15 [Arabidopsis thaliana]
  misc_feature (2)..(114): Homolog of NCBI NO: 25412223 NR Description: hypothetical protein At2g24550 [imported] -
  misc_feature (2)..(114): Homolog of NCBI NO: 18400574 NR Description: expressed protein [Arabidopsis thaliana]
  misc_feature (11)..(217): Homolog of NCBI NO: 34905120 NR Description: P0686C03.43 [Oryza sativa (japonica
  misc_feature (16)..(159): Homolog of NCBI NO: 15229793 NR Description: hypothetical protein [Arabidopsis thaliana]
  misc_feature (22)..(215): Homolog of NCBI NO: 22326936 NR Description: expressed protein [Arabidopsis thaliana]
  misc_feature (2)..(222): Homolog of NCBI NO: 9294810 NR Description: MTD1 [Medicago truncatula]
MSRAAVLLHAQEEEEEEEEECSTSTSSSIGRNSDVSSERSMEEGENEVESAYHGPLHAMETLEEVLPIRRGISNFYNGKSKSFTTLADAVSSPSVKDIAKPENAYTRRRRNLMALNHVLDKNNRNYPLRSSGGGICKRSISLSRSSLALAVAMNNSDSSSSITSEDSGSSSNSLHSPSPLPPLHPRNRVSSSSGSGPSSPLLRNFSPWRSFSVADLQQHCAIAATIKISSPSVGNKTAHPS

SEQ ID NO: 53085 - DNA, 1380 bp, Glycine max
  misc_feature (1)..(1380): Ceres Seq. ID no. 14316215
gaagatcagaaatgcaaatgtcaagattcacccaattccgagctctactccgcggcaccaccagccaccagcgctcccctctccgccaccccgccgtcgccgattcttcatttgcatcaaaaccctcagtctctaatgcctccgcgttccgcccctcttcgccggtgttccacccgcaacaacgcctcggcaatagcacctttcgattcttctcctccaatttcgacaaaggatttgcgcagaaggtgtttgataagcctgcggcagcagtgacttcggccttttcgcggtaccgcgaggcaattgggttgcaaatcgaggcgttcttcaagaggaatactctgtttctttggggcgccggtggagttgtgctctgcgccgttctatggaggatccttttcgggatcgccaacctcttcgttggactctccgaaggcatggctaagtatggcttccttgccctttcatctgctatcgttgcttttactggcttgtatattcgcacgaggctcacaatcaacccggataaagtttatagaatggccatgacaaaacttaacacgtcagctgggattcttgaagttatgggtgctcctctttctggaactgatttgagagcatatatcatgtcagggggtgggctcactgtaaagaagttcaagccaagtgttagaagccgacggtgttttctaattttccccataagagggtctgagaaaaagggtctagtcagtgttgaagtcaagaaaaagaagggtcagtatgatatgaagctgctggctgttgatgttcccatggcttctggtccagaccagcggttgtttctaattggggatgaagaagagtacagggtcggtggggggctaatatctgatcttagagacccagtagtgagagcaatggcagcaaccaaggaatttgatgatcttgatgagattgaggaagaggaagatgctgaaagagaacgtcaagagactgaaagaaaggagcgtgaagagattgaaaagctggaaaagagtagtggcacctagtggataggctttcgagatgtttctcttgtgatttattctcttgttgattacaggaggttgatgttgtttaaacacaatttattttgtatcagtttcgagttttccctagatttagaaacccttgtaccacaaatggccaagtttatctgaaaataaagctgacagggatcaacgtgcattggaatggactcggcgtttgttggtttcgatgttgccttgtctcaagtggattatccttgtctacgatatagttactatctgccacggttgtatgtcatttcagggacctaaattttgacccacctgcccccttccccttccccttgaatggaaagttgtttctagtatt

SEQ ID NO: 53086 - protein, 342 aa, Glycine max
  peptide (1)..(342): Ceres Seq. ID no. 14316216
  misc_feature (85)..(332): Homolog of NCBI NO: 34896160 NR Description: hypothetical protein~similar to Arabidopsis
  misc_feature (69)..(337): Homolog of NCBI NO: 15228922 NR Description: expressed protein [Arabidopsis thaliana]
  misc_feature (65)..(337): Homolog of NCBI NO: 15228922 NR Description: expressed protein [Arabidopsis thaliana]
  misc_feature (25)..(338): Homolog of NCBI NO: 15226745 NR Description: expressed protein [Arabidopsis thaliana]
RSEMQMSRFTQFRALLRGTTSHQRSPLRHPAVADSSFASKPSVSNASAFRPSSPVFHPQQRLGNSTFRFFSSNFDKGFAQKVFDKPAAAVTSAFSRYREAIGLQIEAFFKRNTLFLWGAGGVVLCAVLWRILFGIANLFVGLSEGMAKYGFLALSSAIVAFTGLYIRTRLTINPDKVYRMAMTKLNTSAGILEVMGAPLSGTDLRAYIMSGGGLTVKKFKPSVRSRRCFLIFPIRGSEKKGLVSVEVKKKKGQYDMKLLAVDVPMASGPDQRLFLIGDEEEYRVGGGLISDLRDPVVRAMAATKEFDDLDEIEEEEDAERERQETERKEREEIEKLEKSSGT

SEQ ID NO: 53087 - protein, 339 aa, Glycine max
  peptide (1)..(339): Ceres Seq. ID no. 14316217
  misc_feature (82)..(329): Homolog of NCBI NO: 34896160 NR Description: hypothetical protein~similar to Arabidopsis
  misc_feature (66)..(334): Homolog of NCBI NO: 15228922 NR Description: expressed protein [Arabidopsis thaliana]
  misc_feature (62)..(334): Homolog of NCBI NO: 15228922 NR Description: expressed protein [Arabidopsis thaliana]
  misc_feature (22)..(335): Homolog of NCBI NO: 15226745 NR Description: expressed protein [Arabidopsis thaliana]
MQMSRFTQFRALLRGTTSHQRSPLRHPAVADSSFASKPSVSNASAFRPSSPVFHPQQRLGNSTFRFFSSNFDKGFAQKVFDKPAAAVTSAFSRYREAIGLQIEAFFKRNTLFLWGAGGVVLCAVLWRILFGIANLFVGLSEGMAKYGFLALSSAIVAFTGLYIRTRLTINPDKVYRMAMTKLNTSAGILEVMGAPLSGTDLRAYIMSGGGLTVKKFKPSVRSRRCFLIFPIRGSEKKGLVSVEVKKKKGQYDMKLLAVDVPMASGPDQRLFLIGDEEEYRVGGGLISDLRDPVVRAMAATKEFDDLDEIEEEEDAERERQETERKEREEIEKLEKSSGT

SEQ ID NO: 53088 - protein, 337 aa, Glycine max
  peptide (1)..(337): Ceres Seq. ID no. 14316218
  misc_feature (80)..(327): Homolog of NCBI NO: 34896160 NR Description: hypothetical protein~similar to Arabidopsis
  misc_feature (64)..(332): Homolog of NCBI NO: 15228922 NR Description: expressed protein [Arabidopsis thaliana]
  misc_feature (60)..(332): Homolog of NCBI NO: 15228922 NR Description: expressed protein [Arabidopsis thaliana]
  misc_feature (20)..(333): Homolog of NCBI NO: 15226745 NR Description: expressed protein [Arabidopsis thaliana]
MSRFTQFRALLRGTTSHQRSPLRHPAVADSSFASKPSVSNASAFRPSSPVFHPQQRLGNSTFRFFSSNFDKGFAQKVFDKPAAAVTSAFSRYREAIGLQIEAFFKRNTLFLWGAGGVVLCAVLWRILFGIANLFVGLSEGMAKYGFLALSSAIVAFTGLYIRTRLTINPDKVYRMAMTKLNTSAGILEVMGAPLSGTDLRAYIMSGGGLTVKKFKPSVRSRRCFLIFPIRGSEKKGLVSVEVKKKKGQYDMKLLAVDVPMASGPDQRLFLIGDEEEYRVGGGLISDLRDPVVRAMAATKEFDDLDEIEEEEDAERERQETERKEREEIEKLEKSSGT

SEQ ID NO: 53089 - DNA, 1363 bp, Glycine max
  misc_feature (1)..(1363): Ceres Seq. ID no. 14304724
tcagatatgtaggccccccccccggtgatgaagaaaagttctggtacctcccagaaacttggttcatttctaagtccaggggcaccaaactatagagagaaaagcattgggagccaaaaggggtggagctcagagagggtgttgctgcagccatcatcaaacagcataaggaatgctagtgtggctaacttgacacccttcaacagtggaagaacaataccttcaaaatgggatgatgctgagaggtggatttgtagccccgtttcaggctatgccaacaacaaaaccaattcctatacacaacttcagcagcggcgaccaaaatcgaaaagtggtccaattatgcctccaggaacaggctactactccaattactcacccacaattccactgagccaaggtttggtagtgaagaacttcatgatgggtggttctcccttttcaactggggtgttggcaccggatgctatctctcttcaccattattatgcacatgaggctgtttttggtacccgttatgactttgacaatagtatgcaatgcttcagtccattcctcaatgaaaatagtgtagctctcccatcagtgtctagtgcacccatgtggtcagaactgctatgtgacccttcgcctaattctcaagacgagaaacgaaacgaaattaagaatgaggacaccgtgacatctcctctctcaaaatgtgacaaaggcactcaaatgagccctcctgagcctgagaatgatgcacccacttcgacaatggatcaacaaaataacctttctgcaaagttagaggtcagagatgtagagatagacagcgaggctagtattattaggtggtctaagagccatgtacccaagctgagcttgctacctggtaaacactcaagaaaaattagtagaacggaaaccaaagcttcaggtttggataatgcagagtcgacgttggactcatccaagattcagagggaggaagccaaaatcgttgcatgggagagtttgcagaaagccaaggctgaagctgaaatacgaaaactagagatgaaattagaaaagaagaaatcgtcatcaatggataagattcaaagcaaactgagaagggcgcagatggaggctgaaaagatgagaaaccaaataactgtagaagaggagggtcagcaggtttccaagactcgaaaagtattttcattccacaaatatgcccagatatggtttccaaggagctgcttcggcactcatgctctccatgattaattcattatttaatatttaatcccatatctgaaatcactaaggtttagtcccgataaacgcatcgataatcatatttcaagtcataggtcatttttattttttatttttg

SEQ ID NO: 53090 - protein, 408 aa, Glycine max
  peptide (1)..(408): Ceres Seq. ID no. 14304725
  misc_feature (291)..(378): Pfam Name: Remorin, C-terminal region Pfam Description: Remorin, C-terminal region
  misc_feature (212)..(384): Homolog of NCBI NO: 28393368 NR Description: unknown protein [Arabidopsis thaliana]
  misc_feature (215)..(402): Homolog of NCBI NO: 21555669 NR Description: remorin [Arabidopsis thaliana]
  misc_feature (137)..(384): Homolog of NCBI NO: 34902218 NR Description: Unknown protein [Oryza sativa (japonica
  misc_feature (215)..(402): Homolog of NCBI NO: 15237822 NR Description: expressed protein [Arabidopsis thaliana]
  misc_feature (62)..(396): Homolog of NCBI NO: 15220725 NR Description: expressed protein [Arabidopsis thaliana]
  misc_feature (57)..(104): Homolog of NCBI NO: 18395321 NR Description: expressed protein [Arabidopsis thaliana]
  misc_feature (186)..(384): Homolog of NCBI NO: 18395321 NR Description: expressed protein [Arabidopsis thaliana]
  misc_feature (185)..(378): Homolog of NCBI NO: 15028061 NR Description: unknown protein [Arabidopsis thaliana]
  misc_feature (185)..(378): Homolog of NCBI NO: 18419945 NR Description: expressed protein [Arabidopsis thaliana]
  misc_feature (1)..(370): Homolog of NCBI NO: 30693941 NR Description: conserved hypothetical protein [Arabidopsis
MKKSSGTSQKLGSFLSPGAPNYREKSIGSQKGWSSERVLLQPSSNSIRNASVANLTPFNSGRTIPSKWDDAERWICSPVSGYANNKTNSYTQLQQRRPKSKSGPIMPPGTGYYSNYSPTIPLSQGLVVKNFMMGGSPFSTGVLAPDAISLHHYYAHEAVFGTRYDFDNSMQCFSPFLNENSVALPSVSSAPMWSELLCDPSPNSQDEKRNEIKNEDTVTSPLSKCDKGTQMSPPEPENDAPTSTMDQQNNLSAKLEVRDVEIDSEASIIRWSKSHVPKLSLLPGKHSRKISRTETKASGLDNAESTLDSSKIQREEAKIVAWESLQKAKAEAEIRKLEMKLEKKKSSSMDKIQSKLRRAQMEAEKMRNQITVEEEGQQVSKTRKVFSFHKYAQIWFPRSCFGTHALHD

SEQ ID NO: 53091 - protein, 303 aa, Glycine max
  peptide (1)..(303): Ceres Seq. ID no. 14304726
  misc_feature (186)..(273): Pfam Name: Remorin, C-terminal region Pfam Description: Remorin, C-terminal region
  misc_feature (127)..(280): Homolog of NCBI NO: 34925093 NR Description: Remorin (pp34)
  misc_feature (107)..(279): Homolog of NCBI NO: 28393368 NR Description: unknown protein [Arabidopsis thaliana]
  misc_feature (110)..(297): Homolog of NCBI NO: 21555669 NR Description: remorin [Arabidopsis thaliana]
  misc_feature (32)..(279): Homolog of NCBI NO: 34902218 NR Description: Unknown protein [Oryza sativa (japonica
  misc_feature (110)..(297): Homolog of NCBI NO: 15237822 NR Description: expressed protein [Arabidopsis thaliana]
  misc_feature (1)..(291): Homolog of NCBI NO: 15220725 NR Description: expressed protein [Arabidopsis thaliana]
  misc_feature (81)..(279): Homolog of NCBI NO: 18395321 NR Description: expressed protein [Arabidopsis thaliana]
  misc_feature (80)..(273): Homolog of NCBI NO: 15028061 NR Description: unknown protein [Arabidopsis thaliana]
  misc_feature (80)..(273): Homolog of NCBI NO: 18419945 NR Description: expressed protein [Arabidopsis thaliana]
  misc_feature (1)..(265): Homolog of NCBI NO: 30693941 NR Description: conserved hypothetical protein [Arabidopsis
MPPGTGYYSNYSPTIPLSQGLVVKNFMMGGSPFSTGVLAPDAISLHHYYAHEAVFGTRYDFDNSMQCFSPFLNENSVALPSVSSAPMWSELLCDPSPNSQDEKRNEIKNEDTVTSPLSKCDKGTQMSPPEPENDAPTSTMDQQNNLSAKLEVRDVEIDSEASIIRWSKSHVPKLSLLPGKHSRKISRTETKASGLDNAESTLDSSKIQREEAKIVAWESLQKAKAEAEIRKLEMKLEKKKSSSMDKIQSKLRRAQMEAEKMRNQITVEEEGQQVSKTRKVFSFHKYAQIWFPRSCFGTHALHD

SEQ ID NO: 53092 - protein, 277 aa, Glycine max
  peptide (1)..(277): Ceres Seq. ID no. 14304727
  misc_feature (160)..(247): Pfam Name: Remorin, C-terminal region Pfam Description: Remorin, C-terminal region
  misc_feature (101)..(254): Homolog of NCBI NO: 34925093 NR Description: Remorin (pp34)
  misc_feature (81)..(253): Homolog of NCBI NO: 28393368 NR Description: unknown protein [Arabidopsis thaliana]
  misc_feature (84)..(271): Homolog of NCBI NO: 21555669 NR Description: remorin [Arabidopsis thaliana]
  misc_feature (6)..(253): Homolog of NCBI NO: 34902218 NR Description: Unknown protein [Oryza sativa (japonica
  misc_feature (84)..(271): Homolog of NCBI NO: 15237822 NR Description: expressed protein [Arabidopsis thaliana]
  misc_feature (1)..(265): Homolog of NCBI NO: 15220725 NR Description: expressed protein [Arabidopsis thaliana]
  misc_feature (55)..(253): Homolog of NCBI NO: 18395321 NR Description: expressed protein [Arabidopsis thaliana]
  misc_feature (54)..(247): Homolog of NCBI NO: 15028061 NR Description: unknown protein [Arabidopsis thaliana]
  misc_feature (54)..(247): Homolog of NCBI NO: 18419945 NR Description: expressed protein [Arabidopsis thaliana]
  misc_feature (1)..(239): Homolog of NCBI NO: 30693941 NR Description: conserved hypothetical protein [Arabidopsis
MMGGSPFSTGVLAPDAISLHHYYAHEAVFGTRYDFDNSMQCFSPFLNENSVALPSVSSAPMWSELLCDPSPNSQDEKRNEIKNEDTVTSPLSKCDKGTQMSPPEPENDAPTSTMDQQNNLSAKLEVRDVEIDSEASIIRWSKSHVPKLSLLPGKHSRKISRTETKASGLDNAESTLDSSKIQREEAKIVAWESLQKAKAEAEIRKLEMKLEKKKSSSMDKIQSKLRRAQMEAEKMRNQITVEEEGQQVSKTRKVFSFHKYAQIWFPRSCFGTHALHD

SEQ ID NO: 53093 - DNA, 1302 bp, Glycine max
  misc_feature (1)..(1302): Ceres Seq. ID no. 13637592
cccccccccacatacacatggaggaagcaatgaggcgtctcaacggggtagctccgattatcggacccgactcgaaaggcgacggtggactcatcgccaataacccgaaacggacctcggccgtgaacaagagggctttaagagaagacggcggcggtggtggcggcggcggagcgatgaggtaccgcggcgtgaggcgcaggccgtgggggcgttacgcggcggagataagggaccctcaatcgaaggagcggcgatggctgggaaccttcgacacggcggaggaagccgcttgcgcctacgactgcgctgctagagccatgaggggtctcaaagctcgcaccaacttcgtttacccaacttctccgcaaccttcttccgccaccaccgaacacttgttccctaacttcaacaacaacaacaactttcacaaacactcactcttcaatcaccaccgtaaccgccacataaccggttccaacacttgttttgaccaacctcactccgttgacttttcagcccctcgaaacccttcttctctcaacatgcttctctttcgtgaccttattcactctaacccttctttgctttcttcttcttccactcagaacttccacgaccagttttacaacaagagtacttctactttttcatcgttacctgtttctccttctcttgctccccctagttattcgatgaataattcttgtggaggaggctctttgtctgttaagatgaacacgtttcccacttgtggaactaattttgctgaaaaaggtgatgatggtgatggttttttctctcgtgagtcttcggattcggggttgttggaggagatagttaacaagttcttgcctagaacgaagcctagtaaatgcgagactacttttgcaaatcctcaggaggagtcgcttcttctccctccgcttgtttctgaatcaacgcttgtttccaccgggcaacaatactatgatgatgacatgaaaaaagggtttccaaagaacgggggtctaggtgttttttattctgatcaaggttttcccatgcagcaattcgacacctctaatgggtttaatagcatggctatggagaatgatcaaaacattattaataatgcagagaactgtgtcgttgaagatgtttttcagtaccaagagcttcttaatgctttcgcaatcagaatgcaaaatgcttaattagttaacatttccagtgtctgcatctcaatgctagttgtgtatgtagtcatgttgaatctgtcacttctcaatgttggtctggcctttcaattagaaacttatt

SEQ ID NO: 53094 - protein, 397 aa, Glycine max
  peptide (1)..(397): Ceres Seq. ID no. 13637593
  misc_feature (59)..(119): Pfam Name: AP2 domain Pfam Description: AP2 domain
  misc_feature (59)..(180): Homolog of NCBI NO: 15223609 NR Description: ethylene responsive element binding factor 3
  misc_feature (32)..(214): Homolog of NCBI NO: 15238862 NR Description: AP2 domain transcription factor, putative
  misc_feature (59)..(160): Homolog of NCBI NO: 15217848 NR Description: ethylene responsive element binding factor family
  misc_feature (60)..(135): Homolog of NCBI NO: 15240749 NR Description: AP2/EREBP transcription factor LEAFY PETIOLE
  misc_feature (26)..(137): Homolog of NCBI NO: 38605805 NR Description: OSJNBb0014D23.10 [Oryza sativa (japonica
  misc_feature (6)..(278): Homolog of NCBI NO: 15221779 NR Description: AP2 domain transcription factor, putative
  misc_feature (53)..(124): Homolog of NCBI NO: 18028940 NR Description: enhancer of shoot regeneration ESR1 [Arabidopsis
  misc_feature (53)..(124): Homolog of NCBI NO: 15222140 NR Description: AP2 domain transcription factor, putative
  misc_feature (193)..(288): Homolog of NCBI NO: 18028940 NR Description: enhancer of shoot regeneration ESR1 [Arabidopsis
  misc_feature (193)..(288): Homolog of NCBI NO: 15222140 NR Description: AP2 domain transcription factor, putative
PPHIHMEEAMRRLNGVAPIIGPDSKGDGGLIANNPKRTSAVNKRALREDGGGGGGGGAMRYRGVRRRPWGRYAAEIRDPQSKERRWLGTFDTAEEAACAYDCAARAMRGLKARTNFVYPTSPQPSSATTEHLFPNFNNNNNFHKHSLFNHHRNRHITGSNTCFDQPHSVDFSAPRNPSSLNMLLFRDLIHSNPSLLSSSSTQNFHDQFYNKSTSTFSSLPVSPSLAPPSYSMNNSCGGGSLSVKMNTFPTCGTNFAEKGDDGDGFFSRESSDSGLLEEIVNKFLPRTKPSKCETTFANPQEESLLLPPLVSESTLVSTGQQYYDDDMKKGFPKNGGLGVFYSDQGFPMQQFDTSNGFNSMAMENDQNIINNAENCVVEDVFQYQELLNAFAIRMQNA

SEQ ID NO: 53095 - protein, 392 aa, Glycine max
  peptide (1)..(392): Ceres Seq. ID no. 13637594
  misc_feature (54)..(114): Pfam Name: AP2 domain Pfam Description: AP2 domain
  misc_feature (54)..(175): Homolog of NCBI NO: 15223609 NR Description: ethylene responsive element binding factor 3
  misc_feature (27)..(209): Homolog of NCBI NO: 15238862 NR Description: AP2 domain transcription factor, putative
  misc_feature (54)..(155): Homolog of NCBI NO: 15217848 NR Description: ethylene responsive element binding factor family
  misc_feature (55)..(130): Homolog of NCBI NO: 15240749 NR Description: AP2/EREBP transcription factor LEAFY PETIOLE
  misc_feature (21)..(132): Homolog of NCBI NO: 38605805 NR Description: OSJNBb0014D23.10 [Oryza sativa (japonica
  misc_feature (1)..(273): Homolog of NCBI NO: 15221779 NR Description: AP2 domain transcription factor, putative
  misc_feature (48)..(119): Homolog of NCBI NO: 18028940 NR Description: enhancer of shoot regeneration ESR1 [Arabidopsis
  misc_feature (48)..(119): Homolog of NCBI NO: 15222140 NR Description: AP2 domain transcription factor, putative
  misc_feature (188)..(283): Homolog of NCBI NO: 18028940 NR Description: enhancer of shoot regeneration ESR1 [Arabidopsis
  misc_feature (188)..(283): Homolog of NCBI NO: 15222140 NR Description: AP2 domain transcription factor, putative
MEEAMRRLNGVAPIIGPDSKGDGGLIANNPKRTSAVNKRALREDGGGGGGGGAMRYRGVRRRPWGRYAAEIRDPQSKERRWLGTFDTAEEAACAYDCAARAMRGLKARTNFVYPTSPQPSSATTEHLFPNFNNNNNFHKHSLFNHHRNRHITGSNTCFDQPHSVDFSAPRNPSSLNMLLFRDLIHSNPSLLSSSSTQNFHDQFYNKSTSTFSSLPVSPSLAPPSYSMNNSCGGGSLSVKMNTFPTCGTNFAEKGDDGDGFFSRESSDSGLLEEIVNKFLPRTKPSKCETTFANPQEESLLLPPLVSESTLVSTGQQYYDDDMKKGFPKNGGLGVFYSDQGFPMQQFDTSNGFNSMAMENDQNIINNAENCVVEDVFQYQELLNAFAIRMQNA

SEQ ID NO: 53096 - protein, 388 aa, Glycine max
  peptide (1)..(388): Ceres Seq. ID no. 13637595
  misc_feature (50)..(110): Pfam Name: AP2 domain Pfam Description: AP2 domain
  misc_feature (50)..(171): Homolog of NCBI NO: 15223609 NR Description: ethylene responsive element binding factor 3
  misc_feature (23)..(205): Homolog of NCBI NO: 15238862 NR Description: AP2 domain transcription factor, putative
  misc_feature (50)..(151): Homolog of NCBI NO: 15217848 NR Description: ethylene responsive element binding factor family
  misc_feature (51)..(126): Homolog of NCBI NO: 15240749 NR Description: AP2/EREBP transcription factor LEAFY PETIOLE
  misc_feature (17)..(128): Homolog of NCBI NO: 38605805 NR Description: OSJNBb0014D23.10 [Oryza sativa (japonica
  misc_feature (1)..(269): Homolog of NCBI NO: 15221779 NR Description: AP2 domain transcription factor, putative
  misc_feature (44)..(115): Homolog of NCBI NO: 18028940 NR Description: enhancer of shoot regeneration ESR1 [Arabidopsis
  misc_feature (44)..(115): Homolog of NCBI NO: 15222140 NR Description: AP2 domain transcription factor, putative
  misc_feature (184)..(279): Homolog of NCBI NO: 18028940 NR Description: enhancer of shoot regeneration ESR1 [Arabidopsis
  misc_feature (184)..(279): Homolog of NCBI NO: 15222140 NR Description: AP2 domain transcription factor, putative
MRRLNGVAPIIGPDSKGDGGLIANNPKRTSAVNKRALREDGGGGGGGGAMRYRGVRRRPWGRYAAEIRDPQSKERRWLGTFDTAEEAACAYDCAARAMRGLKARTNFVYPTSPQPSSATTEHLFPNFNNNNNFHKHSLFNHHRNRHITGSNTCFDQPHSVDFSAPRNPSSLNMLLFRDLIHSNPSLLSSSSTQNFHDQFYNKSTSTFSSLPVSPSLAPPSYSMNNSCGGGSLSVKMNTFPTCGTNFAEKGDDGDGFFSRESSDSGLLEEIVNKFLPRTKPSKCETTFANPQEESLLLPPLVSESTLVSTGQQYYDDDMKKGFPKNGGLGVFYSDQGFPMQQFDTSNGFNSMAMENDQNIINNAENCVVEDVFQYQELLNAFAIRMQNA

SEQ ID NO: 53097 - DNA, 1965 bp, Glycine max
  misc_feature (1)..(1965): Ceres Seq. ID no. 14304811
ggagtcaaatattcctcaaaacaacgcattcctttcactgccccttcccaattcccttccctgattgtcaattggatcttcatgagttcaacaaccactggagcatacttcgtttcctgtgttgcgggaaacaagaacaacgacctcttctgctgggttttgctctgcttgctgccaaaatttttgggaactccatttgcctacatcaactttctcttgattcaggccattgacaggaatccatcggcggtggaggttttgggaaacttcggggtggttaacctatagtctttattagtttggtcgtcagcagcagcatatttagatcccttattgttgagtggtgtgagaaatggtgtcctctcagttttctgcttttactttggctggctacaaaccgtctcagactcagttactctttcctgcaaagcttgttgatactgtgaacacagagcatattgagctggatttctctgatgtctttggtcctgttacgttagatttgaataacattgattccactaccagtgagcctatggaagaagtgaacgagctggtttatgatgacccaccagtgatttacactcgctcacattctctggttggcccttcaacttgtgttagtcaatcacttaagcttggcaaactcaccatacatgagactgaggattcattggaactagtggagcatgtcaatggagaggccattaaagacatcaaagaatcttcctttgttgaggaatcattgaaagatgaagatgggaatctcatgaagatccacagagttagcattgacgatttcgagattttgaaggttgttgggcagggtgcatttgcaaaagtttatcaggtgaggaaaaagggtacttctgaaatatatgctatgaaggttatgcggaaggacaagattatggagaagaaccatgctgaatacatgaaagctgagagggatatttggacaaagatagaacacccatttgttgttcaactcagatactcttttcagacaaaatacagactgtatcttgtgctggattttgtaaatgggggccatctctttttccagctttatcaccaaggccttttcagagaggatctagcacgcatatatacagctgagattgtttctgcagtttcccatctccatgcaaatggaataatgcatagggatctaaagcctgaaaatatcctactggatgctgatggccatgttatgttgactgattttggcttagctaaacaatttgaagagagtacaagatcaaattcgatgtgtggtacattagagtacatggcacctgaaattattcttggcaaaggccatgataaggctgctgattggtggagtgtaggtgttctactgtttgagatgcttactggaaagccgcctttctgtggtggaaaccgtgacaaaattcagcagaagatagttaaagacaagattaagctgccagcatttttgtcaagtgaagcacattcactgttgaaagggctgctacagaaggaacaagctaggcgcttaggttgtggacctcggggtgttgaggaaattaaaagccacaagtggtttaaaccaatcaattggagaaagttggaagcaagagaaatccaaccaagctttaggccagaagtagctggtgtgcactgtgttgccaactttgagaagcgctggactgatatgcctgttgtggactcaccagctgccagcccaaatggtggaaacccctttaaggatttctcttatgtgaggcctgcagcctcttttcttcaaaggaataaccctgcttactagccagcttgaaatggcgttggcttaagatgccaacatgaaacattttcatgtgcccttgacttgtgtgaactttgcaggttgtgggttcattcacttattatgtgcaccttgctgcggctctctgcaaatgtattgagctgtcatgtatgcagaaaataaattactttatttac

SEQ ID NO: 53098 - protein, 479 aa, Glycine max
  peptide (1)..(479): Ceres Seq. ID no. 14304812
  misc_feature (150)..(406): Pfam Name: Protein kinase domain Pfam Description: Protein kinase domain
  misc_feature (144)..(468): Homolog of NCBI NO: 17555946 NR Description: s6 kinase (3M341) [Caenorhabditis elegans]
  misc_feature (148)..(464): Homolog of NCBI NO: 464395 NR Description: Protein kinase 2
  misc_feature (178)..(477): Homolog of NCBI NO: 33146662 NR Description: putative S6 ribosomal protein kinase
  misc_feature (1)..(468): Homolog of NCBI NO: 37575481 NR Description: ribosomal protein S6 kinase [Zea mays]
  misc_feature (29)..(477): Homolog of NCBI NO: 7649389 NR Description: S6 ribosomal protein kinase [Asparagus
  misc_feature (1)..(477): Homolog of NCBI NO: 1362152 NR Description: ribosomal protein S6 kinase homolog (clone
  misc_feature (29)..(475): Homolog of NCBI NO: 21537155 NR Description: putative ribosomal-protein S6 kinase ATPK6
  misc_feature (29)..(475): Homolog of NCBI NO: 15231960 NR Description: ribosomal-protein S6 kinase (ATPK6) -related
  misc_feature (1)..(474): Homolog of NCBI NO: 2129541 NR Description: protein kinase ATPK19 (EC 2.7.1.-) - Arabidopsis
  misc_feature (1)..(474): Homolog of NCBI NO: 15231959 NR Description: ribosomal-protein S6 kinase (ATPK19) -related
MVSSQFSAFTLAGYKPSQTQLLFPAKLVDTVNTEHIELDFSDVFGPVTLDLNNIDSTTSEPMEEVNELVYDDPPVIYTRSHSLVGPSTCVSQSLKLGKLTIHETEDSLELVEHVNGEAIKDIKESSFVEESLKDEDGNLMKIHRVSIDDFEILKVVGQGAFAKVYQVRKKGTSEIYAMKVMRKDKIMEKNHAEYMKAERDIWTKIEHPFVVQLRYSFQTKYRLYLVLDFVNGGHLFFQLYHQGLFREDLARIYTAEIVSAVSHLHANGIMHRDLKPENILLDADGHVMLTDFGLAKQFEESTRSNSMCGTLEYMAPEIILGKGHDKAADWWSVGVLLFEMLTGKPPFCGGNRDKIQQKIVKDKIKLPAFLSSEAHSLLKGLLQKEQARRLGCGPRGVEEIKSHKWFKPINWRKLEAREIQPSFRPEVAGVHCVANFEKRWTDMPVVDSPAASPNGGNPFKDFSYVRPAASFLQRNNPAY

SEQ ID NO: 53099 - protein, 418 aa, Glycine max
  peptide (1)..(418): Ceres Seq. ID no. 14304813
  misc_feature (89)..(345): Pfam Name: Protein kinase domain Pfam Description: Protein kinase domain
  misc_feature (83)..(407): Homolog of NCBI NO: 17555946 NR Description: s6 kinase (3M341) [Caenorhabditis elegans]
  misc_feature (87)..(403): Homolog of NCBI NO: 464395 NR Description: Protein kinase 2
  misc_feature (117)..(416): Homolog of NCBI NO: 33146662 NR Description: putative S6 ribosomal protein kinase
  misc_feature (1)..(407): Homolog of NCBI NO: 37575481 NR Description: ribosomal protein S6 kinase [Zea mays]
  misc_feature (1)..(416): Homolog of NCBI NO: 7649389 NR Description: S6 ribosomal protein kinase [Asparagus
  misc_feature (1)..(416): Homolog of NCBI NO: 1362152 NR Description: ribosomal protein S6 kinase homolog (clone
  misc_feature (1)..(414): Homolog of NCBI NO: 21537155 NR Description: putative ribosomal-protein S6 kinase ATPK6
  misc_feature (1)..(414): Homolog of NCBI NO: 15231960 NR Description: ribosomal-protein S6 kinase (ATPK6) -related
  misc_feature (1)..(413): Homolog of NCBI NO: 2129541 NR Description: protein kinase ATPK19 (EC 2.7.1.-) - Arabidopsis
  misc_feature (1)..(413): Homolog of NCBI NO: 15231959 NR Description: ribosomal-protein S6 kinase (ATPK19) -related
MEEVNELVYDDPPVIYTRSHSLVGPSTCVSQSLKLGKLTIHETEDSLELVEHVNGEAIKDIKESSFVEESLKDEDGNLMKIHRVSIDDFEILKVVGQGAFAKVYQVRKKGTSEIYAMKVMRKDKIMEKNHAEYMKAERDIWTKIEHPFVVQLRYSFQTKYRLYLVLDFVNGGHLFFQLYHQGLFREDLARIYTAEIVSAVSHLHANGIMHRDLKPENILLDADGHVMLTDFGLAKQFEESTRSNSMCGTLEYMAPEIILGKGHDKAADWWSVGVLLFEMLTGKPPFCGGNRDKIQQKIVKDKIKLPAFLSSEAHSLLKGLLQKEQARRLGCGPRGVEEIKSHKWFKPINWRKLEAREIQPSFRPEVAGVHCVANFEKRWTDMPVVDSPAASPNGGNPFKDFSYVRPAASFLQRNNPAY

SEQ ID NO: 53100 - protein, 340 aa, Glycine max
  peptide (1)..(340): Ceres Seq. ID no. 14304814
  misc_feature (11)..(267): Pfam Name: Protein kinase domain Pfam Description: Protein kinase domain
  misc_feature (5)..(329): Homolog of NCBI NO: 17555946 NR Description: s6 kinase (3M341) [Caenorhabditis elegans]
  misc_feature (9)..(325): Homolog of NCBI NO: 464395 NR Description: Protein kinase 2
  misc_feature (39)..(338): Homolog of NCBI NO: 33146662 NR Description: putative S6 ribosomal protein kinase
  misc_feature (1)..(329): Homolog of NCBI NO: 37575481 NR Description: ribosomal protein S6 kinase [Zea mays]
  misc_feature (1)..(338): Homolog of NCBI NO: 7649389 NR Description: S6 ribosomal protein kinase [Asparagus
  misc_feature (1)..(338): Homolog of NCBI NO: 1362152 NR Description: ribosomal protein S6 kinase homolog (clone
  misc_feature (1)..(336): Homolog of NCBI NO: 21537155 NR Description: putative ribosomal-protein S6 kinase ATPK6
  misc_feature (1)..(336): Homolog of NCBI NO: 15231960 NR Description: ribosomal-protein S6 kinase (ATPK6) -related
  misc_feature (1)..(335): Homolog of NCBI NO: 2129541 NR Description: protein kinase ATPK19 (EC 2.7.1.-) - Arabidopsis
  misc_feature (1)..(335): Homolog of NCBI NO: 15231959 NR Description: ribosomal-protein S6 kinase (ATPK19) -related
MKIHRVSIDDFEILKVVGQGAFAKVYQVRKKGTSEIYAMKVMRKDKIMEKNHAEYMKAERDIWTKIEHPFVVQLRYSFQTKYRLYLVLDFVNGGHLFFQLYHQGLFREDLARIYTAEIVSAVSHLHANGIMHRDLKPENILLDADGHVMLTDFGLAKQFEESTRSNSMCGTLEYMAPEIILGKGHDKAADWWSVGVLLFEMLTGKPPFCGGNRDKIQQKIVKDKIKLPAFLSSEAHSLLKGLLQKEQARRLGCGPRGVEEIKSHKWFKPINWRKLEAREIQPSFRPEVAGVHCVANFEKRWTDMPVVDSPAASPNGGNPFKDFSYVRPAASFLQRNNPAY

SEQ ID NO: 53101 - DNA, 1263 bp, Glycine max
  misc_feature (1)..(1263): Ceres Seq. ID no. 13637600
accgggccccccctcgagtcagctacgtaggccccccccccttttaagtaaacctcattagactagtatttggtaaatcaaaattttcctaatctcttgtctgtaattgatttggccagcaacaacacctgaacattgatataaatgctttggtaacaaagttggaaaagctggagaaggaagtgatcttccagaaggggaacaaatttgatccatccaagaaattgaatgtgatgaagatagaaatggccaaacttgagtggtacaagaagtattccaaaaataataagattggctactatgacagcttcaagaggggtatctcaacaagcgacctagatgttgttcagtgccagaaaaccctcagaaattactggattgacatggttgcagaggcagagctgaaacctcagacagaaggtgcagcttttcgtactcgctggctttttggcggaactaattacaggagaatgtttgaacccctagatattgctgagtactacgcgaatggtggtaaagactatgaggctaagggaagatctagacattatatagtgttgcaggagtggctggaagaggataagaaagaaaaaagcaattcaaacagtacaaacaaaaaggatgtggaatctattttaacttttgactcttgcttttgggcacatgttgaagaagctatcctttcatgcaaagtgttgaaggatgaacaatctagtgtgacagagaaggaagaggaaactgggaagttgcttgaattcgagaagtatgtttatgggttgctcacgaaatatgaagtgtcatcagagattttcctaaggcaaagcagctacatgatttggtggaatcagtataaggcaattaagggaacttcttataattcagcactcgcagacttcatgagcaatcccgatcattataatgtgctgtatattaagggaacttataatttcccccctcaggcttagtgattagtgaacgtccgtgtggttgaacagtgtaaaataaattgtggttttatctcactgtgcaccttttaataagctttttttatattttcccttgttgatttttgttaaggatcttggttttaccctcccttgtgttgtggtattggaaactcatgcaattgtcttgacttgtgatattggaaactcttgcaattgtcttaccttgcaaaccttcactcattattcttgaaaatttaagttgagagcaatggatgcaggctagtttgtattaatgtaatctgaaaggctcgctgtg

SEQ ID NO: 53102 - protein, 243 aa, Glycine max
  peptide (1)..(243): Ceres Seq. ID no. 13637601
  misc_feature (1)..(166): Homolog of NCBI NO: 19110917 NR Description: EDS1-like protein [Nicotiana benthamiana]
  misc_feature (1)..(167): Homolog of NCBI NO: 21552983 NR Description: EDS1 [Nicotiana tabacum]
  misc_feature (7)..(210): Homolog of NCBI NO: 15231218 NR Description: phytoalexin-deficient 4 protein (pad4)
  misc_feature (1)..(223): Homolog of NCBI NO: 30685124 NR Description: leaf senescence-associated protein (SAG101)
  misc_feature (1)..(223): Homolog of NCBI NO: 11357727 NR Description: hypothetical protein F2G14_50 - Arabidopsis
  misc_feature (1)..(223): Homolog of NCBI NO: 8699168 NR Description: SAG101 [Arabidopsis thaliana]
  misc_feature (1)..(223): Homolog of NCBI NO: 8699170 NR Description: SAG101 [Arabidopsis thaliana]
MKIEMAKLEWYKKYSKNNKIGYYDSFKRGISTSDLDVVQCQKTLRNYWIDMVAEAELKPQTEGAAFRTRWLFGGTNYRRMFEPLDIAEYYANGGKDYEAKGRSRHYIVLQEWLEEDKKEKSNSNSTNKKDVESILTFDSCFWAHVEEAILSCKVLKDEQSSVTEKEEETGKLLEFEKYVYGLLTKYEVSSEIFLRQSSYMIWWNQYKAIKGTSYNSALADFMSNPDHYNVLYIKGTYNFPPQA

SEQ ID NO: 53103 - protein, 239 aa, Glycine max
  peptide (1)..(239): Ceres Seq. ID no. 13637602
  misc_feature (1)..(162): Homolog of NCBI NO: 19110917 NR Description: EDS1-like protein [Nicotiana benthamiana]
  misc_feature (1)..(163): Homolog of NCBI NO: 21552983 NR Description: EDS1 [Nicotiana tabacum]
  misc_feature (3)..(206): Homolog of NCBI NO: 15231218 NR Description: phytoalexin-deficient 4 protein (pad4)
  misc_feature (1)..(219): Homolog of NCBI NO: 11357727 NR Description: hypothetical protein F2G14_50 - Arabidopsis
  misc_feature (1)..(219): Homolog of NCBI NO: 30685124 NR Description: leaf senescence-associated protein (SAG101)
  misc_feature (1)..(219): Homolog of NCBI NO: 8699168 NR Description: SAG101 [Arabidopsis thaliana]
  misc_feature (1)..(219): Homolog of NCBI NO: 8699170 NR Description: SAG101 [Arabidopsis thaliana]
MAKLEWYKKYSKNNKIGYYDSFKRGISTSDLDVVQCQKTLRNYWIDMVAEAELKPQTEGAAFRTRWLFGGTNYRRMFEPLDIAEYYANGGKDYEAKGRSRHYIVLQEWLEEDKKEKSNSNSTNKKDVESILTFDSCFWAHVEEAILSCKVLKDEQSSVTEKEEETGKLLEFEKYVYGLLTKYEVSSEIFLRQSSYMIWWNQYKAIKGTSYNSALADFMSNPDHYNVLYIKGTYNFPPQA

SEQ ID NO: 53104 - protein, 193 aa, Glycine max
  peptide (1)..(193): Ceres Seq. ID no. 13637603
  misc_feature (1)..(116): Homolog of NCBI NO: 19110917 NR Description: EDS1-like protein [Nicotiana benthamiana]
  misc_feature (1)..(117): Homolog of NCBI NO: 21552983 NR Description: EDS1 [Nicotiana tabacum]
  misc_feature (1)..(160): Homolog of NCBI NO: 15231218 NR Description: phytoalexin-deficient 4 protein (pad4)
  misc_feature (1)..(173): Homolog of NCBI NO: 11357727 NR Description: hypothetical protein F2G14_50 - Arabidopsis
  misc_feature (1)..(173): Homolog of NCBI NO: 30685124 NR Description: leaf senescence-associated protein (SAG101)
  misc_feature (1)..(173): Homolog of NCBI NO: 8699168 NR Description: SAG101 [Arabidopsis thaliana]
  misc_feature (1)..(173): Homolog of NCBI NO: 8699170 NR Description: SAG101 [Arabidopsis thaliana]
MVAEAELKPQTEGAAFRTRWLFGGTNYRRMFEPLDIAEYYANGGKDYEAKGRSRHYIVLQEWLEEDKKEKSNSNSTNKKDVESILTFDSCFWAHVEEAILSCKVLKDEQSSVTEKEEETGKLLEFEKYVYGLLTKYEVSSEIFLRQSSYMIWWNQYKAIKGTSYNSALADFMSNPDHYNVLYIKGTYNFPPQA

SEQ ID NO: 53105 - DNA, 1150 bp, Glycine max
  misc_feature (1)..(1150): Ceres Seq. ID no. 14301403
aacaatttattagaaacatccaactttaaacatatttgtgattcactcttgcagtgtgttttcaataggaaaagttagcttttgagtttcttacagcattcaattatattgaaatttatagattgccatgctaacctgttcaagtccactattctacagtgcaaagccaggattttttcatgaggaaaatcgtgccaccctatttgaggttgtgcctgagactggaatgctactcaatacagataatggctctcctataccccaggtgggtaatacctcagcaaggctattcacagaagcaaagaatcatgcttgtccagttttccagggaggcaatgtttctcatctgcataaactgctttccattgaatcaagttcacaggttctctatgttggggatcacatttatggagatatactacgcagcaaaaaggttcttggatggagaacaatgcttgtaatcccagagctggagaaggaggttaaactactctgggaatctagggatacccgcaaggaacttcaattcttgaggagtgagcgtgactgcattgaggatgaaatacatcatttgaaatggtctctcaaattcaagaatccagatgctgattccaagcagaagttatcttctgaacttgataaattaaagcttgaaagagagagagtgcgattaagtcatcaagaagctcagaaaaaattacatcaaaggtttcacgagccatggggacagcttatgaaaactggttatcagaattctcgctttgctcatcaggttgagagatttgcttgcctttatactagtcaagtatctaacctgggcttatactctccagacaagtattacagacctagtgaagatttcatgcaacatgaatttggcattatggcttgtgagacgccagacatttaagttgaggaatttggggtagtttggatttggaaaccgaattgccgaattctgctctgcccagtgttcagtgttcctggttctcatctcccttctctgttttgttggctttggacagagctccgtttagtaattgatctctccccctcccccccaaagaaaagaaaaagaaaaaattgctatatagtattatttttaacgtttgctacagtgggtaaaaaatactagattttagcgttgtat

SEQ ID NO: 53106 - protein, 260 aa, Glycine max
  peptide (1)..(260): Ceres Seq. ID no. 14301404
  misc_feature (11)..(253): Pfam Name: 5' nucleotidase family Pfam Description: 5' nucleotidase family
  misc_feature (165)..(249): Homolog of NCBI NO: 12841987 NR Description: unnamed protein product [Mus musculus]
  misc_feature (10)..(165): Homolog of NCBI NO: 31560044 NR Description: 5'-nucleotidase, cytosolic II [Mus musculus]
  misc_feature (10)..(165): Homolog of NCBI NO: 34863770 NR Description: similar to Cytosolic purine 5-nucleotidase
  misc_feature (10)..(165): Homolog of NCBI NO: 12841987 NR Description: unnamed protein product [Mus musculus]
  misc_feature (65)..(249): Homolog of NCBI NO: 17064896 NR Description: Unknown protein [Arabidopsis thaliana]
  misc_feature (65)..(249): Homolog of NCBI NO: 22327657 NR Description: expressed protein [Arabidopsis thaliana]
  misc_feature (11)..(75): Homolog of NCBI NO: 25353625 NR Description: hypothetical protein F22H5.7 [imported] -
  misc_feature (106)..(253): Homolog of NCBI NO: 25353625 NR Description: hypothetical protein F22H5.7 [imported] -
  misc_feature (11)..(253): Homolog of NCBI NO: 34915208 NR Description: putative N5'-nucleotidase
  misc_feature (11)..(253): Homolog of NCBI NO: 22330644 NR Description: cytosolic IMP-GMP specific 5'-nucleotidase
MLTCSSPLFYSAKPGFFHEENRATLFEVVPETGMLLNTDNGSPIPQVGNTSARLFTEAKNHACPVFQGGNVSHLHKLLSIESSSQVLYVGDHIYGDILRSKKVLGWRTMLVIPELEKEVKLLWESRDTRKELQFLRSERDCIEDEIHHLKWSLKFKNPDADSKQKLSSELDKLKLERERVRLSHQEAQKKLHQRFHEPWGQLMKTGYQNSRFAHQVERFACLYTSQVSNLGLYSPDKYYRPSEDFMQHEFGIMACETPDI

SEQ ID NO: 53107 - protein, 227 aa, Glycine max
  peptide (1)..(227): Ceres Seq. ID no. 14301405
  misc_feature (1)..(220): Pfam Name: 5' nucleotidase family Pfam Description: 5' nucleotidase family
  misc_feature (132)..(216): Homolog of NCBI NO: 12841987 NR Description: unnamed protein product [Mus musculus]
  misc_feature (1)..(132): Homolog of NCBI NO: 31560044 NR Description: 5'-nucleotidase, cytosolic II [Mus musculus]
  misc_feature (1)..(132): Homolog of NCBI NO: 34863770 NR Description: similar to Cytosolic purine 5-nucleotidase
  misc_feature (1)..(132): Homolog of NCBI NO: 12841987 NR Description: unnamed protein product [Mus musculus]
  misc_feature (32)..(216): Homolog of NCBI NO: 17064896 NR Description: Unknown protein [Arabidopsis thaliana]
  misc_feature (32)..(216): Homolog of NCBI NO: 22327657 NR Description: expressed protein [Arabidopsis thaliana]
  misc_feature (1)..(42): Homolog of NCBI NO: 25353625 NR Description: hypothetical protein F22H5.7 [imported] -
  misc_feature (73)..(220): Homolog of NCBI NO: 25353625 NR Description: hypothetical protein F22H5.7 [imported] -
  misc_feature (1)..(220): Homolog of NCBI NO: 34915208 NR Description: putative N5'-nucleotidase
  misc_feature (1)..(220): Homolog of NCBI NO: 22330644 NR Description: cytosolic IMP-GMP specific 5'-nucleotidase
MLLNTDNGSPIPQVGNTSARLFTEAKNHACPVFQGGNVSHLHKLLSIESSSQVLYVGDHIYGDILRSKKVLGWRTMLVIPELEKEVKLLWESRDTRKELQFLRSERDCIEDEIHHLKWSLKFKNPDADSKQKLSSELDKLKLERERVRLSHQEAQKKLHQRFHEPWGQLMKTGYQNSRFAHQVERFACLYTSQVSNLGLYSPDKYYRPSEDFMQHEFGIMACETPDI

SEQ ID NO: 53108 - protein, 152 aa, Glycine max
  peptide (1)..(152): Ceres Seq. ID no. 14301406
  misc_feature (1)..(145): Pfam Name: 5' nucleotidase family Pfam Description: 5' nucleotidase family
  misc_feature (57)..(141): Homolog of NCBI NO: 31560044 NR Description: 5'-nucleotidase, cytosolic II [Mus musculus]
  misc_feature (57)..(141): Homolog of NCBI NO: 12841987 NR Description: unnamed protein product [Mus musculus]
  misc_feature (1)..(57): Homolog of NCBI NO: 34863770 NR Description: similar to Cytosolic purine 5-nucleotidase
  misc_feature (1)..(57): Homolog of NCBI NO: 31560044 NR Description: 5'-nucleotidase, cytosolic II [Mus musculus]
  misc_feature (1)..(57): Homolog of NCBI NO: 12841987 NR Description: unnamed protein product [Mus musculus]
  misc_feature (1)..(141): Homolog of NCBI NO: 17064896 NR Description: Unknown protein [Arabidopsis thaliana]
  misc_feature (1)..(141): Homolog of NCBI NO: 22327657 NR Description: expressed protein [Arabidopsis thaliana]
  misc_feature (1)..(145): Homolog of NCBI NO: 25353625 NR Description: hypothetical protein F22H5.7 [imported] -
  misc_feature (1)..(145): Homolog of NCBI NO: 34915208 NR Description: putative N5'-nucleotidase
  misc_feature (1)..(145): Homolog of NCBI NO: 22330644 NR Description: cytosolic IMP-GMP specific 5'-nucleotidase
MLVIPELEKEVKLLWESRDTRKELQFLRSERDCIEDEIHHLKWSLKFKNPDADSKQKLSSELDKLKLERERVRLSHQEAQKKLHQRFHEPWGQLMKTGYQNSRFAHQVERFACLYTSQVSNLGLYSPDKYYRPSEDFMQHEFGIMACETPDI

SEQ ID NO: 53109 - DNA, 1219 bp, Glycine max
  misc_feature (1)..(1219): Ceres Seq. ID no. 14315662
tttcaaactcactacttcgcggccttcccaattctcagctcctcctcgttactcatgctctgtaaaaaagataaaagcttccggaagtcagcaaacaggatccatacgacatggagacaaccttgatgcaacgaagagcaggagtttgctggagaagtttcagaggaaaatgccaatggaattccttagcacccttttcaacaaacaatctatgttgagtgactttacaaccaaagatattgtagatggggaaagatcatccaaatgggtttcagcattcctctttggacaaactatatcagtgatttctcctgatgtttcatatgcaagcagctcagcaagaataaatgagatatatgaggttggagagttgtttgatttaagcatccaactaatatacttggtattgctattaggtttgctagggactggaactttctttgtgattcgtcaagttcttgtccgcagagaacttgacctatctgccaaagagttgcaggagcaagtaagaagtggtgatgctggtgcaactgagctttttgaacttggtgcagtgatgctgcgcaggaaattttaccctgctgctaccaagttcttgcttcaagcaattgagaaatgggatggggataatccggatcttgcccaggtttacaacgctcttggtgtgagctatgtccgcgatgggaaagttgacaaaggaattgctcagtttgagacagctgtcaagcttcaaccaggccatgtcacagcttggaacaatctcggtgatgcctttgagagtaaaaaggactacaagtctgctctaaaggcatttgaagaagtcctactatttgatcctaacaacaaggttgcccggcctaggagagattctttgaagggacttgttgatgcaaccaaaggagttactgtcatcaagtcaacagagaagaagtgagtgtcattgtatcaactcactatgaatatggcattgttaaatacatagttttcaataacttggttgtgttggaaggaattttggctctattggtgtagttactgcttactagctgaggcatactagtgctgcgaaatgtagttgaaattgaaacttgaaagtgctcgattctccaatgggttaccaaagctttgctctggtgctgatggtgtattcacttgtgaaaattcctttatttttttaaatggtcattttcgtgccttgttaaaaaaaaaaaaaaaaaat

SEQ ID NO: 53110 - protein, 310 aa, Glycine max
  peptide (1)..(310): Ceres Seq. ID no. 14315663
  misc_feature (248)..(281): Pfam Name: TPR Domain Pfam Description: TPR Domain
  misc_feature (126)..(292): Homolog of NCBI NO: 23042213 NR Description: hypothetical protein [Trichodesmium erythraeum
  misc_feature (126)..(297): Homolog of NCBI NO: 23129236 NR Description: hypothetical protein [Nostoc punctiforme]
  misc_feature (128)..(292): Homolog of NCBI NO: 22299949 NR Description: photosystem I assembly related protein
  misc_feature (109)..(216): Homolog of NCBI NO: 38636894 NR Description: stress inducible protein-like
  misc_feature (109)..(216): Homolog of NCBI NO: 37535100 NR Description: unknown protein [Oryza sativa (japonica
  misc_feature (109)..(310): Homolog of NCBI NO: 37535090 NR Description: putative stress inducible protein
  misc_feature (91)..(309): Homolog of NCBI NO: 21537104 NR Description: unknown [Arabidopsis thaliana]
  misc_feature (79)..(309): Homolog of NCBI NO: 7487355 NR Description: hypothetical protein T22J18.13 - Arabidopsis
  misc_feature (91)..(309): Homolog of NCBI NO: 30687988 NR Description: tetratricopeptide repeat (TPR)-containing protein
  misc_feature (91)..(309): Homolog of NCBI NO: 22329737 NR Description: tetratricopeptide repeat (TPR)-containing protein
FKLTTSRPSQFSAPPRYSCSVKKIKASGSQQTGSIRHGDNLDATKSRSLLEKFQRKMPMEFLSTLFNKQSMLSDFTTKDIVDGERSSKWVSAFLFGQTISVISPDVSYASSSARINEIYEVGELFDLSIQLIYLVLLLGLLGTGTFFVIRQVLVRRELDLSAKELQEQVRSGDAGATELFELGAVMLRRKFYPAATKFLLQAIEKWDGDNPDLAQVYNALGVSYVRDGKVDKGIAQFETAVKLQPGHVTAWNNLGDAFESKKDYKSALKAFEEVLLFDPNNKVARPRRDSLKGLVDATKGVTVIKSTEKK

SEQ ID NO: 53111 - protein, 254 aa, Glycine max
  peptide (1)..(254): Ceres Seq. ID no. 14315664
  misc_feature (192)..(225): Pfam Name: TPR Domain Pfam Description: TPR Domain
  misc_feature (70)..(236): Homolog of NCBI NO: 23042213 NR Description: hypothetical protein [Trichodesmium erythraeum
  misc_feature (70)..(241): Homolog of NCBI NO: 23129236 NR Description: hypothetical protein [Nostoc punctiforme]
  misc_feature (72)..(236): Homolog of NCBI NO: 22299949 NR Description: photosystem I assembly related protein
  misc_feature (53)..(160): Homolog of NCBI NO: 38636894 NR Description: stress inducible protein-like
  misc_feature (53)..(160): Homolog of NCBI NO: 37535100 NR Description: unknown protein [Oryza sativa (japonica
  misc_feature (53)..(254): Homolog of NCBI NO: 37535090 NR Description: putative stress inducible protein
  misc_feature (35)..(253): Homolog of NCBI NO: 21537104 NR Description: unknown [Arabidopsis thaliana]
  misc_feature (23)..(253): Homolog of NCBI NO: 7487355 NR Description: hypothetical protein T22J18.13 - Arabidopsis
  misc_feature (35)..(253): Homolog of NCBI NO: 30687988 NR Description: tetratricopeptide repeat (TPR)-containing protein
  misc_feature (35)..(253): Homolog of NCBI NO: 22329737 NR Description: tetratricopeptide repeat (TPR)-containing protein
MPMEFLSTLFNKQSMLSDFTTKDIVDGERSSKWVSAFLFGQTISVISPDVSYASSSARINEIYEVGELFDLSIQLIYLVLLLGLLGTGTFFVIRQVLVRRELDLSAKELQEQVRSGDAGATELFELGAVMLRRKFYPAATKFLLQAIEKWDGDNPDLAQVYNALGVSYVRDGKVDKGIAQFETAVKLQPGHVTAWNNLGDAFESKKDYKSALKAFEEVLLFDPNNKVARPRRDSLKGLVDATKGVTVIKSTEKK

SEQ ID NO: 53112 - protein, 252 aa, Glycine max
  peptide (1)..(252): Ceres Seq. ID no. 14315665
  misc_feature (190)..(223): Pfam Name: TPR Domain Pfam Description: TPR Domain
  misc_feature (68)..(234): Homolog of NCBI NO: 23042213 NR Description: hypothetical protein [Trichodesmium erythraeum
  misc_feature (68)..(239): Homolog of NCBI NO: 23129236 NR Description: hypothetical protein [Nostoc punctiforme]
  misc_feature (70)..(234): Homolog of NCBI NO: 22299949 NR Description: photosystem I assembly related protein
  misc_feature (51)..(158): Homolog of NCBI NO: 38636894 NR Description: stress inducible protein-like
  misc_feature (51)..(158): Homolog of NCBI NO: 37535100 NR Description: unknown protein [Oryza sativa (japonica
  misc_feature (51)..(252): Homolog of NCBI NO: 37535090 NR Description: putative stress inducible protein
  misc_feature (33)..(251): Homolog of NCBI NO: 21537104 NR Description: unknown [Arabidopsis thaliana]
  misc_feature (21)..(251): Homolog of NCBI NO: 7487355 NR Description: hypothetical protein T22J18.13 - Arabidopsis
  misc_feature (33)..(251): Homolog of NCBI NO: 30687988 NR Description: tetratricopeptide repeat (TPR)-containing protein
  misc_feature (33)..(251): Homolog of NCBI NO: 22329737 NR Description: tetratricopeptide repeat (TPR)-containing protein
MEFLSTLFNKQSMLSDFTTKDIVDGERSSKWVSAFLFGQTISVISPDVSYASSSARINEIYEVGELFDLSIQLIYLVLLLGLLGTGTFFVIRQVLVRRELDLSAKELQEQVRSGDAGATELFELGAVMLRRKFYPAATKFLLQAIEKWDGDNPDLAQVYNALGVSYVRDGKVDKGIAQFETAVKLQPGHVTAWNNLGDAFESKKDYKSALKAFEEVLLFDPNNKVARPRRDSLKGLVDATKGVTVIKSTEKK

SEQ ID NO: 53113 - DNA, 1245 bp, Glycine max
  misc_feature (1)..(1245): Ceres Seq. ID no. 14310701
gaacaacaccaaaaaaaatggcacttgtgagccacgtttgtgtgagatgtgtagccacacccacttccccagagtccccaaattcggcacccttgccagacccaaggcaaaccaaggttctccttccgaagaagaagcctcagaaatggtccaccggggtggctcccggggagtacggtggccctcccaccaccaccaaactccgcaaatactggggcggcgatgacgaagaccctttggcctctgatgactatatgtggaacaaggagtttatgggtcgcttccaaaagttgattgaggaacccaatgctcaaccccctcctgcaaaggaagagccttcagggtttctaagcttaaatagagtcatgagcctggacagtttggaagttgatttgagcaaagaactcgcagctcctgtaaatcataatgcacacctgcaaattgatgcagaaactaatgtgacaggaagcaatagggtaagatataaatcagcaccaacacgtcgtgagcaagaaaaatgggatagagctaccaaggccgcaactggaggcagtgatgtgatgttccgggaaataaggcagtctcgtgaagatccaaaagttttggctgctcaagctgaggagcagtataataagttaaagaggaagttgcaaatctttaccttgggtataggtggtgttggtctggtttcagcttatgtttcttattcccctgagattgcagctagctttggtgctggctttcttggttctttggcgtatattcgtatgctgggaagtagcgtggactcgctaaggactgatggtgcaaagggatttgtcaagggagcaattgggcagccaagattactggttcctgttgttttggtcatggtctataaccgctggaatgcgattctggttccagaatttggatctatgcacttagaattgataccaatgctagtaggttttttcacatacaagattgcaacttttgctcaagctatagaggaggcaattactgtagctacaagaaagacctgaagaatattaggggtggagggggaggatgccatgtcattatatttgggtttttctctcccacatattgaacatataattgtatttatgtttttccatatttggattattgattataatatccagatatttggtcttaagtcttctctcccacaataagcacatatcgacttcatttttttcatatttacgatcagtgatatcaagggacacaattaaattc

SEQ ID NO: 53114 - protein, 340 aa, Glycine max
  peptide (1)..(340): Ceres Seq. ID no. 14310702
  misc_feature (207)..(332): Homolog of NCBI NO: 17227507 NR Description: ATP synthase subunit 1 [Nostoc sp. PCC 7120]
  misc_feature (207)..(333): Homolog of NCBI NO: 23043223 NR Description: hypothetical protein [Trichodesmium erythraeum
  misc_feature (208)..(336): Homolog of NCBI NO: 114706 NR Description: ATP synthase protein I
  misc_feature (190)..(332): Homolog of NCBI NO: 33863740 NR Description: possible H+-transporting ATP synthase
  misc_feature (18)..(107): Homolog of NCBI NO: 34911056 NR Description: P0007F06.23 [Oryza sativa (japonica
  misc_feature (153)..(340): Homolog of NCBI NO: 34911056 NR Description: P0007F06.23 [Oryza sativa (japonica
  misc_feature (6)..(339): Homolog of NCBI NO: 18402535 NR Description: expressed protein [Arabidopsis thaliana]
  misc_feature (6)..(339): Homolog of NCBI NO: 21593011 NR Description: unknown [Arabidopsis thaliana]
TTPKKMALVSHVCVRCVATPTSPESPNSAPLPDPRQTKVLLPKKKPQKWSTGVAPGEYGGPPTTTKLRKYWGGDDEDPLASDDYMWNKEFMGRFQKLIEEPNAQPPPAKEEPSGFLSLNRVMSLDSLEVDLSKELAAPVNHNAHLQIDAETNVTGSNRVRYKSAPTRREQEKWDRATKAATGGSDVMFREIRQSREDPKVLAAQAEEQYNKLKRKLQIFTLGIGGVGLVSAYVSYSPEIAASFGAGFLGSLAYIRMLGSSVDSLRTDGAKGFVKGAIGQPRLLVPVVLVMVYNRWNAILVPEFGSMHLELIPMLVGFFTYKIATFAQAIEEAITVATRKT

SEQ ID NO: 53115 - protein, 335 aa, Glycine max
  peptide (1)..(335): Ceres Seq. ID no. 14310703
  misc_feature (202)..(327): Homolog of NCBI NO: 17227507 NR Description: ATP synthase subunit 1 [Nostoc sp. PCC 7120]
  misc_feature (202)..(328): Homolog of NCBI NO: 23043223 NR Description: hypothetical protein [Trichodesmium erythraeum
  misc_feature (203)..(331): Homolog of NCBI NO: 114706 NR Description: ATP synthase protein I
  misc_feature (185)..(327): Homolog of NCBI NO: 33863740 NR Description: possible H+-transporting ATP synthase
  misc_feature (13)..(102): Homolog of NCBI NO: 34911056 NR Description: P0007F06.23 [Oryza sativa (japonica
  misc_feature (148)..(335): Homolog of NCBI NO: 34911056 NR Description: P0007F06.23 [Oryza sativa (japonica
  misc_feature (1)..(334): Homolog of NCBI NO: 18402535 NR Description: expressed protein [Arabidopsis thaliana]
  misc_feature (1)..(334): Homolog of NCBI NO: 21593011 NR Description: unknown [Arabidopsis thaliana]
MALVSHVCVRCVATPTSPESPNSAPLPDPRQTKVLLPKKKPQKWSTGVAPGEYGGPPTTTKLRKYWGGDDEDPLASDDYMWNKEFMGRFQKLIEEPNAQPPPAKEEPSGFLSLNRVMSLDSLEVDLSKELAAPVNHNAHLQIDAETNVTGSNRVRYKSAPTRREQEKWDRATKAATGGSDVMFREIRQSREDPKVLAAQAEEQYNKLKRKLQIFTLGIGGVGLVSAYVSYSPEIAASFGAGFLGSLAYIRMLGSSVDSLRTDGAKGFVKGAIGQPRLLVPVVLVMVYNRWNAILVPEFGSMHLELIPMLVGFFTYKIATFAQAIEEAITVATRKT

SEQ ID NO: 53116 - protein, 256 aa, Glycine max
  peptide (1)..(256): Ceres Seq. ID no. 14310704
  misc_feature (123)..(248): Homolog of NCBI NO: 17227507 NR Description: ATP synthase subunit 1 [Nostoc sp. PCC 7120]
  misc_feature (123)..(249): Homolog of NCBI NO: 23043223 NR Description: hypothetical protein [Trichodesmium erythraeum
  misc_feature (124)..(252): Homolog of NCBI NO: 114706 NR Description: ATP synthase protein I
  misc_feature (106)..(248): Homolog of NCBI NO: 33863740 NR Description: possible H+-transporting ATP synthase
  misc_feature (1)..(23): Homolog of NCBI NO: 34911056 NR Description: P0007F06.23 [Oryza sativa (japonica
  misc_feature (69)..(256): Homolog of NCBI NO: 34911056 NR Description: P0007F06.23 [Oryza sativa (japonica
  misc_feature (1)..(255): Homolog of NCBI NO: 18402535 NR Description: expressed protein [Arabidopsis thaliana]
  misc_feature (1)..(255): Homolog of NCBI NO: 21593011 NR Description: unknown [Arabidopsis thaliana]
MWNKEFMGRFQKLIEEPNAQPPPAKEEPSGFLSLNRVMSLDSLEVDLSKELAAPVNHNAHLQIDAETNVTGSNRVRYKSAPTRREQEKWDRATKAATGGSDVMFREIRQSREDPKVLAAQAEEQYNKLKRKLQIFTLGIGGVGLVSAYVSYSPEIAASFGAGFLGSLAYIRMLGSSVDSLRTDGAKGFVKGAIGQPRLLVPVVLVMVYNRWNAILVPEFGSMHLELIPMLVGFFTYKIATFAQAIEEAITVATRKT

SEQ ID NO: 53117 - DNA, 1559 bp, Glycine max
  misc_feature (1)..(1559): Ceres Seq. ID no. 14306538
agaaatagagagtaagcctgagatcatggaaaaagttggtgtggctgtaaatagcaaaaatcaagaatccaaagcaacttccaccattaccattaagggtttcatgagccttctaatgaaaagtgtagatgagaatggtgatggtagcaagagagttatttctctgggtatgggtgacccaactctcaccacttattttcccatctcaaatgtagctgaaaaagctgttgctgaagcacttcagtcacacaggtttcgtgactatgctcccactgcaggtcttccacaggccaggattgcaattgctgaatacctgtctcgtgaccttccttaccaattatcaagtgatgatgtttacatcacttgtggatgcacacaagccattgatgtttcagtggcgatgcttgctcgccccggtgcaaacatcattcttccaagaccaggtttcccactctatgaacttagcgcttcatttagaggagttgaagtgaggcattatgatctgcttccagagaaaggttgggaggttgatctagatgctgttgaagctcttgctgatcagaacactgttgctttggtgattataaatcctgggaatccttgtgggaatgtgtacagttaccatcatttggagaagattgctgaaactgcaaaacgggttggaacaattgtgattgctgatgaagtttatggccatcttgcatttgcgggcaagccttttgtgccaatgggagtttttggctctattgttcctgttctgactcttggctcattttctaagagatggatagttcctggatggaggcttagttggtttgtgacaaatgatccatctggcacttttagaaatccaaaggtagatgagcgctttaaaaagtactttgatcttttgggaggtccagccaccttcatccaggcagctgtacctcagataattgagcatactgaaaaggttttcttcaagaaaaccattgataatttgaggcatgttgcagatatatgttgtaaagagttgaaggatattccatacattatttgcccttataaaccagaagggtccatggctatgatggtgaaactaaacctttcacttctggaggatattagcgatgatattgatttctgtttcaagcttgctaaggaggaatctgttatcattcttccaggaactgcggtagggctgaataattggcttcgtattattttcgctacagatccagttgctcttgtagagggtttgaagagggtaaaatctttttgtgaaagacatgcaagaaagtggtcaatgactacagaataaaatccacaaattaaggcggctactattttgtattgaatacctagcttctcaaatatccaatttttacaaaattggatcgttttacgaataattgggttctcaaatatccatttttttgtgccagctctagtttatcactagcttttaaggaaggattctccaagtatctaggtgtttatcaattggtatttgtgtttattgttgtatctaaaaaattatatattttaaataattttgtgacgctatatattaatcaggt

SEQ ID NO: 53118 - protein, 432 aa, Glycine max
  peptide (1)..(432): Ceres Seq. ID no. 14306539
  misc_feature (103)..(419): Pfam Name: Aminotransferase class I and II Pfam Description: Aminotransferase class I and II
  misc_feature (20)..(432): Homolog of NCBI NO: 11527941 NR Description: ROOTY/SUPERROOT1 [Arabidopsis thaliana]
  misc_feature (20)..(432): Homolog of NCBI NO: 11527943 NR Description: ROOTY/SUPERROOT1 [Arabidopsis thaliana]
  misc_feature (30)..(429): Homolog of NCBI NO: 6469090 NR Description: nicotianamine aminotransferase [Hordeum vulgare
  misc_feature (27)..(426): Homolog of NCBI NO: 6469087 NR Description: nicotianamine aminotransferase B [Hordeum vulgare
  misc_feature (20)..(425): Homolog of NCBI NO: 8777301 NR Description: tyrosine aminotransferase-like protein
  misc_feature (27)..(426): Homolog of NCBI NO: 6469089 NR Description: nicotianamine aminotransferase [Hordeum vulgare
  misc_feature (30)..(429): Homolog of NCBI NO: 6498122 NR Description: nicotianamine aminotransferase A [Hordeum vulgare
  misc_feature (21)..(424): Homolog of NCBI NO: 27525396 NR Description: tyrosine aminotransferase [Solenostemon
  misc_feature (26)..(425): Homolog of NCBI NO: 23397279 NR Description: putatative tyrosine aminotransferase [Arabidopsis
  misc_feature (26)..(425): Homolog of NCBI NO: 15239521 NR Description: aminotransferase, putative [Arabidopsis thaliana]
EIESKPEIMEKVGVAVNSKNQESKATSTITIKGFMSLLMKSVDENGDGSKRVISLGMGDPTLTTYFPISNVAEKAVAEALQSHRFRDYAPTAGLPQARIAIAEYLSRDLPYQLSSDDVYITCGCTQAIDVSVAMLARPGANIILPRPGFPLYELSASFRGVEVRHYDLLPEKGWEVDLDAVEALADQNTVALVIINPGNPCGNVYSYHHLEKIAETAKRVGTIVIADEVYGHLAFAGKPFVPMGVFGSIVPVLTLGSFSKRWIVPGWRLSWFVTNDPSGTFRNPKVDERFKKYFDLLGGPATFIQAAVPQIIEHTEKVFFKKTIDNLRHVADICCKELKDIPYIICPYKPEGSMAMMVKLNLSLLEDISDDIDFCFKLAKEESVIILPGTAVGLNNWLRIIFATDPVALVEGLKRVKSFCERHARKWSMTTE

SEQ ID NO: 53119 - protein, 424 aa, Glycine max
  peptide (1)..(424): Ceres Seq. ID no. 14306540
  misc_feature (95)..(411): Pfam Name: Aminotransferase class I and II Pfam Description: Aminotransferase class I and II
  misc_feature (12)..(424): Homolog of NCBI NO: 11527941 NR Description: ROOTY/SUPERROOT1 [Arabidopsis thaliana]
  misc_feature (12)..(424): Homolog of NCBI NO: 11527943 NR Description: ROOTY/SUPERROOT1 [Arabidopsis thaliana]
  misc_feature (22)..(421): Homolog of NCBI NO: 6469090 NR Description: nicotianamine aminotransferase [Hordeum vulgare
  misc_feature (19)..(418): Homolog of NCBI NO: 6469087 NR Description: nicotianamine aminotransferase B [Hordeum vulgare
  misc_feature (12)..(417): Homolog of NCBI NO: 8777301 NR Description: tyrosine aminotransferase-like protein
  misc_feature (19)..(418): Homolog of NCBI NO: 6469089 NR Description: nicotianamine aminotransferase [Hordeum vulgare
  misc_feature (22)..(421): Homolog of NCBI NO: 6498122 NR Description: nicotianamine aminotransferase A [Hordeum vulgare
  misc_feature (13)..(416): Homolog of NCBI NO: 27525396 NR Description: tyrosine aminotransferase [Solenostemon
  misc_feature (18)..(417): Homolog of NCBI NO: 23397279 NR Description: putatative tyrosine aminotransferase [Arabidopsis
  misc_feature (18)..(417): Homolog of NCBI NO: 15239521 NR Description: aminotransferase, putative [Arabidopsis thaliana]
MEKVGVAVNSKNQESKATSTITIKGFMSLLMKSVDENGDGSKRVISLGMGDPTLTTYFPISNVAEKAVAEALQSHRFRDYAPTAGLPQARIAIAEYLSRDLPYQLSSDDVYITCGCTQAIDVSVAMLARPGANIILPRPGFPLYELSASFRGVEVRHYDLLPEKGWEVDLDAVEALADQNTVALVIINPGNPCGNVYSYHHLEKIAETAKRVGTIVIADEVYGHLAFAGKPFVPMGVFGSIVPVLTLGSFSKRWIVPGWRLSWFVTNDPSGTFRNPKVDERFKKYFDLLGGPATFIQAAVPQIIEHTEKVFFKKTIDNLRHVADICCKELKDIPYIICPYKPEGSMAMMVKLNLSLLEDISDDIDFCFKLAKEESVIILPGTAVGLNNWLRIIFATDPVALVEGLKRVKSFCERHARKWSMTTE

SEQ ID NO: 53120 - protein, 398 aa, Glycine max
  peptide (1)..(398): Ceres Seq. ID no. 14306541
  misc_feature (69)..(385): Pfam Name: Aminotransferase class I and II Pfam Description: Aminotransferase class I and II
  misc_feature (1)..(398): Homolog of NCBI NO: 11527941 NR Description: ROOTY/SUPERROOT1 [Arabidopsis thaliana]
  misc_feature (1)..(398): Homolog of NCBI NO: 11527943 NR Description: ROOTY/SUPERROOT1 [Arabidopsis thaliana]
  misc_feature (1)..(395): Homolog of NCBI NO: 6469090 NR Description: nicotianamine aminotransferase [Hordeum vulgare
  misc_feature (1)..(392): Homolog of NCBI NO: 6469087 NR Description: nicotianamine aminotransferase B [Hordeum vulgare
  misc_feature (1)..(391): Homolog of NCBI NO: 8777301 NR Description: tyrosine aminotransferase-like protein
  misc_feature (1)..(392): Homolog of NCBI NO: 6469089 NR Description: nicotianamine aminotransferase [Hordeum vulgare
  misc_feature (1)..(395): Homolog of NCBI NO: 6498122 NR Description: nicotianamine aminotransferase A [Hordeum vulgare
  misc_feature (1)..(390): Homolog of NCBI NO: 27525396 NR Description: tyrosine aminotransferase [Solenostemon
  misc_feature (1)..(391): Homolog of NCBI NO: 23397279 NR Description: putatative tyrosine aminotransferase [Arabidopsis
  misc_feature (1)..(391): Homolog of NCBI NO: 15239521 NR Description: aminotransferase, putative [Arabidopsis thaliana]
MSLLMKSVDENGDGSKRVISLGMGDPTLTTYFPISNVAEKAVAEALQSHRFRDYAPTAGLPQARIAIAEYLSRDLPYQLSSDDVYITCGCTQAIDVSVAMLARPGANIILPRPGFPLYELSASFRGVEVRHYDLLPEKGWEVDLDAVEALADQNTVALVIINPGNPCGNVYSYHHLEKIAETAKRVGTIVIADEVYGHLAFAGKPFVPMGVFGSIVPVLTLGSFSKRWIVPGWRLSWFVTNDPSGTFRNPKVDERFKKYFDLLGGPATFIQAAVPQIIEHTEKVFFKKTIDNLRHVADICCKELKDIPYIICPYKPEGSMAMMVKLNLSLLEDISDDIDFCFKLAKEESVIILPGTAVGLNNWLRIIFATDPVALVEGLKRVKSFCERHARKWSMTTE

SEQ ID NO: 53121 - DNA, 1334 bp, Glycine max
  misc_feature (1)..(1334): Ceres Seq. ID no. 14306553
acacgccaattctaatcagcaggatcattccaatatgggcaacagaattgttatgggaaattcccttctctttatctctttcttcatcttcagctttagtttcttggaggctcaaaaggctccagcagtttatgtgtttggagactcacttgttgatgttggcaacaacaattacttgagtctctccattgaaaaggcaattcttcctcactatggcattgattttccaactaagaaacccactgggagatttagcaatggcaagaatgctgcagatttaattgctgaaaacttgggcctacctacttctccaccttatctctccctagtatctaaggtccacaacaacaacaagaagaacgtatctttcttgggtggtgttaattttgcctccggaggtgctggaatatttaatgcctcagataaaggatttaggcaatcaatacctttgccaaagcaagtggactactactcacaagtgcatgaacaactgatacaacaaataggagcatctactctcgggaaacacctctcaaagtccatcttcattgtggtgattggtggcaatgatatctttggttactttgactcaaaggatcttcaaaagaaaaacacccctcagcagtacgtggattccatggcttccacattaaaagtgcaactacagagattatacaacaatggtgcaaagaaatttgagattgctggtgttggtgcaattgggtgctgccctgcatacagggtcaagaacaaaacagaatgtgtttctgaagccaatgacttgtcggttaaatataatgaagctcttcaatccatgttaaaggaatggcaattggagaacaaagacataagttactcttactttgatacttatgctgccatccaagaccttgttcacaatccagcttcttacggatttgctaatgtgaaagctgcatgttgtggacttggtgagttgaatgcccaaattccatgcctgccaatttcgagcatttgttccaatagaaaagaccatattttctgggatgcattccatcctacagaggcagctgctcgcatctttgtggatgaaatttttaatggaccttcaaaatacatatctcctattaatatggaacagttactggccatttgaattggcaaataaattagtcacttagtcctttgtaatgtgctttccttttttgtggggttacttgttatcaagcaacacactggaacccaaaaaatgaagagaaaaaaaaacatcttattagattaaacatttggattaatctaattgtacgaaagagtgagtttatgaacttttagctcaagtgatttattttatattt

SEQ ID NO: 53122 - protein, 377 aa, Glycine max
  peptide (1)..(377): Ceres Seq. ID no. 14306554
  misc_feature (146)..(358): Pfam Name: GDSL-like Lipase/Acylhydrolase Pfam Description: GDSL-like Lipase/Acylhydrolase
  misc_feature (5)..(377): Homolog of NCBI NO: 28071322 NR Description: P0705A05.30 [Oryza sativa (japonica
  misc_feature (25)..(377): Homolog of NCBI NO: 15229265 NR Description: GDSL-motif lipase/hydrolase protein [Arabidopsis
  misc_feature (39)..(374): Homolog of NCBI NO: 15220512 NR Description: GDSL-motif lipase/hydrolase protein [Arabidopsis
  misc_feature (39)..(374): Homolog of NCBI NO: 21594055 NR Description: lipase/hydrolase, putative [Arabidopsis thaliana]
  misc_feature (22)..(368): Homolog of NCBI NO: 30693137 NR Description: lipase family [Arabidopsis thaliana]
  misc_feature (22)..(368): Homolog of NCBI NO: 21537293 NR Description: GDSL-motif lipase/hydrolase-like protein
  misc_feature (22)..(374): Homolog of NCBI NO: 15229742 NR Description: GDSL-motif lipase/hydrolase protein [Arabidopsis
  misc_feature (13)..(377): Homolog of NCBI NO: 29837765 NR Description: putative GDSL-like lipase/acylhydrolase
  misc_feature (22)..(376): Homolog of NCBI NO: 15240452 NR Description: GDSL-motif lipase/hydrolase protein [Arabidopsis
  misc_feature (146)..(377): Homolog of NCBI NO: 13161399 NR Description: CPRD47 [Vigna unguiculata]
HANSNQQDHSNMGNRIVMGNSLLFISFFIFSFSFLEAQKAPAVYVFGDSLVDVGNNNYLSLSIEKAILPHYGIDFPTKKPTGRFSNGKNAADLIAENLGLPTSPPYLSLVSKVHNNNKKNVSFLGGVNFASGGAGIFNASDKGFRQSIPLPKQVDYYSQVHEQLIQQIGASTLGKHLSKSIFIVVIGGNDIFGYFDSKDLQKKNTPQQYVDSMASTLKVQLQRLYNNGAKKFEIAGVGAIGCCPAYRVKNKTECVSEANDLSVKYNEALQSMLKEWQLENKDISYSYFDTYAAIQDLVHNPASYGFANVKAACCGLGELNAQIPCLPISSICSNRKDHIFWDAFHPTEAAARIFVDEIFNGPSKYISPINMEQLLAI

SEQ ID NO: 53123 - protein, 366 aa, Glycine max
  peptide (1)..(366): Ceres Seq. ID no. 14306555
  misc_feature (135)..(347): Pfam Name: GDSL-like Lipase/Acylhydrolase Pfam Description: GDSL-like Lipase/Acylhydrolase
  misc_feature (1)..(366): Homolog of NCBI NO: 28071322 NR Description: P0705A05.30 [Oryza sativa (japonica
  misc_feature (14)..(366): Homolog of NCBI NO: 15229265 NR Description: GDSL-motif lipase/hydrolase protein [Arabidopsis
  misc_feature (28)..(363): Homolog of NCBI NO: 15220512 NR Description: GDSL-motif lipase/hydrolase protein [Arabidopsis
  misc_feature (28)..(363): Homolog of NCBI NO: 21594055 NR Description: lipase/hydrolase, putative [Arabidopsis thaliana]
  misc_feature (11)..(357): Homolog of NCBI NO: 30693137 NR Description: lipase family [Arabidopsis thaliana]
  misc_feature (11)..(357): Homolog of NCBI NO: 21537293 NR Description: GDSL-motif lipase/hydrolase-like protein
  misc_feature (11)..(363): Homolog of NCBI NO: 15229742 NR Description: GDSL-motif lipase/hydrolase protein [Arabidopsis
  misc_feature (2)..(366): Homolog of NCBI NO: 29837765 NR Description: putative GDSL-like lipase/acylhydrolase
  misc_feature (11)..(365): Homolog of NCBI NO: 15240452 NR Description: GDSL-motif lipase/hydrolase protein [Arabidopsis
  misc_feature (135)..(366): Homolog of NCBI NO: 13161399 NR Description: CPRD47 [Vigna unguiculata]
MGNRIVMGNSLLFISFFIFSFSFLEAQKAPAVYVFGDSLVDVGNNNYLSLSIEKAILPHYGIDFPTKKPTGRFSNGKNAADLIAENLGLPTSPPYLSLVSKVHNNNKKNVSFLGGVNFASGGAGIFNASDKGFRQSIPLPKQVDYYSQVHEQLIQQIGASTLGKHLSKSIFIVVIGGNDIFGYFDSKDLQKKNTPQQYVDSMASTLKVQLQRLYNNGAKKFEIAGVGAIGCCPAYRVKNKTECVSEANDLSVKYNEALQSMLKEWQLENKDISYSYFDTYAAIQDLVHNPASYGFANVKAACCGLGELNAQIPCLPISSICSNRKDHIFWDAFHPTEAAARIFVDEIFNGPSKYISPINMEQLLAI

SEQ ID NO: 53124 - protein, 360 aa, Glycine max
  peptide (1)..(360): Ceres Seq. ID no. 14306556
  misc_feature (129)..(341): Pfam Name: GDSL-like Lipase/Acylhydrolase Pfam Description: GDSL-like Lipase/Acylhydrolase
  misc_feature (1)..(360): Homolog of NCBI NO: 28071322 NR Description: P0705A05.30 [Oryza sativa (japonica
  misc_feature (8)..(360): Homolog of NCBI NO: 15229265 NR Description: GDSL-motif lipase/hydrolase protein [Arabidopsis
  misc_feature (22)..(357): Homolog of NCBI NO: 15220512 NR Description: GDSL-motif lipase/hydrolase protein [Arabidopsis
  misc_feature (22)..(357): Homolog of NCBI NO: 21594055 NR Description: lipase/hydrolase, putative [Arabidopsis thaliana]
  misc_feature (5)..(351): Homolog of NCBI NO: 30693137 NR Description: lipase family [Arabidopsis thaliana]
  misc_feature (5)..(351): Homolog of NCBI NO: 21537293 NR Description: GDSL-motif lipase/hydrolase-like protein
  misc_feature (5)..(357): Homolog of NCBI NO: 15229742 NR Description: GDSL-motif lipase/hydrolase protein [Arabidopsis
  misc_feature (1)..(360): Homolog of NCBI NO: 29837765 NR Description: putative GDSL-like lipase/acylhydrolase
  misc_feature (5)..(359): Homolog of NCBI NO: 15240452 NR Description: GDSL-motif lipase/hydrolase protein [Arabidopsis
  misc_feature (129)..(360): Homolog of NCBI NO: 13161399 NR Description: CPRD47 [Vigna unguiculata]
MGNSLLFISFFIFSFSFLEAQKAPAVYVFGDSLVDVGNNNYLSLSIEKAILPHYGIDFPTKKPTGRFSNGKNAADLIAENLGLPTSPPYLSLVSKVHNNNKKNVSFLGGVNFASGGAGIFNASDKGFRQSIPLPKQVDYYSQVHEQLIQQIGASTLGKHLSKSIFIVVIGGNDIFGYFDSKDLQKKNTPQQYVDSMASTLKVQLQRLYNNGAKKFEIAGVGAIGCCPAYRVKNKTECVSEANDLSVKYNEALQSMLKEWQLENKDISYSYFDTYAAIQDLVHNPASYGFANVKAACCGLGELNAQIPCLPISSICSNRKDHIFWDAFHPTEAAARIFVDEIFNGPSKYISPINMEQLLAI

SEQ ID NO: 53125 - DNA, 1490 bp, Glycine max
  misc_feature (1)..(1490): Ceres Seq. ID no. 14315642
gttaacaaagattccagcaccaaatcagaatatagcccaaagcaatgtggcattctatgagccaataacgatcgttccttcatttccacaaaagaatatcaatcaatatgcacaagtggaaccacaagtttatacagagaataatatgaatgggaactatggaggaggaatggtacctcagaacaagaataatatgagcggaatgactcaattcaaccctctcatgaacttgaatgcgatgaatcatatgccaacagcaaatgaaataaatcattataacaatgtgcctggctacaataatatgaataatctcagcaataacataccaaaattaaccagcatgcacagcaataatacctatactagcaatagtactctagataccacaattacaaacctcacaaatatgagcaatatgagcagtatgaatgatataagcaatctcagtaacctcagcaatgtcagtaatgtcagcagcatgagcaatattactcaaacgagtaataataataacccatataatcttcaaatgagcaattttatgaatcaacagaattggtttaataattatttgcaatattatttaccaataatgcatcccttccaataccagaaaatggaacaagatttcaatgcaaatcccgcttttaatccatatatgggcaatatatttgttcccgctgctgctgctgccgtgaacaatcagccagaagaagtaccaaaagttgcaaaggctacaaaagcaaagacgacaaacaaaagatcatcaaaacaagcaaatgtcaataaaactactatcaatagcaataaacctctcaatgagaacctggatgataagaaggtgcttgatacattgaatgaattggattatgacttcttggaatgttataaagtttctgaagagaatctaaattgcaagagagtcggaggtccaggaatccaggatctggatgaactggtcaagaaaagacaagtaccaaacccgtttgtgggagtagaatgaatgaatacgatatattgcagaagaaatgacgctgaattttgagacagagttctcgccaacaaaatcttttacttactttaaaaaccccaaaaaaattgtaatattatttgagattttctcctgacctgtggagagctttcaaaaaagagattttctcttgctgcatcatcatcaaattttatcttttatcgttggacttcataaaggagatgttttgttttttctgggtgaaaaaaattgtacagaagagtgaagcaaattacttgggaaaaatcaaacagcaacttgaagagtccagattatgttttattattcagtcctattttgtgtctatcttccgctttttattattaatatttttttaataccgtgtgttgccatctattcttttaaaaccaacccgaaaagactgagaggaaaaaaagagcccacagtgaaaaattgaggggaatccttaccaaaaaagaatttaatcaagaagaaccgc

SEQ ID NO: 53126 - protein, 333 aa, Glycine max
  peptide (1)..(333): Ceres Seq. ID no. 14315643
  misc_feature (75)..(289): Pfam Name: Ubiquitin carboxyl-terminal hydrolase Pfam Description: Ubiquitin carboxyl-terminal hydrolase
  misc_feature (27)..(302): Homolog of NCBI NO: 23508404 NR Description: hypothetical protein [Plasmodium falciparum 3D7]
  misc_feature (13)..(189): Homolog of NCBI NO: 23613778 NR Description: protein kinase, putative [Plasmodium falciparum
  misc_feature (34)..(189): Homolog of NCBI NO: 23613587 NR Description: hypothetical protein [Plasmodium falciparum 3D7]
  misc_feature (61)..(292): Homolog of NCBI NO: 23612199 NR Description: hypothetical protein [Plasmodium falciparum 3D7]
  misc_feature (23)..(198): Homolog of NCBI NO: 23508631 NR Description: hypothetical protein [Plasmodium falciparum 3D7]
  misc_feature (32)..(292): Homolog of NCBI NO: 14588885 NR Description: asparagine-rich protein [Plasmodium falciparum]
  misc_feature (27)..(286): Homolog of NCBI NO: 23613778 NR Description: protein kinase, putative [Plasmodium falciparum
  misc_feature (61)..(188): Homolog of NCBI NO: 23507929 NR Description: hypothetical protein [Plasmodium falciparum 3D7]
  misc_feature (32)..(286): Homolog of NCBI NO: 23507929 NR Description: hypothetical protein [Plasmodium falciparum 3D7]
  misc_feature (43)..(302): Homolog of NCBI NO: 14588885 NR Description: asparagine-rich protein [Plasmodium falciparum]
LTKIPAPNQNIAQSNVAFYEPITIVPSFPQKNINQYAQVEPQVYTENNMNGNYGGGMVPQNKNNMSGMTQFNPLMNLNAMNHMPTANEINHYNNVPGYNNMNNLSNNIPKLTSMHSNNTYTSNSTLDTTITNLTNMSNMSSMNDISNLSNLSNVSNVSSMSNITQTSNNNNPYNLQMSNFMNQQNWFNNYLQYYLPIMHPFQYQKMEQDFNANPAFNPYMGNIFVPAAAAAVNNQPEEVPKVAKATKAKTTNKRSSKQANVNKTTINSNKPLNENLDDKKVLDTLNELDYDFLECYKVSEENLNCKRVGGPGIQDLDELVKKRQVPNPFVGVE

SEQ ID NO: 53127 - protein, 285 aa, Glycine max
  peptide (1)..(285): Ceres Seq. ID no. 14315644
  misc_feature (27)..(241): Pfam Name: Ubiquitin carboxyl-terminal hydrolase Pfam Description: Ubiquitin carboxyl-terminal hydrolase
  misc_feature (1)..(254): Homolog of NCBI NO: 23508404 NR Description: hypothetical protein [Plasmodium falciparum 3D7]
  misc_feature (1)..(141): Homolog of NCBI NO: 23613778 NR Description: protein kinase, putative [Plasmodium falciparum
  misc_feature (1)..(141): Homolog of NCBI NO: 23613587 NR Description: hypothetical protein [Plasmodium falciparum 3D7]
  misc_feature (13)..(244): Homolog of NCBI NO: 23612199 NR Description: hypothetical protein [Plasmodium falciparum 3D7]
  misc_feature (1)..(150): Homolog of NCBI NO: 23508631 NR Description: hypothetical protein [Plasmodium falciparum 3D7]
  misc_feature (1)..(244): Homolog of NCBI NO: 14588885 NR Description: asparagine-rich protein [Plasmodium falciparum]
  misc_feature (1)..(238): Homolog of NCBI NO: 23613778 NR Description: protein kinase, putative [Plasmodium falciparum
  misc_feature (13)..(140): Homolog of NCBI NO: 23507929 NR Description: hypothetical protein [Plasmodium falciparum 3D7]
  misc_feature (1)..(238): Homolog of NCBI NO: 23507929 NR Description: hypothetical protein [Plasmodium falciparum 3D7]
  misc_feature (1)..(254): Homolog of NCBI NO: 14588885 NR Description: asparagine-rich protein [Plasmodium falciparum]
MNGNYGGGMVPQNKNNMSGMTQFNPLMNLNAMNHMPTANEINHYNNVPGYNNMNNLSNNIPKLTSMHSNNTYTSNSTLDTTITNLTNMSNMSSMNDISNLSNLSNVSNVSSMSNITQTSNNNNPYNLQMSNFMNQQNWFNNYLQYYLPIMHPFQYQKMEQDFNANPAFNPYMGNIFVPAAAAAVNNQPEEVPKVAKATKAKTTNKRSSKQANVNKTTINSNKPLNENLDDKKVLDTLNELDYDFLECYKVSEENLNCKRVGGPGIQDLDELVKKRQVPNPFVGVE

SEQ ID NO: 53128 - protein, 277 aa, Glycine max
  peptide (1)..(277): Ceres Seq. ID no. 14315645
  misc_feature (19)..(233): Pfam Name: Ubiquitin carboxyl-terminal hydrolase Pfam Description: Ubiquitin carboxyl-terminal hydrolase
  misc_feature (1)..(246): Homolog of NCBI NO: 23508404 NR Description: hypothetical protein [Plasmodium falciparum 3D7]
  misc_feature (1)..(133): Homolog of NCBI NO: 23613778 NR Description: protein kinase, putative [Plasmodium falciparum
  misc_feature (1)..(133): Homolog of NCBI NO: 23613587 NR Description: hypothetical protein [Plasmodium falciparum 3D7]
  misc_feature (5)..(236): Homolog of NCBI NO: 23612199 NR Description: hypothetical protein [Plasmodium falciparum 3D7]
  misc_feature (1)..(142): Homolog of NCBI NO: 23508631 NR Description: hypothetical protein [Plasmodium falciparum 3D7]
  misc_feature (1)..(236): Homolog of NCBI NO: 14588885 NR Description: asparagine-rich protein [Plasmodium falciparum]
  misc_feature (1)..(230): Homolog of NCBI NO: 23613778 NR Description: protein kinase, putative [Plasmodium falciparum
  misc_feature (5)..(132): Homolog of NCBI NO: 23507929 NR Description: hypothetical protein [Plasmodium falciparum 3D7]
  misc_feature (1)..(230): Homolog of NCBI NO: 23507929 NR Description: hypothetical protein [Plasmodium falciparum 3D7]
  misc_feature (1)..(246): Homolog of NCBI NO: 14588885 NR Description: asparagine-rich protein [Plasmodium falciparum]
MVPQNKNNMSGMTQFNPLMNLNAMNHMPTANEINHYNNVPGYNNMNNLSNNIPKLTSMHSNNTYTSNSTLDTTITNLTNMSNMSSMNDISNLSNLSNVSNVSSMSNITQTSNNNNPYNLQMSNFMNQQNWFNNYLQYYLPIMHPFQYQKMEQDFNANPAFNPYMGNIFVPAAAAAVNNQPEEVPKVAKATKAKTTNKRSSKQANVNKTTINSNKPLNENLDDKKVLDTLNELDYDFLECYKVSEENLNCKRVGGPGIQDLDELVKKRQVPNPFVGVE

SEQ ID NO: 53129 - DNA, 1365 bp, Glycine max
  misc_feature (1)..(1365): Ceres Seq. ID no. 14315670
aggcacttgcttgggatctctctgcaaacttctttctttttccatttctctttttagatttgcatttttttagttgttttatgtatgtatgcatgtattcattgaacttggagaaaattgggtaataagcagttgctacaatatggcttgaaagttgaaacttattatgcgtgtgcttggatatatgttgttttggtggttgcatgtcttcgttaattgaccaaaatgttgtgggttttgtggctgtacttcttatatattgattctgtgagtggatattgagaagaaaagattggagaatcttcaaatcttcaaatttactagtgtctctagactctaatcatttgatgtactatactgtagaagatggacttaggttgttatatatatatatatatgcccatctgcattggacacaacagtactgtttctttgtatagtttgttgtcttacaaaaattaactttaagcctaatgtaatggcttttacggaaagaaaaaatctagcctaatatcatatttgtttgtgggatgcagctgagaaacttagtatgggcaacttcaaaacatgatgtctaccttatctccaactactctgttaatcactggtcatcattaagtggtaatttgactgagataatcaattttgctgggcatgtggcaccgccccctactgagcgtttgaataagaaaggagtaagcttttgtacatggatcacacatgatgataatgctatatcaaatgcagttgaaatatatgacagcttgagcattactcacgaaaggattagctggaatccaacctgttgatattcctgggatccaaaattcccgttcttatctgaataatttaaatcatcaccaaaagcatcaaaacaatttagtaagattggtgtctagggattttatcagcagtaatggcttgtcaacgagaagaagtaactgcactggctagaggaattgtagtgtaattcgatctctagcttcgcaaacatcagtcgctgatccagtgttgtcctcttcaagaagcaatgctggtgacacttacaagaaatcaactttaatccttattcggcatggtgagtcgttatggaatgagaagaacttattcacagggtgtgttgatgtccttctaagcaagaagggtatagatgaggcaattgaagctgggaaaagaattagcagcattccttctgaagctggaatttatgcctatactagggtatgctgtttatagcccttttaagaccctttcttttttttaatgaaatgtttaacaatagatattatttttctggaaggctgcaatggcacttgcagacctctaccaatagatagaatagaacataaaaatggttttgcttgt

SEQ ID NO: 53130 - protein, 92 aa, Glycine max
  peptide (1)..(92): Ceres Seq. ID no. 14315671
  misc_feature (1)..(45): Homolog of NCBI NO: 6598592 NR Description: F5J5.6 [Arabidopsis thaliana]
  misc_feature (2)..(57): Homolog of NCBI NO: 12324715 NR Description: unknown protein; 4584-7806 [Arabidopsis thaliana]
  misc_feature (2)..(45): Homolog of NCBI NO: 9758639 NR Description: WD-repeat protein-like [Arabidopsis thaliana]
  misc_feature (2)..(45): Homolog of NCBI NO: 21536732 NR Description: WD-repeat protein-like [Arabidopsis thaliana]
  misc_feature (2)..(45): Homolog of NCBI NO: 18423837 NR Description: WD-40 repeat protein family [Arabidopsis thaliana]
  misc_feature (2)..(45): Homolog of NCBI NO: 30696707 NR Description: WD-40 repeat protein family [Arabidopsis
  misc_feature (51)..(92): Homolog of NCBI NO: 18400003 NR Description: WD-40 repeat protein family [Arabidopsis thaliana]
  misc_feature (2)..(51): Homolog of NCBI NO: 18400003 NR Description: WD-40 repeat protein family [Arabidopsis thaliana]
  misc_feature (51)..(92): Homolog of NCBI NO: 21553502 NR Description: unknown [Arabidopsis thaliana]
  misc_feature (2)..(51): Homolog of NCBI NO: 21553502 NR Description: unknown [Arabidopsis thaliana]
MQLRNLVWATSKHDVYLISNYSVNHWSSLSGNLTEIINFAGHVAPPPTERLNKKGVSFCTWITHDDNAISNAVEIYDSLSITHERISWNPTC

SEQ ID NO: 53131 - DNA, 1297 bp, Glycine max
  misc_feature (1)..(1297): Ceres Seq. ID no. 14315684
aattgctatccaagctttaccttatttcttctgcatgtgaacatatatttattttttcattttctttcttctgccccctattcttttttagttggttgttatggttaaatagtatcatgttcatgacgtctcaaatgcaagtaacatcatggattttgtagagactgtgagagtgagtgaacgtgcccctaggtgtttatgcttaagcaggaaaaaaaatctcaggattagtgaggtggagatcaaagatcactaacttatttgaatttctgcatatgtcaactagtatagtatttgagaaagatgtttgttgtttgatttcttcgacctcattaagtcaaacaacttagaattaattatttaactaagctacttgtattgtcatcatccagttatttgtggataccatatctcgtctgtttatgtttaccttgctatttctctctttctctttattgcaattttgaagtcatttgcctactgatgttcacttttaccaatcgaatacaatttatgagcagtctgcattggatgatgatatatggtttatattacattcaattcactgtgtatgttattgttatgttatgccaattgccaccgaagaaggtcagaaacacaatgagttcgtcgaacctgagagatctccaacgcgaattggagaacaaagccaacgatctcagcaagcttcaaaaggaaattgcaaagaatcaccaaatgagaaagaagtacacactccagcttggcgagaacgagctcgtccttaaggaactggatttattgaaagatgacacaaatgtttataagttgattgggccagtacttgttaagcaagatttggccgaggccaatgcaaatgtccgcaagaggatcgaatacatctcagctgaattgaagcgtcttgatgccactgttcaagatttggaagagaagcaaaatagcaagaaagatgcaatactaaaattgcaacaaaggattcaatcacttcaggctgggaaaggcaaggcatagttttccctcacatattgttccagcattgtaatttgaccgtgctaaggttggatgtgcatttgtattttgtgcctctttgttttggactgaagttgactcttaggaatgtgtttcgggaaacaatttggaaattagattgatattattatagttggtattggctcattttcaagaaaatgacctgtacaaggttctgtggaaggcttagagaagtcatttgttgcaagggctactttttgtggaaaagccattggcttttttctaatgcatggactatttttttttt

SEQ ID NO: 53132 - protein, 175 aa, Glycine max
  peptide (1)..(175): Ceres Seq. ID no. 14315685
  misc_feature (59)..(166): Pfam Name: KE2 family protein Pfam Description: KE2 family protein
  misc_feature (58)..(175): Homolog of NCBI NO: 17506717 NR Description: prefoldin-related KE2 protein (14.7 kD) (1H860)
  misc_feature (37)..(170): Homolog of NCBI NO: 31196111 NR Description: ENSANGP00000016422 [Anopheles gambiae]
  misc_feature (37)..(170): Homolog of NCBI NO: 31239783 NR Description: ENSANGP00000016626 [Anopheles gambiae]
  misc_feature (55)..(169): Homolog of NCBI NO: 33585747 NR Description: Unknown (protein for MGC:66282) [Danio rerio]
  misc_feature (55)..(175): Homolog of NCBI NO: 27704620 NR Description: similar to H2-K region expressed gene 2
  misc_feature (55)..(175): Homolog of NCBI NO: 7657162 NR Description: HLA class II region expressed gene KE2; KE2
  misc_feature (55)..(175): Homolog of NCBI NO: 6754128 NR Description: H2-K region expressed gene 2 [Mus musculus]
  misc_feature (47)..(137): Homolog of NCBI NO: 25403096 NR Description: probable hydrophilic protein, 29542-30030
  misc_feature (47)..(175): Homolog of NCBI NO: 26450257 NR Description: unknown protein [Arabidopsis thaliana]
  misc_feature (47)..(175): Homolog of NCBI NO: 30691134 NR Description: hydrophilic protein -related [Arabidopsis
MFTFTNRIQFMSSLHWMMIYGLYYIQFTVYVIVMLCQLPPKKVRNTMSSSNLRDLQRELENKANDLSKLQKEIAKNHQMRKKYTLQLGENELVLKELDLLKDDTNVYKLIGPVLVKQDLAEANANVRKRIEYISAELKRLDATVQDLEEKQNSKKDAILKLQQRIQSLQAGKGKA

SEQ ID NO: 53133 - protein, 165 aa, Glycine max
  peptide (1)..(165): Ceres Seq. ID no. 14315686
  misc_feature (49)..(156): Pfam Name: KE2 family protein Pfam Description: KE2 family protein
  misc_feature (48)..(165): Homolog of NCBI NO: 17506717 NR Description: prefoldin-related KE2 protein (14.7 kD) (1H860)
  misc_feature (27)..(160): Homolog of NCBI NO: 31196111 NR Description: ENSANGP00000016422 [Anopheles gambiae]
  misc_feature (27)..(160): Homolog of NCBI NO: 31239783 NR Description: ENSANGP00000016626 [Anopheles gambiae]
  misc_feature (45)..(159): Homolog of NCBI NO: 33585747 NR Description: Unknown (protein for MGC:66282) [Danio rerio]
  misc_feature (45)..(165): Homolog of NCBI NO: 27704620 NR Description: similar to H2-K region expressed gene 2
  misc_feature (45)..(165): Homolog of NCBI NO: 7657162 NR Description: HLA class II region expressed gene KE2; KE2
  misc_feature (45)..(165): Homolog of NCBI NO: 6754128 NR Description: H2-K region expressed gene 2 [Mus musculus]
  misc_feature (37)..(127): Homolog of NCBI NO: 25403096 NR Description: probable hydrophilic protein, 29542-30030
  misc_feature (37)..(165): Homolog of NCBI NO: 26450257 NR Description: unknown protein [Arabidopsis thaliana]
  misc_feature (37)..(165): Homolog of NCBI NO: 30691134 NR Description: hydrophilic protein -related [Arabidopsis
MSSLHWMMIYGLYYIQFTVYVIVMLCQLPPKKVRNTMSSSNLRDLQRELENKANDLSKLQKEIAKNHQMRKKYTLQLGENELVLKELDLLKDDTNVYKLIGPVLVKQDLAEANANVRKRIEYISAELKRLDATVQDLEEKQNSKKDAILKLQQRIQSLQAGKGKA

SEQ ID NO: 53134 - protein, 159 aa, Glycine max
  peptide (1)..(159): Ceres Seq. ID no. 14315687
  misc_feature (43)..(150): Pfam Name: KE2 family protein Pfam Description: KE2 family protein
  misc_feature (42)..(159): Homolog of NCBI NO: 17506717 NR Description: prefoldin-related KE2 protein (14.7 kD) (1H860)
  misc_feature (21)..(154): Homolog of NCBI NO: 31196111 NR Description: ENSANGP00000016422 [Anopheles gambiae]
  misc_feature (21)..(154): Homolog of NCBI NO: 31239783 NR Description: ENSANGP00000016626 [Anopheles gambiae]
  misc_feature (39)..(153): Homolog of NCBI NO: 33585747 NR Description: Unknown (protein for MGC:66282) [Danio rerio]
  misc_feature (39)..(159): Homolog of NCBI NO: 27704620 NR Description: similar to H2-K region expressed gene 2
  misc_feature (39)..(159): Homolog of NCBI NO: 7657162 NR Description: HLA class II region expressed gene KE2; KE2
  misc_feature (39)..(159): Homolog of NCBI NO: 6754128 NR Description: H2-K region expressed gene 2 [Mus musculus]
  misc_feature (31)..(121): Homolog of NCBI NO: 25403096 NR Description: probable hydrophilic protein, 29542-30030
  misc_feature (31)..(159): Homolog of NCBI NO: 26450257 NR Description: unknown protein [Arabidopsis thaliana]
  misc_feature (31)..(159): Homolog of NCBI NO: 30691134 NR Description: hydrophilic protein -related [Arabidopsis
MMIYGLYYIQFTVYVIVMLCQLPPKKVRNTMSSSNLRDLQRELENKANDLSKLQKEIAKNHQMRKKYTLQLGENELVLKELDLLKDDTNVYKLIGPVLVKQDLAEANANVRKRIEYISAELKRLDATVQDLEEKQNSKKDAILKLQQRIQSLQAGKGKA

SEQ ID NO: 53135 - protein, 129 aa, Glycine max
  peptide (1)..(129): Ceres Seq. ID no. 14315688
  misc_feature (13)..(120): Pfam Name: KE2 family protein Pfam Description: KE2 family protein
  misc_feature (12)..(129): Homolog of NCBI NO: 17506717 NR Description: prefoldin-related KE2 protein (14.7 kD) (1H860)
  misc_feature (1)..(124): Homolog of NCBI NO: 31196111 NR Description: ENSANGP00000016422 [Anopheles gambiae]
  misc_feature (1)..(124): Homolog of NCBI NO: 31239783 NR Description: ENSANGP00000016626 [Anopheles gambiae]
  misc_feature (9)..(123): Homolog of NCBI NO: 33585747 NR Description: Unknown (protein for MGC:66282) [Danio rerio]
  misc_feature (9)..(129): Homolog of NCBI NO: 27704620 NR Description: similar to H2-K region expressed gene 2
  misc_feature (9)..(129): Homolog of NCBI NO: 7657162 NR Description: HLA class II region expressed gene KE2; KE2
  misc_feature (9)..(129): Homolog of NCBI NO: 6754128 NR Description: H2-K region expressed gene 2 [Mus musculus]
  misc_feature (1)..(91): Homolog of NCBI NO: 25403096 NR Description: probable hydrophilic protein, 29542-30030
  misc_feature (1)..(129): Homolog of NCBI NO: 26450257 NR Description: unknown protein [Arabidopsis thaliana]
  misc_feature (1)..(129): Homolog of NCBI NO: 30691134 NR Description: hydrophilic protein -related [Arabidopsis
MSSSNLRDLQRELENKANDLSKLQKEIAKNHQMRKKYTLQLGENELVLKELDLLKDDTNVYKLIGPVLVKQDLAEANANVRKRIEYISAELKRLDATVQDLEEKQNSKKDAILKLQQRIQSLQAGKGKA

SEQ ID NO: 53136 - DNA, 1453 bp, Glycine max
  misc_feature (1)..(1453): Ceres Seq. ID no. 13637608
agcatgaagatggaatttttcctcactgatcacaccttgtccaacattaaagttaatgacaccggagttgccttgactgctttcggtcctttctctaagctcagagccaccgatgttgatggtgatgtctatgaattcgaagctctccaattccatttccacgctcctgctgaacataccattaatgaaggaagatacgaattggaacttcacattgttcacaagatgactgaagaatctgaaaagagagccaaaactcacagaaacctcgctgtcgtcgcagtcttctttgaacttgataaagaccccagaactacccccaacgctttcatcgatgctcttaagcttgacagatgcggttgcgatcttgacctcaatatgtacgaacttctctctcaagacctcactgaaatgaccagcttctttgcttacaagggtggtttgactacccctccttgcagtgaaactgtcaactggtacttgtttgaaaagcccgttaagatcactcaagctcaattgaaccactttaacctcagatggaaagacaacatgaacttcgcttgtggtgaaggtaacaacagacccattcaagccctcaacaacagaactgttctcaagagtaacaactgctgtgtcatgggtaaatctcaagaatacatgagagaaatgatggctgaagttaaacccagagaagaagtcagtctcaccttgaacagagaaatgatgattggtgaactctctgtcaagagccaccacactagagttgatacccaaagctttattgattcccctaccttcaagaaaaaggctagctactctgaacaagtcggragaaaagagcttccctggcgaaaccccaagcagtatgaaaaagagcgcttactccaagacttcaatccacaaccccgtcaccacttttaccaacgttgtggaatccaaaaactaaaaaagtctaatcactcagaacattttttctccttcatagtcaaggagaaatatgggaaggaataacccatccaaaccacctctaatttaaaatgaaagttggtttcttcagagttgaaaaacttttaaaggcgaaaaacatataaaaataaaaaaagccttttagtcagtcttaagacagctttctatcttacttcaaccattgactagcgcatacaatataaatatccgcggttagtgttcccagtgagctagaatgtattgttttactcccgtctgagatttcagagtcttctgaaactctctttcaaaactttgtctacagcccataaatctatcaattatatattatttgctataaatttatctttttgtttaaactgctggatatcgatcttatatgtttaacgctttttatttgtttaagatgttaagaatattatattctagttggmccttttdggtctgacgtttataattcaatcatcagaawtaatckgtctcctcc

SEQ ID NO: 53137 - protein, 336 aa, Glycine max
  peptide (1)..(336): Ceres Seq. ID no. 15220384
  misc_feature (16)..(208): Homolog of NCBI NO: 4699796 NR Description: Murine Carbonic Anhydrase Iv
  misc_feature (45)..(207): Homolog of NCBI NO: 17230421 NR Description: carbonic anhydrase [Nostoc sp. PCC 7120]
  misc_feature (4)..(205): Homolog of NCBI NO: 17568715 NR Description: Carbonic anhydrase CAH-3 (28.1 kD) (cah-3)
  misc_feature (28)..(206): Homolog of NCBI NO: 31194973 NR Description: ENSANGP00000001812 [Anopheles gambiae]
  misc_feature (11)..(207): Homolog of NCBI NO: 21358169 NR Description: CG6906-PA [Drosophila melanogaster]
  misc_feature (45)..(208): Homolog of NCBI NO: 21233413 NR Description: a-type carbonic anhydrase
  misc_feature (11)..(204): Homolog of NCBI NO: 24650523 NR Description: CG6074-PA [Drosophila melanogaster]
  misc_feature (45)..(208): Homolog of NCBI NO: 21244796 NR Description: a-type carbonic anhydrase
  misc_feature (45)..(204): Homolog of NCBI NO: 7436810 NR Description: carbonate dehydratase (EC 4.2.1.1) precursor,
  misc_feature (1)..(213): Homolog of NCBI NO: 32450213 NR Description: Unknown (protein for MGC:64443) [Xenopus laevis]
  misc_feature (277)..(277): Xaa is any aa, unknown or other
SMKMEFFLTDHTLSNIKVNDTGVALTAFGPFSKLRATDVDGDVYEFEALQFHFHAPAEHTINEGRYELELHIVHKMTEESEKRAKTHRNLAVVAVFFELDKDPRTTPNAFIDALKLDRCGCDLDLNMYELLSQDLTEMTSFFAYKGGLTTPPCSETVNWYLFEKPVKITQAQLNHFNLRWKDNMNFACGEGNNRPIQALNNRTVLKSNNCCVMGKSQEYMREMMAEVKPREEVSLTLNREMMIGELSVKSHHTRVDTQSFIDSPTFKKKASYSEQVXRKELPWRNPKQYEKERLLQDFNPQPRHHFYQRCGIQKLKKSNHSEHFFSFIVKEKYGKE

SEQ ID NO: 53138 - protein, 335 aa, Glycine max
  peptide (1)..(335): Ceres Seq. ID no. 15220385
  misc_feature (15)..(207): Homolog of NCBI NO: 4699796 NR Description: Murine Carbonic Anhydrase Iv
  misc_feature (44)..(206): Homolog of NCBI NO: 17230421 NR Description: carbonic anhydrase [Nostoc sp. PCC 7120]
  misc_feature (3)..(204): Homolog of NCBI NO: 17568715 NR Description: Carbonic anhydrase CAH-3 (28.1 kD) (cah-3)
  misc_feature (27)..(205): Homolog of NCBI NO: 31194973 NR Description: ENSANGP00000001812 [Anopheles gambiae]
  misc_feature (10)..(206): Homolog of NCBI NO: 21358169 NR Description: CG6906-PA [Drosophila melanogaster]
  misc_feature (44)..(207): Homolog of NCBI NO: 21233413 NR Description: a-type carbonic anhydrase
  misc_feature (10)..(203): Homolog of NCBI NO: 24650523 NR Description: CG6074-PA [Drosophila melanogaster]
  misc_feature (44)..(207): Homolog of NCBI NO: 21244796 NR Description: a-type carbonic anhydrase
  misc_feature (44)..(203): Homolog of NCBI NO: 7436810 NR Description: carbonate dehydratase (EC 4.2.1.1) precursor,
  misc_feature (1)..(212): Homolog of NCBI NO: 32450213 NR Description: Unknown (protein for MGC:64443) [Xenopus laevis]
  misc_feature (276)..(276): Xaa is any aa, unknown or other
MKMEFFLTDHTLSNIKVNDTGVALTAFGPFSKLRATDVDGDVYEFEALQFHFHAPAEHTINEGRYELELHIVHKMTEESEKRAKTHRNLAVVAVFFELDKDPRTTPNAFIDALKLDRCGCDLDLNMYELLSQDLTEMTSFFAYKGGLTTPPCSETVNWYLFEKPVKITQAQLNHFNLRWKDNMNFACGEGNNRPIQALNNRTVLKSNNCCVMGKSQEYMREMMAEVKPREEVSLTLNREMMIGELSVKSHHTRVDTQSFIDSPTFKKKASYSEQVXRKELPWRNPKQYEKERLLQDFNPQPRHHFYQRCGIQKLKKSNHSEHFFSFIVKEKYGKE

SEQ ID NO: 53139 - protein, 333 aa, Glycine max
  peptide (1)..(333): Ceres Seq. ID no. 15220386
  misc_feature (13)..(205): Homolog of NCBI NO: 4699796 NR Description: Murine Carbonic Anhydrase Iv
  misc_feature (42)..(204): Homolog of NCBI NO: 17230421 NR Description: carbonic anhydrase [Nostoc sp. PCC 7120]
  misc_feature (1)..(202): Homolog of NCBI NO: 17568715 NR Description: Carbonic anhydrase CAH-3 (28.1 kD) (cah-3)
  misc_feature (25)..(203): Homolog of NCBI NO: 31194973 NR Description: ENSANGP00000001812 [Anopheles gambiae]
  misc_feature (8)..(204): Homolog of NCBI NO: 21358169 NR Description: CG6906-PA [Drosophila melanogaster]
  misc_feature (42)..(205): Homolog of NCBI NO: 21233413 NR Description: a-type carbonic anhydrase
  misc_feature (8)..(201): Homolog of NCBI NO: 24650523 NR Description: CG6074-PA [Drosophila melanogaster]
  misc_feature (42)..(205): Homolog of NCBI NO: 21244796 NR Description: a-type carbonic anhydrase
  misc_feature (42)..(201): Homolog of NCBI NO: 7436810 NR Description: carbonate dehydratase (EC 4.2.1.1) precursor,
  misc_feature (1)..(210): Homolog of NCBI NO: 32450213 NR Description: Unknown (protein for MGC:64443) [Xenopus laevis]
  misc_feature (274)..(274): Xaa is any aa, unknown or other
MEFFLTDHTLSNIKVNDTGVALTAFGPFSKLRATDVDGDVYEFEALQFHFHAPAEHTINEGRYELELHIVHKMTEESEKRAKTHRNLAVVAVFFELDKDPRTTPNAFIDALKLDRCGCDLDLNMYELLSQDLTEMTSFFAYKGGLTTPPCSETVNWYLFEKPVKITQAQLNHFNLRWKDNMNFACGEGNNRPIQALNNRTVLKSNNCCVMGKSQEYMREMMAEVKPREEVSLTLNREMMIGELSVKSHHTRVDTQSFIDSPTFKKKASYSEQVXRKELPWRNPKQYEKERLLQDFNPQPRHHFYQRCGIQKLKKSNHSEHFFSFIVKEKYGKE

SEQ ID NO: 53140 - DNA, 1064 bp, Glycine max
  misc_feature (1)..(1064): Ceres Seq. ID no. 14306682
gactaagaagatgaccatatctttaaaccccatcgtcagcttcagctcaacgaagttggaaacaaagtatcaggatgcatcaagatattctgttggagcttctttaccaaaggcaacccagtttacacctttgttgatagtgtctagatcgagaaagcttgtcaaggaaagaagatttggtccttgtttttcagtggcagatagtgatcagcttgcagcagacaacagtagtagcaaggattttgacaatgctgaaaattcggcaaccaatgatcagtcagcatccgtgaattccccagatgaaaacttccaattgcaaaccgaagtaaatgcggagtcaggatctccaacattagaggcttccatttccaatggttcaattaaccaagagcaaaggtcagaagcatctcctaagtcacaatctgcaaccaaacgagcttccctgactgcaagagagaggttaaaggcagctcgatccatcaaccgatacgcgcaatcaaaagcatctaagccagacatgagcagcagggtgttggaggcttcaaaacaaagtgacaaagggtcagggaagaaaaaatctggacttccagaggcccctactaatttgtttgatgatagcaaacgagggttgtcaacaggcttcactttccaatttcctggaggttctgatctctttttcattatcttctcatttgtttttatcagcacagtgatgtttgcaacaacttacattgtgtggaaagttggtgcaatccatttcaatgagtactgaggtgtggtgttaagaattcaccataaaaaaaacagatagttgatttattatatatatgtagacaagcttcggctgcttcaaacttcatgaactgatgatgttgatgatcagtttttcacattttaggtgcttagatcttctattttttcaagttaattattgttatcattattattttataagcaagaagagatatttagttcagggtggatgtagaatacaatatataatgctcaacagtcaacattgtacctgtccttttattttctttttaaagtgtttttgattgatt

SEQ ID NO: 53141 - protein, 256 aa, Glycine max
  peptide (1)..(256): Ceres Seq. ID no. 14306683
  misc_feature (117)..(255): Homolog of NCBI NO: 15228794 NR Description: expressed protein [Arabidopsis thaliana]
TKKMTISLNPIVSFSSTKLETKYQDASRYSVGASLPKATQFTPLLIVSRSRKLVKERRFGPCFSVADSDQLAADNSSSKDFDNAENSATNDQSASVNSPDENFQLQTEVNAESGSPTLEASISNGSINQEQRSEASPKSQSATKRASLTARERLKAARSINRYAQSKASKPDMSSRVLEASKQSDKGSGKKKSGLPEAPTNLFDDSKRGLSTGFTFQFPGGSDLFFIIFSFVFISTVMFATTYIVWKVGAIHFNEY

SEQ ID NO: 53142 - protein, 253 aa, Glycine max
  peptide (1)..(253): Ceres Seq. ID no. 14306684
  misc_feature (114)..(252): Homolog of NCBI NO: 15228794 NR Description: expressed protein [Arabidopsis thaliana]
MTISLNPIVSFSSTKLETKYQDASRYSVGASLPKATQFTPLLIVSRSRKLVKERRFGPCFSVADSDQLAADNSSSKDFDNAENSATNDQSASVNSPDENFQLQTEVNAESGSPTLEASISNGSINQEQRSEASPKSQSATKRASLTARERLKAARSINRYAQSKASKPDMSSRVLEASKQSDKGSGKKKSGLPEAPTNLFDDSKRGLSTGFTFQFPGGSDLFFIIFSFVFISTVMFATTYIVWKVGAIHFNEY

SEQ ID NO: 53143 - DNA, 956 bp, Glycine max
  misc_feature (1)..(956): Ceres Seq. ID no. 15225271
ccgggccccccctygartcagctacgtaggcccccccccccccccaattcttttaaacaacaaacaacaacaacaactatttctcttactacaacaatgtatcaacaaccttcaacctacactaaccaagttccccccaccaccttcaacaatgccaacactaaccctttgactggtggcttcaacaacgccaacgttgaccccttgagaaacaacctcaacaacgccaaccaattgggtggcttcaacaatgctaatgttgatcccatgagaaacaacctccacaacgccaaccccatgactggtggcttcaacaacgctggtgttgatcccttgagaaacaactacaacaacactactaaccccatgactggtggtttcaacaatgccggcccaatgactgatggactcagaaaccaaactgctcctgaaactggtatccccatccgcaagaagcttggttatggcttcggaaccgtcaccttcagaccccttgaagcaagaatgaacaaggacaccgaccttattggtaagatggatccttactgcaagttcaagattggtcttcacatcggaaagagctctgttgccaaggctcaaggcaagaaccccgtctggaatgatgccattaccatcaaatcaaagggagaagaattcgccaccatcaagctcaaggataaggatagacttaccttcaacgatagagtcggaaaggcaaagattcctttgaacaatgtttacaatggtgaaagagttcaataatggattcctttgcacaagggagataagatgactggtgaagttttggtcgaaatgcaattcgttcctaatgtctaaagaatatagtcttatgagtatgatcgaatacgttttgatcattatttgttttgtaaataatgcaataaagtctatattataaagtatgataaccgtaagatattcaaagtcttgaatcc

SEQ ID NO: 53144 - protein, 253 aa, Glycine max
  peptide (1)..(253): Ceres Seq. ID no. 15225272
  misc_feature (163)..(239): Pfam Name: C2 domain Pfam Description: C2 domain
  misc_feature (165)..(253): Homolog of NCBI NO: 7489756 NR Description: hypothetical protein - maize
  misc_feature (158)..(253): Homolog of NCBI NO: 11358958 NR Description: elicitor-responsive gene 3 [imported] - rice
  misc_feature (165)..(253): Homolog of NCBI NO: 5565983 NR Description: unknown [Zea mays]
  misc_feature (158)..(253): Homolog of NCBI NO: 3860331 NR Description: hypothetical protein [Cicer arietinum]
  misc_feature (171)..(253): Homolog of NCBI NO: 38345558 NR Description: OSJNBa0032F06.15 [Oryza sativa (japonica
  misc_feature (158)..(253): Homolog of NCBI NO: 21553977 NR Description: putative elicitor-responsive gene [Arabidopsis
  misc_feature (158)..(253): Homolog of NCBI NO: 15221718 NR Description: C2 domain-containing protein [Arabidopsis
  misc_feature (158)..(253): Homolog of NCBI NO: 18913086 NR Description: Igr2p [Tetrahymena thermophila]
  misc_feature (158)..(253): Homolog of NCBI NO: 6469591 NR Description: unknown [Eufolliculina uhligi]
  misc_feature (5)..(5): Xaa is any aa, unknown or other
  misc_feature (6)..(6): Xaa is any aa, unknown or other
PGPPXXQLRRPPPPPNSFKQQTTTTTISLTTTMYQQPSTYTNQVPPTTFNNANTNPLTGGFNNANVDPLRNNLNNANQLGGFNNANVDPMRNNLHNANPMTGGFNNAGVDPLRNNYNNTTNPMTGGFNNAGPMTDGLRNQTAPETGIPIRKKLGYGFGTVTFRPLEARMNKDTDLIGKMDPYCKFKIGLHIGKSSVAKAQGKNPVWNDAITIKSKGEEFATIKLKDKDRLTFNDRVGKAKIPLNNVYNGERVQ

SEQ ID NO: 53145 - protein, 221 aa, Glycine max
  peptide (1)..(221): Ceres Seq. ID no. 15225273
  misc_feature (131)..(207): Pfam Name: C2 domain Pfam Description: C2 domain
  misc_feature (133)..(221): Homolog of NCBI NO: 7489756 NR Description: hypothetical protein - maize
  misc_feature (126)..(221): Homolog of NCBI NO: 11358958 NR Description: elicitor-responsive gene 3 [imported] - rice
  misc_feature (133)..(221): Homolog of NCBI NO: 5565983 NR Description: unknown [Zea mays]
  misc_feature (126)..(221): Homolog of NCBI NO: 3860331 NR Description: hypothetical protein [Cicer arietinum]
  misc_feature (139)..(221): Homolog of NCBI NO: 38345558 NR Description: OSJNBa0032F06.15 [Oryza sativa (japonica
  misc_feature (126)..(221): Homolog of NCBI NO: 21553977 NR Description: putative elicitor-responsive gene [Arabidopsis
  misc_feature (126)..(221): Homolog of NCBI NO: 15221718 NR Description: C2 domain-containing protein [Arabidopsis
  misc_feature (126)..(221): Homolog of NCBI NO: 18913086 NR Description: Igr2p [Tetrahymena thermophila]
  misc_feature (126)..(221): Homolog of NCBI NO: 6469591 NR Description: unknown [Eufolliculina uhligi]
MYQQPSTYTNQVPPTTFNNANTNPLTGGFNNANVDPLRNNLNNANQLGGFNNANVDPMRNNLHNANPMTGGFNNAGVDPLRNNYNNTTNPMTGGFNNAGPMTDGLRNQTAPETGIPIRKKLGYGFGTVTFRPLEARMNKDTDLIGKMDPYCKFKIGLHIGKSSVAKAQGKNPVWNDAITIKSKGEEFATIKLKDKDRLTFNDRVGKAKIPLNNVYNGERVQ

SEQ ID NO: 53146 - protein, 164 aa, Glycine max
  peptide (1)..(164): Ceres Seq. ID no. 15225274
  misc_feature (74)..(150): Pfam Name: C2 domain Pfam Description: C2 domain
  misc_feature (76)..(164): Homolog of NCBI NO: 7489756 NR Description: hypothetical protein - maize
  misc_feature (69)..(164): Homolog of NCBI NO: 11358958 NR Description: elicitor-responsive gene 3 [imported] - rice
  misc_feature (76)..(164): Homolog of NCBI NO: 5565983 NR Description: unknown [Zea mays]
  misc_feature (69)..(164): Homolog of NCBI NO: 3860331 NR Description: hypothetical protein [Cicer arietinum]
  misc_feature (82)..(164): Homolog of NCBI NO: 38345558 NR Description: OSJNBa0032F06.15 [Oryza sativa (japonica
  misc_feature (69)..(164): Homolog of NCBI NO: 21553977 NR Description: putative elicitor-responsive gene [Arabidopsis
  misc_feature (69)..(164): Homolog of NCBI NO: 15221718 NR Description: C2 domain-containing protein [Arabidopsis
  misc_feature (69)..(164): Homolog of NCBI NO: 18913086 NR Description: Igr2p [Tetrahymena thermophila]
  misc_feature (69)..(164): Homolog of NCBI NO: 6469591 NR Description: unknown [Eufolliculina uhligi]
MRNNLHNANPMTGGFNNAGVDPLRNNYNNTTNPMTGGFNNAGPMTDGLRNQTAPETGIPIRKKLGYGFGTVTFRPLEARMNKDTDLIGKMDPYCKFKIGLHIGKSSVAKAQGKNPVWNDAITIKSKGEEFATIKLKDKDRLTFNDRVGKAKIPLNNVYNGERVQ

SEQ ID NO: 53147 - DNA, 873 bp, Glycine max
  misc_feature (1)..(873): Ceres Seq. ID no. 15225465
ataaactcatcaattttcaacattcaatattggaaattggttcttgcatggatgagaatactgatactgagactgattccaatgaggatgagagtactactactgacaccaaaaaagtggatcaactatcaaaggaaaattctggtgttgcagttgagcttaaagttaatgacaacagtaaatcggttaaagttaatgttactaacataccccttgtcagttatgcacctaaagcatccaagtcttccgctccgtctgacctgggtattgacaaatccatattcatcaagcctaaaacatttcaccttacagtactcatgcttaagctatggaacaaagagcgaattaagacagcctctgaggtcttgcaggaatgcatcaaaggttctttggcaaaagcccgtgttctgtatgctcctgtggaagagactggcgctacacgccactgtgatgaatgcaaggcataggaaaagaacaagtggacaagaaaggtcgattcttttgatgcacggggcatattcaagcagtattgatcagaggactgggggcagtatcttattcctgaagctcatctttcgcagagattttctttcaacgaaaatggatactatcattgttgtgcttcaattccttttcctgaaaataagcaggtagaatgactggtgtcttgttgattgttgcctcactttcttttgtatggaataaggatttggatggtagccttaccaaatatattaaacttatctaccagcaaaagaaaatgcctgggattattagatcaatttttagttagtgttttcctcaacaattgatattgcctcttgtaaacttcaacttcctaattggtagtttatcgttgattgtttaaggaat

SEQ ID NO: 53148 - protein, 217 aa, Glycine max
  peptide (1)..(217): Ceres Seq. ID no. 15225466
INSSIFNIQYWKLVLAWMRILILRLIPMRMRVLLLTPKKWINYQRKILVLQLSLKLMTTVNRLKLMLLTYPLSVMHLKHPSLPLRLTWVLTNPYSSSLKHFTLQYSCLSYGTKSELRQPLRSCRNASKVLWQKPVFCMLLWKRLALHATVMNARHRKRTSGQERSILLMHGAYSSSIDQRTGGSILFLKLIFRRDFLSTKMDTIIVVLQFLFLKISR

SEQ ID NO: 53149 - protein, 200 aa, Glycine max
  peptide (1)..(200): Ceres Seq. ID no. 15225467
MRILILRLIPMRMRVLLLTPKKWINYQRKILVLQLSLKLMTTVNRLKLMLLTYPLSVMHLKHPSLPLRLTWVLTNPYSSSLKHFTLQYSCLSYGTKSELRQPLRSCRNASKVLWQKPVFCMLLWKRLALHATVMNARHRKRTSGQERSILLMHGAYSSSIDQRTGGSILFLKLIFRRDFLSTKMDTIIVVLQFLFLKISR

SEQ ID NO: 53150 - protein, 190 aa, Glycine max
  peptide (1)..(190): Ceres Seq. ID no. 15225468
MRMRVLLLTPKKWINYQRKILVLQLSLKLMTTVNRLKLMLLTYPLSVMHLKHPSLPLRLTWVLTNPYSSSLKHFTLQYSCLSYGTKSELRQPLRSCRNASKVLWQKPVFCMLLWKRLALHATVMNARHRKRTSGQERSILLMHGAYSSSIDQRTGGSILFLKLIFRRDFLSTKMDTIIVVLQFLFLKISR

SEQ ID NO: 53151 - protein, 139 aa, Glycine max
  peptide (1)..(139): Ceres Seq. ID no. 15225469
  misc_feature (127)..(139): Homolog of NCBI NO: 34904328 NR Description: unnamed protein product [Oryza sativa (japonica
  misc_feature (83)..(139): Homolog of NCBI NO: 9279706 NR Description: gene_id:MYA6.4~unknown protein [Arabidopsis
  misc_feature (36)..(139): Homolog of NCBI NO: 9279705 NR Description: gene_id:MYA6.3~unknown protein [Arabidopsis
  misc_feature (16)..(108): Homolog of NCBI NO: 9279706 NR Description: gene_id:MYA6.4~unknown protein [Arabidopsis
  misc_feature (65)..(108): Homolog of NCBI NO: 34904330 NR Description: unnamed protein product [Oryza sativa (japonica
  misc_feature (109)..(129): Homolog of NCBI NO: 30683966 NR Description: expressed protein [Arabidopsis thaliana]
  misc_feature (67)..(108): Homolog of NCBI NO: 30683966 NR Description: expressed protein [Arabidopsis thaliana]
  misc_feature (16)..(108): Homolog of NCBI NO: 15233319 NR Description: expressed protein [Arabidopsis thaliana]
MDENTDTETDSNEDESTTTDTKKVDQLSKENSGVAVELKVNDNSKSVKVNVTNIPLVSYAPKASKSSAPSDLGIDKSIFIKPKTFHLTVLMLKLWNKERIKTASEVLQECIKGSLAKARVLYAPVEETGATRHCDECKA

SEQ ID NO: 53152 - DNA, 1030 bp, Glycine max
  misc_feature (1)..(1030): Ceres Seq. ID no. 13593846
gattgaaaatcacgaaaatgatgtcaggaaattacacctccatcgatagccaaaaggtttcaggatctgtacctgctgttgatcctccacccttccaattctcagattcaaatcttcagacatttcctccatctggagcacagggcaagattggtggtggctcgagacatccacgtgatgttgatgatacgttttcaaaaccagtgtctggttctgatgaaccccagcagcagagtggttggtttaaggctttctcacttgcttcttacaaaccatactttgatgttgacactatagatgttctagacaggattaaagactcactctatccattcaatggaacattcaatgaaaaaactgcttcccaccctgatttgtatggaccgttctggatttgcaccacattaatatttgtagcagcatctattggcacatttgtgacatacatagctcacaaactgaaggaccaggaatggaactatgacataaatctggtgacttggtctgccggcttgttctatggttatgtcaccattgttcctctttgtttgtatgtaatcctcaagtacttctctgtaccatcgggctttgtccaactactctgtctctatggatattccttgtttgtctttattccagcactgtgtatgtctgttgtgccattggagatattcagatggatggttgctggtgtggctgggttcatgtcagcaacttttgtggcactaaacctccgagcacatattatgtcagcaggtgaaagatgggttttgattgttgctagcatttttgtattgcagttggctctagctgtcgcattaaaggtctgcctcttcacagtaacagtatgagagtaaagtagtattatcatcattcagcatcaatgaattgtagataacgaagagagaactttttgctgttttaaatttagttatataatttgtaggtgaaatgcggttatcagattaaactgtcatttaattcattcatggcgatatagaggcaaataaaaatagtttgtacgttggat

SEQ ID NO: 53153 - protein, 282 aa, Glycine max
  peptide (1)..(282): Ceres Seq. ID no. 13593847
  misc_feature (93)..(258): Pfam Name: Yip1 domain Pfam Description: Yip1 domain
  misc_feature (75)..(278): Homolog of NCBI NO: 10092643 NR Description: hypothetical protein DJ167A19.1 [Homo sapiens]
  misc_feature (27)..(278): Homolog of NCBI NO: 13128976 NR Description: hypothetical protein MGC3262 [Homo sapiens]
  misc_feature (28)..(278): Homolog of NCBI NO: 40740298 NR Description: hypothetical protein AN4017.2 [Aspergillus
  misc_feature (71)..(278): Homolog of NCBI NO: 40786465 NR Description: similar to RIKEN cDNA C030002N13 [Rattus
  misc_feature (7)..(278): Homolog of NCBI NO: 30688039 NR Description: expressed protein [Arabidopsis thaliana]
  misc_feature (6)..(282): Homolog of NCBI NO: 34912560 NR Description: P0410E03.18 [Oryza sativa (japonica
  misc_feature (6)..(282): Homolog of NCBI NO: 6729038 NR Description: unknown protein [Arabidopsis thaliana]
  misc_feature (6)..(282): Homolog of NCBI NO: 30679454 NR Description: expressed protein [Arabidopsis thaliana]
  misc_feature (6)..(282): Homolog of NCBI NO: 38564308 NR Description: At5g27490 [Arabidopsis thaliana]
  misc_feature (6)..(282): Homolog of NCBI NO: 30690667 NR Description: expressed protein [Arabidopsis thaliana]
LKITKMMSGNYTSIDSQKVSGSVPAVDPPPFQFSDSNLQTFPPSGAQGKIGGGSRHPRDVDDTFSKPVSGSDEPQQQSGWFKAFSLASYKPYFDVDTIDVLDRIKDSLYPFNGTFNEKTASHPDLYGPFWICTTLIFVAASIGTFVTYIAHKLKDQEWNYDINLVTWSAGLFYGYVTIVPLCLYVILKYFSVPSGFVQLLCLYGYSLFVFIPALCMSVVPLEIFRWMVAGVAGFMSATFVALNLRAHIMSAGERWVLIVASIFVLQLALAVALKVCLFTVTV

SEQ ID NO: 53154 - protein, 277 aa, Glycine max
  peptide (1)..(277): Ceres Seq. ID no. 13593848
  misc_feature (88)..(253): Pfam Name: Yip1 domain Pfam Description: Yip1 domain
  misc_feature (70)..(273): Homolog of NCBI NO: 10092643 NR Description: hypothetical protein DJ167A19.1 [Homo sapiens]
  misc_feature (22)..(273): Homolog of NCBI NO: 13128976 NR Description: hypothetical protein MGC3262 [Homo sapiens]
  misc_feature (23)..(273): Homolog of NCBI NO: 40740298 NR Description: hypothetical protein AN4017.2 [Aspergillus
  misc_feature (66)..(273): Homolog of NCBI NO: 40786465 NR Description: similar to RIKEN cDNA C030002N13 [Rattus
  misc_feature (2)..(273): Homolog of NCBI NO: 30688039 NR Description: expressed protein [Arabidopsis thaliana]
  misc_feature (1)..(277): Homolog of NCBI NO: 34912560 NR Description: P0410E03.18 [Oryza sativa (japonica
  misc_feature (1)..(277): Homolog of NCBI NO: 6729038 NR Description: unknown protein [Arabidopsis thaliana]
  misc_feature (1)..(277): Homolog of NCBI NO: 30679454 NR Description: expressed protein [Arabidopsis thaliana]
  misc_feature (1)..(277): Homolog of NCBI NO: 38564308 NR Description: At5g27490 [Arabidopsis thaliana]
  misc_feature (1)..(277): Homolog of NCBI NO: 30690667 NR Description: expressed protein [Arabidopsis thaliana]
MMSGNYTSIDSQKVSGSVPAVDPPPFQFSDSNLQTFPPSGAQGKIGGGSRHPRDVDDTFSKPVSGSDEPQQQSGWFKAFSLASYKPYFDVDTIDVLDRIKDSLYPFNGTFNEKTASHPDLYGPFWICTTLIFVAASIGTFVTYIAHKLKDQEWNYDINLVTWSAGLFYGYVTIVPLCLYVILKYFSVPSGFVQLLCLYGYSLFVFIPALCMSVVPLEIFRWMVAGVAGFMSATFVALNLRAHIMSAGERWVLIVASIFVLQLALAVALKVCLFTVTV

SEQ ID NO: 53155 - protein, 276 aa, Glycine max
  peptide (1)..(276): Ceres Seq. ID no. 13593849
  misc_feature (87)..(252): Pfam Name: Yip1 domain Pfam Description: Yip1 domain
  misc_feature (69)..(272): Homolog of NCBI NO: 10092643 NR Description: hypothetical protein DJ167A19.1 [Homo sapiens]
  misc_feature (21)..(272): Homolog of NCBI NO: 13128976 NR Description: hypothetical protein MGC3262 [Homo sapiens]
  misc_feature (22)..(272): Homolog of NCBI NO: 40740298 NR Description: hypothetical protein AN4017.2 [Aspergillus
  misc_feature (65)..(272): Homolog of NCBI NO: 40786465 NR Description: similar to RIKEN cDNA C030002N13 [Rattus
  misc_feature (1)..(272): Homolog of NCBI NO: 30688039 NR Description: expressed protein [Arabidopsis thaliana]
  misc_feature (1)..(276): Homolog of NCBI NO: 34912560 NR Description: P0410E03.18 [Oryza sativa (japonica
  misc_feature (1)..(276): Homolog of NCBI NO: 6729038 NR Description: unknown protein [Arabidopsis thaliana]
  misc_feature (1)..(276): Homolog of NCBI NO: 30679454 NR Description: expressed protein [Arabidopsis thaliana]
  misc_feature (1)..(276): Homolog of NCBI NO: 38564308 NR Description: At5g27490 [Arabidopsis thaliana]
  misc_feature (1)..(276): Homolog of NCBI NO: 30690667 NR Description: expressed protein [Arabidopsis thaliana]
MSGNYTSIDSQKVSGSVPAVDPPPFQFSDSNLQTFPPSGAQGKIGGGSRHPRDVDDTFSKPVSGSDEPQQQSGWFKAFSLASYKPYFDVDTIDVLDRIKDSLYPFNGTFNEKTASHPDLYGPFWICTTLIFVAASIGTFVTYIAHKLKDQEWNYDINLVTWSAGLFYGYVTIVPLCLYVILKYFSVPSGFVQLLCLYGYSLFVFIPALCMSVVPLEIFRWMVAGVAGFMSATFVALNLRAHIMSAGERWVLIVASIFVLQLALAVALKVCLFTVTV

SEQ ID NO: 53156 - DNA, 1277 bp, Glycine max
  misc_feature (1)..(1277): Ceres Seq. ID no. 13637457
gaacgtggaaaaatcaatgaaagttgaagattcaaaggaacactaaaacgacttgatacacgactcaattaaaaattcaaaggaacattgagacgatcctagcgcagctccggccaaaagatccgttgatgtttgttctcaggttcacattgcctttttacattttcgctgcacttgttgttccaccaattctcttcataggaaaatctttgtaggcttgtgctggaaatgctctgtgacttgtgctaatagtatcaccaaaagaagtcaaagaatcagaaagcattaatctggatttgcagtttgcacatattggcagtagttttcttttttcatttttcaattgttaaactagatgtctagaagacccccactccctcgtctcctccttaacaatgtctcttgcatgagaaatgcccagcaagttctgcgccatgtgaatgtctctcttcatgatggaggggcacttgtgctaacaggtgcaaatggctcgggaaagacaactttcctgcgcatgttagctgggttttcccgcccttctgctggtgaaatcctttggaatggacatgacattcaacaatctacaatattccatcagtataaacttcagcttaactggctctctctcaaggatgccattgataataagatgtcagttcttaacaatgtacaatggtttgaacttcttgaaaacaaggaagggaaggctatggctgcactagagttgatgggactaggaagattagccaacgaaaaaccaaggatgctatctatgggccagcggaaaagactgcaacttgccagattgctggcacttgatcgccccatatggttgctagatgagccttcagttgcactagatgatgacggtgtgaagttacttgagtatattattgcagaacacaggaaatatggaggaattgtgattgtggcaactcatctacccattgagatagaagattccttagtcttgaggcttccaccaaggtttccaaggaggatgacccttgtggatatgcttgaccgggcagatatcagttaattcctattttcgttcacattctcttcaaaacaggataggtgttgtaatcagctttgtgcaaatgtcatttgtgacaattcagtcaggattcacaattgagttgtctttatattgcagtcgtagtgctggtcatgcttgtatacttgtctgatgcctttgttcttgtatctttcatttcataaaacatttttaagaggccctgaaaatcatatattctggggggacattcaggctt

SEQ ID NO: 53157 - protein, 228 aa, Glycine max
  peptide (1)..(228): Ceres Seq. ID no. 13637458
  misc_feature (35)..(195): Pfam Name: ABC transporter Pfam Description: ABC transporter
  misc_feature (9)..(200): Homolog of NCBI NO: 22962200 NR Description: hypothetical protein [Rhodopseudomonas palustris]
  misc_feature (17)..(208): Homolog of NCBI NO: 26248584 NR Description: Heme exporter protein A [Escherichia coli CFT073]
  misc_feature (17)..(208): Homolog of NCBI NO: 24113587 NR Description: Heme exporter protein A (Cytochrome c-type
  misc_feature (17)..(208): Homolog of NCBI NO: 16130138 NR Description: ATP binding protein of heme exporter A
  misc_feature (17)..(208): Homolog of NCBI NO: 9911057 NR Description: HEME EXPORTER PROTEIN A (CYTOCHROME C-TYPE
  misc_feature (10)..(208): Homolog of NCBI NO: 15802754 NR Description: ATP binding protein of heme exporter A
  misc_feature (5)..(208): Homolog of NCBI NO: 22965489 NR Description: hypothetical protein [Rhodospirillum rubrum]
  misc_feature (11)..(212): Homolog of NCBI NO: 23016499 NR Description: hypothetical protein [Magnetospirillum
  misc_feature (18)..(228): Homolog of NCBI NO: 39545846 NR Description: OSJNBb0060E08.17 [Oryza sativa (japonica
  misc_feature (3)..(228): Homolog of NCBI NO: 15221728 NR Description: ABC transporter family protein [Arabidopsis
MSRRPPLPRLLLNNVSCMRNAQQVLRHVNVSLHDGGALVLTGANGSGKTTFLRMLAGFSRPSAGEILWNGHDIQQSTIFHQYKLQLNWLSLKDAIDNKMSVLNNVQWFELLENKEGKAMAALELMGLGRLANEKPRMLSMGQRKRLQLARLLALDRPIWLLDEPSVALDDDGVKLLEYIIAEHRKYGGIVIVATHLPIEIEDSLVLRLPPRFPRRMTLVDMLDRADIS

SEQ ID NO: 53158 - protein, 211 aa, Glycine max
  peptide (1)..(211): Ceres Seq. ID no. 13637459
  misc_feature (18)..(178): Pfam Name: ABC transporter Pfam Description: ABC transporter
  misc_feature (1)..(183): Homolog of NCBI NO: 22962200 NR Description: hypothetical protein [Rhodopseudomonas palustris]
  misc_feature (1)..(191): Homolog of NCBI NO: 26248584 NR Description: Heme exporter protein A [Escherichia coli CFT073]
  misc_feature (1)..(191): Homolog of NCBI NO: 24113587 NR Description: Heme exporter protein A (Cytochrome c-type
  misc_feature (1)..(191): Homolog of NCBI NO: 16130138 NR Description: ATP binding protein of heme exporter A
  misc_feature (1)..(191): Homolog of NCBI NO: 9911057 NR Description: HEME EXPORTER PROTEIN A (CYTOCHROME C-TYPE
  misc_feature (1)..(191): Homolog of NCBI NO: 15802754 NR Description: ATP binding protein of heme exporter A
  misc_feature (1)..(191): Homolog of NCBI NO: 22965489 NR Description: hypothetical protein [Rhodospirillum rubrum]
  misc_feature (1)..(195): Homolog of NCBI NO: 23016499 NR Description: hypothetical protein [Magnetospirillum
  misc_feature (1)..(211): Homolog of NCBI NO: 39545846 NR Description: OSJNBb0060E08.17 [Oryza sativa (japonica
  misc_feature (1)..(211): Homolog of NCBI NO: 15221728 NR Description: ABC transporter family protein [Arabidopsis
MRNAQQVLRHVNVSLHDGGALVLTGANGSGKTTFLRMLAGFSRPSAGEILWNGHDIQQSTIFHQYKLQLNWLSLKDAIDNKMSVLNNVQWFELLENKEGKAMAALELMGLGRLANEKPRMLSMGQRKRLQLARLLALDRPIWLLDEPSVALDDDGVKLLEYIIAEHRKYGGIVIVATHLPIEIEDSLVLRLPPRFPRRMTLVDMLDRADIS

SEQ ID NO: 53159 - protein, 175 aa, Glycine max
  peptide (1)..(175): Ceres Seq. ID no. 13637460
  misc_feature (1)..(142): Pfam Name: ABC transporter Pfam Description: ABC transporter
  misc_feature (1)..(147): Homolog of NCBI NO: 22962200 NR Description: hypothetical protein [Rhodopseudomonas palustris]
  misc_feature (1)..(155): Homolog of NCBI NO: 26248584 NR Description: Heme exporter protein A [Escherichia coli CFT073]
  misc_feature (1)..(155): Homolog of NCBI NO: 24113587 NR Description: Heme exporter protein A (Cytochrome c-type
  misc_feature (1)..(155): Homolog of NCBI NO: 16130138 NR Description: ATP binding protein of heme exporter A
  misc_feature (1)..(155): Homolog of NCBI NO: 9911057 NR Description: HEME EXPORTER PROTEIN A (CYTOCHROME C-TYPE
  misc_feature (1)..(155): Homolog of NCBI NO: 15802754 NR Description: ATP binding protein of heme exporter A
  misc_feature (1)..(155): Homolog of NCBI NO: 22965489 NR Description: hypothetical protein [Rhodospirillum rubrum]
  misc_feature (1)..(159): Homolog of NCBI NO: 23016499 NR Description: hypothetical protein [Magnetospirillum
  misc_feature (1)..(175): Homolog of NCBI NO: 39545846 NR Description: OSJNBb0060E08.17 [Oryza sativa (japonica
  misc_feature (1)..(175): Homolog of NCBI NO: 15221728 NR Description: ABC transporter family protein [Arabidopsis
MLAGFSRPSAGEILWNGHDIQQSTIFHQYKLQLNWLSLKDAIDNKMSVLNNVQWFELLENKEGKAMAALELMGLGRLANEKPRMLSMGQRKRLQLARLLALDRPIWLLDEPSVALDDDGVKLLEYIIAEHRKYGGIVIVATHLPIEIEDSLVLRLPPRFPRRMTLVDMLDRADIS

SEQ ID NO: 53160 - DNA, 837 bp, Glycine max
  misc_feature (1)..(837): Ceres Seq. ID no. 15226943
cagctacgtaggccccccccccatatacttgatgtcactgatactttaaaatatcagatgattctagtggaatgatccctgagcatgatttcaagaccgagtatgaagttgaatcttgcagcactggccaaaagaatggtaatggctgtcttgatgtgaagagaacaagcctcccaatgcaaaagggtggttatgtcatatatggtgttgctcatcagcattcaggtgccactggatcaactctctatgcacaggatggaagggttatatgttcttcaataccaaggtatggaaagggaaaggaagcaggaaacgaagtagactacattgtaggaatgagcacatgttatcctcaaccaggttctgtaaagataattgatggtgaaactataactctagagtctaactacagcagcagccgtggccacactggagtaatggggcttttctacctattggtggcagaacagcttccacaccaacacttcagatattcttctcgttcttcattttttatgaatataaatagtataattcattgatagataagttgtgagatgcaaatataagttgagtgtcatatcgatggtatcacagtatgtatcacggttaaaagaaatacagaaatacatatcgatggaacatatacttctcatattcggcagcaataggacaacacacgcaagaaccggcaaagagcatattttcaagtttaaggattgtwgtaatgtgattatcaattatttgtattggtgagggtttgtaatgtttgtcttaaaccagtcttgcttattatggttgtgtgatatgtaatactatatatatcatgtttgttgt

SEQ ID NO: 53161 - protein, 156 aa, Glycine max
  peptide (1)..(156): Ceres Seq. ID no. 15226944
  misc_feature (1)..(147): Homolog of NCBI NO: 10176875 NR Description: MtN19-like protein [Arabidopsis thaliana]
  misc_feature (8)..(133): Homolog of NCBI NO: 38175553 NR Description: putative MtN19 [Oryza sativa (japonica
  misc_feature (1)..(154): Homolog of NCBI NO: 22328003 NR Description: expressed protein [Arabidopsis thaliana]
  misc_feature (1)..(154): Homolog of NCBI NO: 19698869 NR Description: putative protein [Arabidopsis thaliana]
  misc_feature (1)..(135): Homolog of NCBI NO: 2598589 NR Description: MtN19 [Medicago truncatula]
MIPEHDFKTEYEVESCSTGQKNGNGCLDVKRTSLPMQKGGYVIYGVAHQHSGATGSTLYAQDGRVICSSIPRYGKGKEAGNEVDYIVGMSTCYPQPGSVKIIDGETITLESNYSSSRGHTGVMGLFYLLVAEQLPHQHFRYSSRSSFFMNINSIIH

SEQ ID NO: 53162 - protein, 121 aa, Glycine max
  peptide (1)..(121): Ceres Seq. ID no. 15226945
  misc_feature (1)..(112): Homolog of NCBI NO: 10176875 NR Description: MtN19-like protein [Arabidopsis thaliana]
  misc_feature (1)..(98): Homolog of NCBI NO: 38175553 NR Description: putative MtN19 [Oryza sativa (japonica
  misc_feature (1)..(119): Homolog of NCBI NO: 22328003 NR Description: expressed protein [Arabidopsis thaliana]
  misc_feature (1)..(119): Homolog of NCBI NO: 19698869 NR Description: putative protein [Arabidopsis thaliana]
  misc_feature (1)..(100): Homolog of NCBI NO: 2598589 NR Description: MtN19 [Medicago truncatula]
MQKGGYVIYGVAHQHSGATGSTLYAQDGRVICSSIPRYGKGKEAGNEVDYIVGMSTCYPQPGSVKIIDGETITLESNYSSSRGHTGVMGLFYLLVAEQLPHQHFRYSSRSSFFMNINSIIH

SEQ ID NO: 53163 - DNA, 982 bp, Glycine max
  misc_feature (1)..(982): Ceres Seq. ID no. 13582421
atgatggcttctttttcagttcagtagagtagagtgagcgaaagtggaaaacaaaaatggaggagactcaagtgctgcacgaactccacaagctatcacagatagaatcagaggaaaccctaaaccaaatgctatgcaccctttggtccactcgtaaaacgggtcttcccctctccgacaagtcccatttccaatccctcctccacctcccttccccctcccatctcgaccccgttttagcgtgcctccgttccctcgtcagaaaatgcgcgcaccagaacctcgcccgcgacgaccttctcagactgtttccccgcgatcttccgattcagttgcaaacgaatttgatatcagcgttgcagagaaacagagatcggtggaaggaggacgtgagtcacgtgattccgcagctgaagggaacgataaactttgctccttcgctgctttggccgcgccaagaacaagattttgatgcggtggcggtgccggcggttgttcctgatgttggcccttcgggggtgaattcgtgcttccagtgtgatgccgttggtgcttctgataacttggaaaaccttccttgcctcaaatcaatgacgtggaccatggagaatcgtggctcatcccctgcagatagagtagctataatcagccttaagctgcatgattatagcaagtctccatcaggtgaaacagagataaagtttcagctcacaagggacacacttgaggctatgctgagatccatgacatacatcagggaacaactaaatgctgttgagacttcttcaggaccagcaaacaagaaacaaaagcagtagcttattttccagaaattaatgctgtagttagtaatattaagacaaatatctcatcctattagtcattggatgttataactgatttttgtccctccgattctttgatggatgccattaaggcttaagcaaacttaatggtttgttataaactatctctctcaatg

SEQ ID NO: 53164 - protein, 253 aa, Glycine max
  peptide (1)..(253): Ceres Seq. ID no. 13582422
  misc_feature (174)..(240): Homolog of NCBI NO: 25407861 NR Description: Mutator-like transposase [imported] - Arabidopsis
  misc_feature (174)..(253): Homolog of NCBI NO: 18401324 NR Description: Mutator-related transposase [Arabidopsis
  misc_feature (129)..(249): Homolog of NCBI NO: 25407861 NR Description: Mutator-like transposase [imported] - Arabidopsis
  misc_feature (129)..(249): Homolog of NCBI NO: 18401324 NR Description: Mutator-related transposase [Arabidopsis
MEETQVLHELHKLSQIESEETLNQMLCTLWSTRKTGLPLSDKSHFQSLLHLPSPSHLDPVLACLRSLVRKCAHQNLARDDLLRLFPRDLPIQLQTNLISALQRNRDRWKEDVSHVIPQLKGTINFAPSLLWPRQEQDFDAVAVPAVVPDVGPSGVNSCFQCDAVGASDNLENLPCLKSMTWTMENRGSSPADRVAIISLKLHDYSKSPSGETEIKFQLTRDTLEAMLRSMTYIREQLNAVETSSGPANKKQKQ

SEQ ID NO: 53165 - protein, 229 aa, Glycine max
  peptide (1)..(229): Ceres Seq. ID no. 13582423
  misc_feature (150)..(216): Homolog of NCBI NO: 25407861 NR Description: Mutator-like transposase [imported] - Arabidopsis
  misc_feature (150)..(229): Homolog of NCBI NO: 18401324 NR Description: Mutator-related transposase [Arabidopsis
  misc_feature (105)..(225): Homolog of NCBI NO: 25407861 NR Description: Mutator-like transposase [imported] - Arabidopsis
  misc_feature (105)..(225): Homolog of NCBI NO: 18401324 NR Description: Mutator-related transposase [Arabidopsis
MLCTLWSTRKTGLPLSDKSHFQSLLHLPSPSHLDPVLACLRSLVRKCAHQNLARDDLLRLFPRDLPIQLQTNLISALQRNRDRWKEDVSHVIPQLKGTINFAPSLLWPRQEQDFDAVAVPAVVPDVGPSGVNSCFQCDAVGASDNLENLPCLKSMTWTMENRGSSPADRVAIISLKLHDYSKSPSGETEIKFQLTRDTLEAMLRSMTYIREQLNAVETSSGPANKKQKQ

SEQ ID NO: 53166 - DNA, 1770 bp, Glycine max
  misc_feature (1)..(1770): Ceres Seq. ID no. 14316223
aaattacaaagtccaaaagtcacctaacagaggtaagaaccaagtaaaagcatcgtgtaatgtggacagttgcacaacagaaatggatagtcagccgtccggttcttctgcagatgctgtagatgttaatgagtctggaagtagcaagttaggtggatctgagcctgagggtgctgttctctgcttgcaggatcgattaaagtggcttgatcagcctgtcatcagaaaggaagaggatatatcttcgctacaaaagaaacaaaccatcaaagaccaagttaacatagaaagaactgtggataatgaaagcctatcaaaagagaagaaatcagcggtgccatcctcatctagtagtcctccaagaaacttacctgttcaaatgaagtcagaaaaccaaactagagttactggagatcctgttcatgtcaggaaaacatcttttggtgtctcacaatcaactgataaagaggcgtcttcatcttcaacttctgtatcacaagtaacaattggtccaaaaacagaaatccagaaagcttcacccccaagactaaccgaaagatccatggcacaagtggctatgttgtcaaggccatctagtgctccactagttcctggtggtcccaggcccactgctgctgttgtctccatggttcaaactgctccactacttgcacgctctgtgagtgcaactggtcggttaggtcctgatccctcacctgctactcatagttatgttccccagtcctatagaaatgcaataatggggaatcctgtggtgtcaactgctgccagtcttcctcattccagctccagttcaggagtaaacccatctcctggctattcacatccacccatggtatcatccccactatttatctcccggagctccgacaaaatggattcaaatacttcccagtctggtgttccctttggtatgatttcacgggatgttttacagaacggacctaattggattgatagttctcaaagggaagccagcagaagcatgcactatgaacctccttcccgactaaatgatgttcaaaacctagacttgttcaggccaatagattgtagatctttgggcaacataccaagtgagttcccagtttacacatccaggcgtccgaaccaaggggcgttggtggatgagttcccacacctcgatatcattaatgacctgcttgatgaaccaagggaccatggtattgggaaggcatccagggcaagttcagtcttccactccctcaatgatggaccacagttgctaaatcgtcaattcacttttcctagagacttgggtaccgatgatgatttgggatcttccaccagttcttgtaggcttgagagatcacgtagttaccatgatgccgggtttcaacaagggtatagcacatctggttggcattatgattcactgcaggattatgttcctcaggccagtacattatcatatggaaatggcaaggtagatgggatgattccaaaccaatggcaggttgctgatctatcttatctaggcatgagaaacactgagaatagttactcgtactatcaagattactcaaatatggcatgtggtgtcaatggttatactgtattcaggccttcaaatggtccgtagagggaaaagatgacaaaggttgcccacaaattagtggtcatcaacaaatgtaataatgtatttgaggaaattgttgggtctctttagattggagtgaggttgtatccccttgataggaaaacattttgtaaagagtgtttccgatt

SEQ ID NO: 53167 - protein, 540 aa, Glycine max
  peptide (1)..(540): Ceres Seq. ID no. 14316224
  misc_feature (8)..(308): Homolog of NCBI NO: 2136504 NR Description: gastric mucin (clone PGM-2A) - pig (fragment)
  misc_feature (91)..(539): Homolog of NCBI NO: 34910000 NR Description: P0490D09.24 [Oryza sativa (japonica
  misc_feature (80)..(296): Homolog of NCBI NO: 15239902 NR Description: expressed protein [Arabidopsis thaliana]
  misc_feature (80)..(296): Homolog of NCBI NO: 10178195 NR Description: gene_id:K9D7.6~unknown protein [Arabidopsis
  misc_feature (1)..(361): Homolog of NCBI NO: 30678845 NR Description: expressed protein [Arabidopsis thaliana]
  misc_feature (1)..(361): Homolog of NCBI NO: 25406769 NR Description: protein F19P19.26 [imported] - Arabidopsis
NYKVQKSPNRGKNQVKASCNVDSCTTEMDSQPSGSSADAVDVNESGSSKLGGSEPEGAVLCLQDRLKWLDQPVIRKEEDISSLQKKQTIKDQVNIERTVDNESLSKEKKSAVPSSSSSPPRNLPVQMKSENQTRVTGDPVHVRKTSFGVSQSTDKEASSSSTSVSQVTIGPKTEIQKASPPRLTERSMAQVAMLSRPSSAPLVPGGPRPTAAVVSMVQTAPLLARSVSATGRLGPDPSPATHSYVPQSYRNAIMGNPVVSTAASLPHSSSSSGVNPSPGYSHPPMVSSPLFISRSSDKMDSNTSQSGVPFGMISRDVLQNGPNWIDSSQREASRSMHYEPPSRLNDVQNLDLFRPIDCRSLGNIPSEFPVYTSRRPNQGALVDEFPHLDIINDLLDEPRDHGIGKASRASSVFHSLNDGPQLLNRQFTFPRDLGTDDDLGSSTSSCRLERSRSYHDAGFQQGYSTSGWHYDSLQDYVPQASTLSYGNGKVDGMIPNQWQVADLSYLGMRNTENSYSYYQDYSNMACGVNGYTVFRPSNGP

SEQ ID NO: 53168 - protein, 513 aa, Glycine max
  peptide (1)..(513): Ceres Seq. ID no. 14316225
  misc_feature (1)..(281): Homolog of NCBI NO: 2136504 NR Description: gastric mucin (clone PGM-2A) - pig (fragment)
  misc_feature (64)..(512): Homolog of NCBI NO: 34910000 NR Description: P0490D09.24 [Oryza sativa (japonica
  misc_feature (53)..(269): Homolog of NCBI NO: 15239902 NR Description: expressed protein [Arabidopsis thaliana]
  misc_feature (53)..(269): Homolog of NCBI NO: 10178195 NR Description: gene_id:K9D7.6~unknown protein [Arabidopsis
  misc_feature (1)..(334): Homolog of NCBI NO: 30678845 NR Description: expressed protein [Arabidopsis thaliana]
  misc_feature (1)..(334): Homolog of NCBI NO: 25406769 NR Description: protein F19P19.26 [imported] - Arabidopsis
MDSQPSGSSADAVDVNESGSSKLGGSEPEGAVLCLQDRLKWLDQPVIRKEEDISSLQKKQTIKDQVNIERTVDNESLSKEKKSAVPSSSSSPPRNLPVQMKSENQTRVTGDPVHVRKTSFGVSQSTDKEASSSSTSVSQVTIGPKTEIQKASPPRLTERSMAQVAMLSRPSSAPLVPGGPRPTAAVVSMVQTAPLLARSVSATGRLGPDPSPATHSYVPQSYRNAIMGNPVVSTAASLPHSSSSSGVNPSPGYSHPPMVSSPLFISRSSDKMDSNTSQSGVPFGMISRDVLQNGPNWIDSSQREASRSMHYEPPSRLNDVQNLDLFRPIDCRSLGNIPSEFPVYTSRRPNQGALVDEFPHLDIINDLLDEPRDHGIGKASRASSVFHSLNDGPQLLNRQFTFPRDLGTDDDLGSSTSSCRLERSRSYHDAGFQQGYSTSGWHYDSLQDYVPQASTLSYGNGKVDGMIPNQWQVADLSYLGMRNTENSYSYYQDYSNMACGVNGYTVFRPSNGP

SEQ ID NO: 53169 - protein, 414 aa, Glycine max
  peptide (1)..(414): Ceres Seq. ID no. 14316226
  misc_feature (1)..(182): Homolog of NCBI NO: 2136504 NR Description: gastric mucin (clone PGM-2A) - pig (fragment)
  misc_feature (1)..(413): Homolog of NCBI NO: 34910000 NR Description: P0490D09.24 [Oryza sativa (japonica
  misc_feature (1)..(170): Homolog of NCBI NO: 15239902 NR Description: expressed protein [Arabidopsis thaliana]
  misc_feature (1)..(170): Homolog of NCBI NO: 10178195 NR Description: gene_id:K9D7.6~unknown protein [Arabidopsis
  misc_feature (1)..(235): Homolog of NCBI NO: 30678845 NR Description: expressed protein [Arabidopsis thaliana]
  misc_feature (1)..(235): Homolog of NCBI NO: 25406769 NR Description: protein F19P19.26 [imported] - Arabidopsis
MKSENQTRVTGDPVHVRKTSFGVSQSTDKEASSSSTSVSQVTIGPKTEIQKASPPRLTERSMAQVAMLSRPSSAPLVPGGPRPTAAVVSMVQTAPLLARSVSATGRLGPDPSPATHSYVPQSYRNAIMGNPVVSTAASLPHSSSSSGVNPSPGYSHPPMVSSPLFISRSSDKMDSNTSQSGVPFGMISRDVLQNGPNWIDSSQREASRSMHYEPPSRLNDVQNLDLFRPIDCRSLGNIPSEFPVYTSRRPNQGALVDEFPHLDIINDLLDEPRDHGIGKASRASSVFHSLNDGPQLLNRQFTFPRDLGTDDDLGSSTSSCRLERSRSYHDAGFQQGYSTSGWHYDSLQDYVPQASTLSYGNGKVDGMIPNQWQVADLSYLGMRNTENSYSYYQDYSNMACGVNGYTVFRPSNGP

SEQ ID NO: 53170 - DNA, 1591 bp, Glycine max
  misc_feature (1)..(1591): Ceres Seq. ID no. 14306493
aaaaaagacataacattccctcccctgtctccaatattgattagccttagccacaaaacaatgttttccccaagagacatgccttctccatcctcaatcttttctgcctacgcctccatgacagcctccatcatgctcctacgttccatggccaacgacctcgttccccaaccaatccgtggctacctttacagcacgttccgttacctcataaagcctcgctccccaaccctcaccctcatcatcgaagagtccaccggcatagcccgtaaccaagtctacgacgctgcagaagcgtacctctccacccgtgtcagccccgaaaacgagaggctcaaaatcagcaagagcgcaaaggagaagaaattaaccgttcggttggagaagggcgagaaggtagtcgactgcttcgacggcgcgtgcttcaagtggagattcatctgcgcggaatccgagaagaacaaccccaacgaccacagcaacaataacagcatctccgtacggtccgaaaagcggtcttttgagctgagcttcccgaagaagtacaaggaaatggttctggactcttacctgcccttcattctcgaaaaggccaaggagatgaaagacgaggaaagggttctgaagatgcacactctcaacacctcgtattgttacagtggggtcaaatgggactctataaatctcgagcatccttcaacttttgagacgctggcgatggagccggagttgaagaatgcggtgattgaggacttggataggttcgtgaagaggaaggagttttataagagggttgggagggcgtggaaacgtggctacttgctctatggccctcctggtactggcaagtctagcttgatagctgctatggccaattacttgaagtttgacatctttgacctccaacttgggaacatagtaagggattctgacctcaggaaactgcttctggcgactgctaatagatccattttggtcattgaagacattgattgcagtgtggatctgccagagcgtcgccatggtgatcatggacgtaaacaaactgacgtacagttgaccttgtctggattactgaacttcatagacgggttatggtctagttgtggagacgagagaatcatcatattcaccaccaaccacaaggagaggctagacccagcactgttgaggccaggaagaatggacatgcacattcacatgtcctattgctcctaccaaggcttcaagattttggcctcaaactacttagaaactccctctgatcaccccctctttggtgaggtagaggggctaatagaggacatacaaataacccctgcgcaagtggcagaggagctgatgaagaacgaagaccctgaggccacacttgaaggattcgtgaagctacttaagaggaagaagatggaaggtgatgtgtgtgagaactctactcctgataaagcagaacctactcatcagcaatctaagaggcgcaaggttggttgcaagcaaaaacgaggtgttggaattaacaagagcattagtggtgtcactcaaataaggacaagaagaatgagagggtgtagtttgtaatcacctggtctcagaa

SEQ ID NO: 53171 - protein, 524 aa, Glycine max
  peptide (1)..(524): Ceres Seq. ID no. 14306494
  misc_feature (272)..(458): Pfam Name: ATPase family associated with various cellular Pfam Description: ATPase family associated with various cellular
  misc_feature (23)..(468): Homolog of NCBI NO: 39104562 NR Description: putative BCS1 protein [Arabidopsis thaliana]
  misc_feature (23)..(468): Homolog of NCBI NO: 30693380 NR Description: AAA-type ATPase family [Arabidopsis thaliana]
  misc_feature (21)..(478): Homolog of NCBI NO: 15238021 NR Description: AAA-type ATPase family [Arabidopsis thaliana]
  misc_feature (21)..(508): Homolog of NCBI NO: 25411838 NR Description: probable AAA-type ATPase [imported] - Arabidopsis
  misc_feature (21)..(507): Homolog of NCBI NO: 30680274 NR Description: AAA-type ATPase family [Arabidopsis thaliana]
  misc_feature (27)..(495): Homolog of NCBI NO: 21592769 NR Description: BCS1 protein-like protein [Arabidopsis thaliana]
  misc_feature (27)..(501): Homolog of NCBI NO: 30693378 NR Description: AAA-type ATPase family [Arabidopsis thaliana]
  misc_feature (27)..(501): Homolog of NCBI NO: 7485703 NR Description: hypothetical protein F18B3.210 - Arabidopsis
  misc_feature (21)..(481): Homolog of NCBI NO: 15238022 NR Description: AAA-type ATPase family [Arabidopsis thaliana]
  misc_feature (21)..(470): Homolog of NCBI NO: 30686502 NR Description: BCS1 - like protein [Arabidopsis thaliana]
KKDITFPPLSPILISLSHKTMFSPRDMPSPSSIFSAYASMTASIMLLRSMANDLVPQPIRGYLYSTFRYLIKPRSPTLTLIIEESTGIARNQVYDAAEAYLSTRVSPENERLKISKSAKEKKLTVRLEKGEKVVDCFDGACFKWRFICAESEKNNPNDHSNNNSISVRSEKRSFELSFPKKYKEMVLDSYLPFILEKAKEMKDEERVLKMHTLNTSYCYSGVKWDSINLEHPSTFETLAMEPELKNAVIEDLDRFVKRKEFYKRVGRAWKRGYLLYGPPGTGKSSLIAAMANYLKFDIFDLQLGNIVRDSDLRKLLLATANRSILVIEDIDCSVDLPERRHGDHGRKQTDVQLTLSGLLNFIDGLWSSCGDERIIIFTTNHKERLDPALLRPGRMDMHIHMSYCSYQGFKILASNYLETPSDHPLFGEVEGLIEDIQITPAQVAEELMKNEDPEATLEGFVKLLKRKKMEGDVCENSTPDKAEPTHQQSKRRKVGCKQKRGVGINKSISGVTQIRTRRMRGCSL

SEQ ID NO: 53172 - protein, 504 aa, Glycine max
  peptide (1)..(504): Ceres Seq. ID no. 14306495
  misc_feature (252)..(438): Pfam Name: ATPase family associated with various cellular Pfam Description: ATPase family associated with various cellular
  misc_feature (3)..(448): Homolog of NCBI NO: 39104562 NR Description: putative BCS1 protein [Arabidopsis thaliana]
  misc_feature (3)..(448): Homolog of NCBI NO: 30693380 NR Description: AAA-type ATPase family [Arabidopsis thaliana]
  misc_feature (1)..(458): Homolog of NCBI NO: 15238021 NR Description: AAA-type ATPase family [Arabidopsis thaliana]
  misc_feature (1)..(488): Homolog of NCBI NO: 25411838 NR Description: probable AAA-type ATPase [imported] - Arabidopsis
  misc_feature (1)..(487): Homolog of NCBI NO: 30680274 NR Description: AAA-type ATPase family [Arabidopsis thaliana]
  misc_feature (7)..(475): Homolog of NCBI NO: 21592769 NR Description: BCS1 protein-like protein [Arabidopsis thaliana]
  misc_feature (7)..(481): Homolog of NCBI NO: 30693378 NR Description: AAA-type ATPase family [Arabidopsis thaliana]
  misc_feature (7)..(481): Homolog of NCBI NO: 7485703 NR Description: hypothetical protein F18B3.210 - Arabidopsis
  misc_feature (1)..(461): Homolog of NCBI NO: 15238022 NR Description: AAA-type ATPase family [Arabidopsis thaliana]
  misc_feature (1)..(450): Homolog of NCBI NO: 30686502 NR Description: BCS1 - like protein [Arabidopsis thaliana]
MFSPRDMPSPSSIFSAYASMTASIMLLRSMANDLVPQPIRGYLYSTFRYLIKPRSPTLTLIIEESTGIARNQVYDAAEAYLSTRVSPENERLKISKSAKEKKLTVRLEKGEKVVDCFDGACFKWRFICAESEKNNPNDHSNNNSISVRSEKRSFELSFPKKYKEMVLDSYLPFILEKAKEMKDEERVLKMHTLNTSYCYSGVKWDSINLEHPSTFETLAMEPELKNAVIEDLDRFVKRKEFYKRVGRAWKRGYLLYGPPGTGKSSLIAAMANYLKFDIFDLQLGNIVRDSDLRKLLLATANRSILVIEDIDCSVDLPERRHGDHGRKQTDVQLTLSGLLNFIDGLWSSCGDERIIIFTTNHKERLDPALLRPGRMDMHIHMSYCSYQGFKILASNYLETPSDHPLFGEVEGLIEDIQITPAQVAEELMKNEDPEATLEGFVKLLKRKKMEGDVCENSTPDKAEPTHQQSKRRKVGCKQKRGVGINKSISGVTQIRTRRMRGCSL

SEQ ID NO: 53173 - protein, 498 aa, Glycine max
  peptide (1)..(498): Ceres Seq. ID no. 14306496
  misc_feature (246)..(432): Pfam Name: ATPase family associated with various cellular Pfam Description: ATPase family associated with various cellular
  misc_feature (1)..(442): Homolog of NCBI NO: 39104562 NR Description: putative BCS1 protein [Arabidopsis thaliana]
  misc_feature (1)..(442): Homolog of NCBI NO: 30693380 NR Description: AAA-type ATPase family [Arabidopsis thaliana]
  misc_feature (1)..(452): Homolog of NCBI NO: 15238021 NR Description: AAA-type ATPase family [Arabidopsis thaliana]
  misc_feature (1)..(482): Homolog of NCBI NO: 25411838 NR Description: probable AAA-type ATPase [imported] - Arabidopsis
  misc_feature (1)..(481): Homolog of NCBI NO: 30680274 NR Description: AAA-type ATPase family [Arabidopsis thaliana]
  misc_feature (1)..(469): Homolog of NCBI NO: 21592769 NR Description: BCS1 protein-like protein [Arabidopsis thaliana]
  misc_feature (1)..(475): Homolog of NCBI NO: 30693378 NR Description: AAA-type ATPase family [Arabidopsis thaliana]
  misc_feature (1)..(475): Homolog of NCBI NO: 7485703 NR Description: hypothetical protein F18B3.210 - Arabidopsis
  misc_feature (1)..(455): Homolog of NCBI NO: 15238022 NR Description: AAA-type ATPase family [Arabidopsis thaliana]
  misc_feature (1)..(444): Homolog of NCBI NO: 30686502 NR Description: BCS1 - like protein [Arabidopsis thaliana]
MPSPSSIFSAYASMTASIMLLRSMANDLVPQPIRGYLYSTFRYLIKPRSPTLTLIIEESTGIARNQVYDAAEAYLSTRVSPENERLKISKSAKEKKLTVRLEKGEKVVDCFDGACFKWRFICAESEKNNPNDHSNNNSISVRSEKRSFELSFPKKYKEMVLDSYLPFILEKAKEMKDEERVLKMHTLNTSYCYSGVKWDSINLEHPSTFETLAMEPELKNAVIEDLDRFVKRKEFYKRVGRAWKRGYLLYGPPGTGKSSLIAAMANYLKFDIFDLQLGNIVRDSDLRKLLLATANRSILVIEDIDCSVDLPERRHGDHGRKQTDVQLTLSGLLNFIDGLWSSCGDERIIIFTTNHKERLDPALLRPGRMDMHIHMSYCSYQGFKILASNYLETPSDHPLFGEVEGLIEDIQITPAQVAEELMKNEDPEATLEGFVKLLKRKKMEGDVCENSTPDKAEPTHQQSKRRKVGCKQKRGVGINKSISGVTQIRTRRMRGCSL

SEQ ID NO: 53174 - DNA, 1538 bp, Glycine max
  misc_feature (1)..(1538): Ceres Seq. ID no. 14304760
gtcgaaagagaatagcaaaaagcacagaacaatccgaaaatggcggaacgcgaaacctccgaatccgaggacccctcgagttcagggtcggagtacgaggatgcacaaacggtagagggcaatggtgtgaagaagaagaagggtttgtcggagtacgagaaacagaggatgccgagaattgccgagaacagagccaggttggaggctctgggtttgccccaaatcgcttcctcgttaaagggttcttcgcagcctcataaagccacgaagggcaaagagaagaagaataaggttaacgatgacgatgatgaagaatatgaacccgaagaagacgagggagaacaagtatcgggttcttcaagtgaagaaaatgaggaccgtaaagacgaggactttgcaattgaaaacgcttcagggtcacggaaaagaaaggtgaagaacaaaagtttgaaaaagaaagccagagtttctgggaagaaacatgttagtaattcagagtacattgattacgatgatgatgaagctcttaggcaggcaattgctctttccttgcaagactctgcagaaggttcttatttgcctgacaagaatgtagtgaacaccagcaagaccgagaaaaagggaagcggtcatgttcaagaagataagggaagaaagaagaacaaaaaatcgtttgctagtcggctgcaactgactgaggatgagctcattgtacacttcttccagctagatgaagcaggaaaaggaactataagtgtaagggatatacaaagggcagctacagctcatgattttttatggacagacaaagagttagttgatatgattcgctacttcgatagtgatggagatggaaaggtaaggatcagaaggtctttctgattctgtttttctggcaggaggtcaggaagaaaacctataggctttttatgactttcaatttgaattttggcggataattgctaaaaccttttgaactatagaatgtattctttaggattcttagttcttacactagtccaaatatgttttgttgattgcaagtacttactgagcagtttaacctctttcactttattcatatttttcagtataacttcaaggtcagaaagcatagttctttcttacatcttttgagaaatatgaaaattggtgaatttgaccccttagcatcaaaattgtggaaaattaccatgaaaaattttgtgcactatgtttgattattgttgttgttattattattgttaaaaataattggctctgttgcagataagccttgatgatttctggaagattgttgttcgttgcaacttgattaaagggtcttgaaaatcttgatagaatcatggttagccagagatgatagcacattggaagatattacaaggactgttaaatatatatatatatatatatatatatatatatatatatatatatatatatatatatatatatatatatatatttcatggagtgacacagatttagtattccttgtatcccattatcactatatataacttatattgtactgt

SEQ ID NO: 53175 - protein, 280 aa, Glycine max
  peptide (1)..(280): Ceres Seq. ID no. 14304761
  misc_feature (17)..(193): Pfam Name: Eukaryotic translation initiation factor 3 Pfam Description: Eukaryotic translation initiation factor 3
  misc_feature (1)..(210): Homolog of NCBI NO: 8096269 NR Description: KED [Nicotiana tabacum]
  misc_feature (196)..(276): Homolog of NCBI NO: 18410357 NR Description: expressed protein [Arabidopsis thaliana]
  misc_feature (8)..(235): Homolog of NCBI NO: 18410357 NR Description: expressed protein [Arabidopsis thaliana]
  misc_feature (232)..(274): Homolog of NCBI NO: 15236720 NR Description: hypothetical protein [Arabidopsis thaliana]
  misc_feature (8)..(100): Homolog of NCBI NO: 15236720 NR Description: hypothetical protein [Arabidopsis thaliana]
  misc_feature (36)..(276): Homolog of NCBI NO: 38605904 NR Description: OSJNBb0020O11.16 [Oryza sativa (japonica
MAERETSESEDPSSSGSEYEDAQTVEGNGVKKKKGLSEYEKQRMPRIAENRARLEALGLPQIASSLKGSSQPHKATKGKEKKNKVNDDDDEEYEPEEDEGEQVSGSSSEENEDRKDEDFAIENASGSRKRKVKNKSLKKKARVSGKKHVSNSEYIDYDDDEALRQAIALSLQDSAEGSYLPDKNVVNTSKTEKKGSGHVQEDKGRKKNKKSFASRLQLTEDELIVHFFQLDEAGKGTISVRDIQRAATAHDFLWTDKELVDMIRYFDSDGDGKVRIRRSF

SEQ ID NO: 53176 - protein, 237 aa, Glycine max
  peptide (1)..(237): Ceres Seq. ID no. 14304762
  misc_feature (1)..(150): Pfam Name: Eukaryotic translation initiation factor 3 Pfam Description: Eukaryotic translation initiation factor 3
  misc_feature (1)..(167): Homolog of NCBI NO: 8096269 NR Description: KED [Nicotiana tabacum]
  misc_feature (153)..(233): Homolog of NCBI NO: 18410357 NR Description: expressed protein [Arabidopsis thaliana]
  misc_feature (1)..(192): Homolog of NCBI NO: 18410357 NR Description: expressed protein [Arabidopsis thaliana]
  misc_feature (189)..(231): Homolog of NCBI NO: 15236720 NR Description: hypothetical protein [Arabidopsis thaliana]
  misc_feature (1)..(57): Homolog of NCBI NO: 15236720 NR Description: hypothetical protein [Arabidopsis thaliana]
  misc_feature (1)..(233): Homolog of NCBI NO: 38605904 NR Description: OSJNBb0020O11.16 [Oryza sativa (japonica
MPRIAENRARLEALGLPQIASSLKGSSQPHKATKGKEKKNKVNDDDDEEYEPEEDEGEQVSGSSSEENEDRKDEDFAIENASGSRKRKVKNKSLKKKARVSGKKHVSNSEYIDYDDDEALRQAIALSLQDSAEGSYLPDKNVVNTSKTEKKGSGHVQEDKGRKKNKKSFASRLQLTEDELIVHFFQLDEAGKGTISVRDIQRAATAHDFLWTDKELVDMIRYFDSDGDGKVRIRRSF

SEQ ID NO: 53177 - DNA, 1490 bp, Glycine max
  misc_feature (1)..(1490): Ceres Seq. ID no. 14311287
ggatgcatttatacttacaccgaatcacgaggcgacaacatcgacatggagggtctcatcaacggcttcatcaacgttgctctcggagctgatggtggcgatcgggaagaacaacaacacgggagagacgaccgtagtagaagctcctgggctgaagtcgtctcccaggatcaacaagatcaccctcttcctcatcaccaacacaaggaacaatatcgtcctcagtacgaggagccccaatctcaaagttcctacaaaccccagaaggtggatgaaggtgaagatggatggcagactgttggtagaaagccttcaaggcatccacataaggttcaaaaggacaactggaacagctataaacgacctgctgatgagcaagaatactctaatgaggttgaagttggtgctgatgtggagccctcagaagatgaacttgctgatctgtcaagagcttgtgaaaaactctgggctcttgatttaaatcgtttggtacctggcttacactatgaaattgactgtggagaagggaaaaaggtataccaaaaggaagatatggcacaggggagcttgtttacttgggttagcgatgatgtattcagaaagcctacatttgcccgttttctttcacttttagataattacaatccacatcaaggatgtaaggaagtagtcacatctgaagagagacaagagcaagcttctttcatagaagaaatcagtagaacagcaccaattaagtatcttcacaagtatcttgcatccaagcaaattgtatcagggaattaccaagatttcaaaagaatgattaccagtctgtggtttgacctttatggccgtggtggcacttctggttcctcttctgcttttgaacatgtttttgttggagaaaccaaacaatgtggtgaagtttctggctttcataactggctgcagttttaccttgaagaagcaaaggggagagttgattatcaaggatatatttttccccgtcgacggggagaaactcctgactctgaagctcagcttctgactattcagtttgaatggaatggtgtcctaaaatctgtatccagcactttggttggagtgagccctgaatttgaaattgctttgtataccctgtgtttctatgttggtagggaggataaccacattcagcttggtccatatggggttaatatcaagtgctatcgattgggtgatcgaattggatctgttttccccattgcagattcttgaattttcagtttccagcattggtagtagttgttccctatgaaatcgtttgttatgcatacttgagaacttgtaactcatgggtgtaaaggcaacaataccaattagatcaagtagtacaaggtagcacaatatttactgaattacatacatttggtggttcttttgtcttgtatgaagacagaaattcttgtggaactagtttacttaatttcttcattaagtccttaatgatatgctagtatgttgttatt

SEQ ID NO: 53178 - protein, 412 aa, Glycine max
  peptide (1)..(412): Ceres Seq. ID no. 14311288
  misc_feature (146)..(387): Homolog of NCBI NO: 6561907 NR Description: pancreatic protein with two somatomedin B domains
  misc_feature (141)..(397): Homolog of NCBI NO: 6679429 NR Description: placental protein 11 related [Mus musculus]
  misc_feature (49)..(397): Homolog of NCBI NO: 5174623 NR Description: placental protein 11 precursor; 22 serine
  misc_feature (147)..(409): Homolog of NCBI NO: 22797893 NR Description: endoU protein [Xenopus laevis]
  misc_feature (169)..(301): Homolog of NCBI NO: 7488185 NR Description: probable serine proteinase - Arabidopsis thaliana
  misc_feature (79)..(301): Homolog of NCBI NO: 30683929 NR Description: serine protease protein -related [Arabidopsis
  misc_feature (79)..(408): Homolog of NCBI NO: 25407557 NR Description: probable serine proteinase-like protein
  misc_feature (119)..(412): Homolog of NCBI NO: 29367523 NR Description: putative serine protease-like protein
  misc_feature (35)..(412): Homolog of NCBI NO: 38345945 NR Description: OSJNBb0103I08.16 [Oryza sativa (japonica
  misc_feature (33)..(412): Homolog of NCBI NO: 20260612 NR Description: putative serine protease-like protein
GCIYTYTESRGDNIDMEGLINGFINVALGADGGDREEQQHGRDDRSRSSWAEVVSQDQQDHPLPHHQHKEQYRPQYEEPQSQSSYKPQKVDEGEDGWQTVGRKPSRHPHKVQKDNWNSYKRPADEQEYSNEVEVGADVEPSEDELADLSRACEKLWALDLNRLVPGLHYEIDCGEGKKVYQKEDMAQGSLFTWVSDDVFRKPTFARFLSLLDNYNPHQGCKEVVTSEERQEQASFIEEISRTAPIKYLHKYLASKQIVSGNYQDFKRMITSLWFDLYGRGGTSGSSSAFEHVFVGETKQCGEVSGFHNWLQFYLEEAKGRVDYQGYIFPRRRGETPDSEAQLLTIQFEWNGVLKSVSSTLVGVSPEFEIALYTLCFYVGREDNHIQLGPYGVNIKCYRLGDRIGSVFPIADS

SEQ ID NO: 53179 - protein, 397 aa, Glycine max
  peptide (1)..(397): Ceres Seq. ID no. 14311289
  misc_feature (131)..(372): Homolog of NCBI NO: 6561907 NR Description: pancreatic protein with two somatomedin B domains
  misc_feature (126)..(382): Homolog of NCBI NO: 6679429 NR Description: placental protein 11 related [Mus musculus]
  misc_feature (34)..(382): Homolog of NCBI NO: 5174623 NR Description: placental protein 11 precursor; 22 serine
  misc_feature (132)..(394): Homolog of NCBI NO: 22797893 NR Description: endoU protein [Xenopus laevis]
  misc_feature (154)..(286): Homolog of NCBI NO: 7488185 NR Description: probable serine proteinase - Arabidopsis thaliana
  misc_feature (64)..(286): Homolog of NCBI NO: 30683929 NR Description: serine protease protein -related [Arabidopsis
  misc_feature (64)..(393): Homolog of NCBI NO: 25407557 NR Description: probable serine proteinase-like protein
  misc_feature (104)..(397): Homolog of NCBI NO: 29367523 NR Description: putative serine protease-like protein
  misc_feature (20)..(397): Homolog of NCBI NO: 38345945 NR Description: OSJNBb0103I08.16 [Oryza sativa (japonica
  misc_feature (18)..(397): Homolog of NCBI NO: 20260612 NR Description: putative serine protease-like protein
MEGLINGFINVALGADGGDREEQQHGRDDRSRSSWAEVVSQDQQDHPLPHHQHKEQYRPQYEEPQSQSSYKPQKVDEGEDGWQTVGRKPSRHPHKVQKDNWNSYKRPADEQEYSNEVEVGADVEPSEDELADLSRACEKLWALDLNRLVPGLHYEIDCGEGKKVYQKEDMAQGSLFTWVSDDVFRKPTFARFLSLLDNYNPHQGCKEVVTSEERQEQASFIEEISRTAPIKYLHKYLASKQIVSGNYQDFKRMITSLWFDLYGRGGTSGSSSAFEHVFVGETKQCGEVSGFHNWLQFYLEEAKGRVDYQGYIFPRRRGETPDSEAQLLTIQFEWNGVLKSVSSTLVGVSPEFEIALYTLCFYVGREDNHIQLGPYGVNIKCYRLGDRIGSVFPIADS

SEQ ID NO: 53180 - protein, 228 aa, Glycine max
  peptide (1)..(228): Ceres Seq. ID no. 14311290
  misc_feature (1)..(203): Homolog of NCBI NO: 6561907 NR Description: pancreatic protein with two somatomedin B domains
  misc_feature (1)..(213): Homolog of NCBI NO: 6679429 NR Description: placental protein 11 related [Mus musculus]
  misc_feature (1)..(213): Homolog of NCBI NO: 5174623 NR Description: placental protein 11 precursor; 22 serine
  misc_feature (1)..(225): Homolog of NCBI NO: 22797893 NR Description: endoU protein [Xenopus laevis]
  misc_feature (1)..(117): Homolog of NCBI NO: 7488185 NR Description: probable serine proteinase - Arabidopsis thaliana
  misc_feature (1)..(117): Homolog of NCBI NO: 30683929 NR Description: serine protease protein -related [Arabidopsis
  misc_feature (1)..(224): Homolog of NCBI NO: 25407557 NR Description: probable serine proteinase-like protein
  misc_feature (1)..(228): Homolog of NCBI NO: 29367523 NR Description: putative serine protease-like protein
  misc_feature (1)..(228): Homolog of NCBI NO: 38345945 NR Description: OSJNBb0103I08.16 [Oryza sativa (japonica
  misc_feature (1)..(228): Homolog of NCBI NO: 20260612 NR Description: putative serine protease-like protein
MAQGSLFTWVSDDVFRKPTFARFLSLLDNYNPHQGCKEVVTSEERQEQASFIEEISRTAPIKYLHKYLASKQIVSGNYQDFKRMITSLWFDLYGRGGTSGSSSAFEHVFVGETKQCGEVSGFHNWLQFYLEEAKGRVDYQGYIFPRRRGETPDSEAQLLTIQFEWNGVLKSVSSTLVGVSPEFEIALYTLCFYVGREDNHIQLGPYGVNIKCYRLGDRIGSVFPIADS

SEQ ID NO: 53181 - DNA, 1606 bp, Glycine max
  misc_feature (1)..(1606): Ceres Seq. ID no. 14304756
cgcggccgcccgatggagatcgacccgctcgtcaccgtggtgcaggagatgggccgcttgaccggtcgcccgacgccggcgctggattcggtgctggcgatggtgacccagcgcgcccgcatcgccggcctctatgacggcgtctccgcgcccgcggatcctcgcgcgctggcggtggcgtgatggcgggcgagacaaaaaagtggctgcgcttccgccacgccggcaccaccggcttcggcacgctctccgcatccggcatcagcgtgcatgagggcgagatgttcggccgcaacgccgccaccggcaggatgctggcgctgccggaggtcgagctgctggcgccctgcgcccccagcaagatcgtcgcgctctggaataattttcacgcgctcgcggccaagctcaaccagccggagccgcctgagccgctctatctgctcaaggccaccacgaccatcacgacaccaggcgccgtgatccgccgcccgtcctattacgacggcaagaccacctatgaaggcgagctcggcatcatcatcggcaagacctgcgcgcgcgtctcgcccgatgaagccgacagcttcatcttcggctacacctgcgtcaacgacatcaccgccaacgacatcctgaccagcgaccccacctttccccaatgggcccgcgccaagggcatcgacgattacggcccgttcggccctgtcatcaccaccggcctcgatccggccaggctcaccgtccgcaccatcctcaacggcgccgagcggcagaactatccgatctccgacatgattttttccgcgcaagccctggtgagcaagatctcccatgacatgaccctgcttccgggcgacctcatcgcggtcggcacctcggtcggcgtcggcgtgatgaaggagccggtcaatacggtgacggtcgcgatcgacggcatcggcgagctgaccaacgagtttcggttgtagccccgacgtcattccggggcgcgcgtagcgcgagctacggtgccaattgcgaacctgagaatccactcccctaccgtctctgctgctcgatggattccgggctcggcgctttcgcgccgccccggaatgacggctaagccgcccacctccacccgaccggccgacgcaaccagccgtggatcgcgcctccggacacgcccagcaacccgtccgccccttgatctcggttccactctccaatagcaatcatggcgaaaatatgcaccggcgtggggcgtcgcgatgtggctgtttttcctggctgcctggtttgtcctgctcgccgccatcgcgctggtcgccccgcaggcgtttggcctggacatcacccatttgcccgccctgttcgcgagccagccgatgccacagcgcatcgcgatcggtgcgatcctcgtggccgggctgacgctgatcggcgcctcggcctggcggctctcgcgccaggaccggcgcctcgacacgctccgtgatcgcctcaagaagacccgggaagacgtcgtcgtcgcccatgccttacagaaccatctcgacaccacggtccagcacctgatcgagagcgatccccgggaggccgtgtccgcactgcacgacaagctcgg

SEQ ID NO: 53182 - protein, 261 aa, Glycine max
  peptide (1)..(261): Ceres Seq. ID no. 14304757
  misc_feature (75)..(240): Pfam Name: Fumarylacetoacetate (FAA) hydrolase family Pfam Description: Fumarylacetoacetate (FAA) hydrolase family
  misc_feature (7)..(257): Homolog of NCBI NO: 15679504 NR Description: 2-hydroxyhepta-2,4-diene-1,7-dioate isomerase
  misc_feature (44)..(260): Homolog of NCBI NO: 20806781 NR Description: 2-keto-4-pentenoate
  misc_feature (6)..(257): Homolog of NCBI NO: 17232295 NR Description: 2-hydroxyhepta-2,4-diene-1,7-dioate isomerase
  misc_feature (10)..(258): Homolog of NCBI NO: 29829234 NR Description: putative fumarylacetoacetate (FAA) hydrolase
  misc_feature (10)..(258): Homolog of NCBI NO: 21223901 NR Description: conserved hypothetical protein SC1C2.27
  misc_feature (19)..(257): Homolog of NCBI NO: 37523393 NR Description: probable 2-hydroxyhepta-2,4-diene-1,7-dioate
  misc_feature (8)..(257): Homolog of NCBI NO: 22988653 NR Description: hypothetical protein [Burkholderia fungorum]
  misc_feature (3)..(259): Homolog of NCBI NO: 23010084 NR Description: hypothetical protein [Magnetospirillum
  misc_feature (7)..(260): Homolog of NCBI NO: 22963913 NR Description: hypothetical protein [Rhodopseudomonas palustris]
  misc_feature (1)..(261): Homolog of NCBI NO: 27378257 NR Description: bll3146 [Bradyrhizobium japonicum]
MAGETKKWLRFRHAGTTGFGTLSASGISVHEGEMFGRNAATGRMLALPEVELLAPCAPSKIVALWNNFHALAAKLNQPEPPEPLYLLKATTTITTPGAVIRRPSYYDGKTTYEGELGIIIGKTCARVSPDEADSFIFGYTCVNDITANDILTSDPTFPQWARAKGIDDYGPFGPVITTGLDPARLTVRTILNGAERQNYPISDMIFSAQALVSKISHDMTLLPGDLIAVGTSVGVGVMKEPVNTVTVAIDGIGELTNEFRL

SEQ ID NO: 53183 - protein, 228 aa, Glycine max
  peptide (1)..(228): Ceres Seq. ID no. 14304758
  misc_feature (42)..(207): Pfam Name: Fumarylacetoacetate (FAA) hydrolase family Pfam Description: Fumarylacetoacetate (FAA) hydrolase family
  misc_feature (1)..(224): Homolog of NCBI NO: 15679504 NR Description: 2-hydroxyhepta-2,4-diene-1,7-dioate isomerase
  misc_feature (11)..(227): Homolog of NCBI NO: 20806781 NR Description: 2-keto-4-pentenoate
  misc_feature (1)..(224): Homolog of NCBI NO: 17232295 NR Description: 2-hydroxyhepta-2,4-diene-1,7-dioate isomerase
  misc_feature (1)..(225): Homolog of NCBI NO: 29829234 NR Description: putative fumarylacetoacetate (FAA) hydrolase
  misc_feature (1)..(225): Homolog of NCBI NO: 21223901 NR Description: conserved hypothetical protein SC1C2.27
  misc_feature (1)..(224): Homolog of NCBI NO: 37523393 NR Description: probable 2-hydroxyhepta-2,4-diene-1,7-dioate
  misc_feature (1)..(224): Homolog of NCBI NO: 22988653 NR Description: hypothetical protein [Burkholderia fungorum]
  misc_feature (1)..(226): Homolog of NCBI NO: 23010084 NR Description: hypothetical protein [Magnetospirillum
  misc_feature (1)..(227): Homolog of NCBI NO: 22963913 NR Description: hypothetical protein [Rhodopseudomonas palustris]
  misc_feature (1)..(228): Homolog of NCBI NO: 27378257 NR Description: bll3146 [Bradyrhizobium japonicum]
MFGRNAATGRMLALPEVELLAPCAPSKIVALWNNFHALAAKLNQPEPPEPLYLLKATTTITTPGAVIRRPSYYDGKTTYEGELGIIIGKTCARVSPDEADSFIFGYTCVNDITANDILTSDPTFPQWARAKGIDDYGPFGPVITTGLDPARLTVRTILNGAERQNYPISDMIFSAQALVSKISHDMTLLPGDLIAVGTSVGVGVMKEPVNTVTVAIDGIGELTNEFRL

SEQ ID NO: 53184 - protein, 218 aa, Glycine max
  peptide (1)..(218): Ceres Seq. ID no. 14304759
  misc_feature (32)..(197): Pfam Name: Fumarylacetoacetate (FAA) hydrolase family Pfam Description: Fumarylacetoacetate (FAA) hydrolase family
  misc_feature (1)..(214): Homolog of NCBI NO: 15679504 NR Description: 2-hydroxyhepta-2,4-diene-1,7-dioate isomerase
  misc_feature (1)..(217): Homolog of NCBI NO: 20806781 NR Description: 2-keto-4-pentenoate
  misc_feature (1)..(214): Homolog of NCBI NO: 17232295 NR Description: 2-hydroxyhepta-2,4-diene-1,7-dioate isomerase
  misc_feature (1)..(215): Homolog of NCBI NO: 29829234 NR Description: putative fumarylacetoacetate (FAA) hydrolase
  misc_feature (1)..(215): Homolog of NCBI NO: 21223901 NR Description: conserved hypothetical protein SC1C2.27
  misc_feature (1)..(214): Homolog of NCBI NO: 37523393 NR Description: probable 2-hydroxyhepta-2,4-diene-1,7-dioate
  misc_feature (1)..(214): Homolog of NCBI NO: 22988653 NR Description: hypothetical protein [Burkholderia fungorum]
  misc_feature (1)..(216): Homolog of NCBI NO: 23010084 NR Description: hypothetical protein [Magnetospirillum
  misc_feature (1)..(217): Homolog of NCBI NO: 22963913 NR Description: hypothetical protein [Rhodopseudomonas palustris]
  misc_feature (1)..(218): Homolog of NCBI NO: 27378257 NR Description: bll3146 [Bradyrhizobium japonicum]
MLALPEVELLAPCAPSKIVALWNNFHALAAKLNQPEPPEPLYLLKATTTITTPGAVIRRPSYYDGKTTYEGELGIIIGKTCARVSPDEADSFIFGYTCVNDITANDILTSDPTFPQWARAKGIDDYGPFGPVITTGLDPARLTVRTILNGAERQNYPISDMIFSAQALVSKISHDMTLLPGDLIAVGTSVGVGVMKEPVNTVTVAIDGIGELTNEFRL

SEQ ID NO: 53185 - DNA, 1449 bp, Glycine max
  misc_feature (1)..(1449): Ceres Seq. ID no. 15174638
agttcgaccaaacggcgtcgttgccatacgatttctcggagttacccgatctcgacacggatcagattcaaaacctcaaaccaacgctggtaacaatggaagaagactcagggataagactcgttcacacgctgatgacgtgtgcggattccgtgcaacatggcgacctccctttcgcgggctccctcatcgagaacatgcaggggctgctggcgcacgtgaataccaacatcggaatcggtaaagtcgccggatacttcatcgatgccttgcgccgccgtatctttgcgcaaggcgtgtttctaacgtcgtgttcgtatccgatcgaggacgacgtactctaccaccactactacgaggcctgcccttacttgaagttcgcgcatttcactgcgaaccaggctattttagaagccttcaacggccatgattgtgtccacgtgattgacttcaacctcatgcaggggctccagtggcccgcgctgattcaggccctggcgcttcggcccggtgggcctccgctgttgaggctcacgggaattgggcttccctcgtccgacaaccgcgacacgctccgcgaaattgggctcaggctcgctgagctggcgcggtccgtgaatgttaggtttgcatttcgtggcgtggcggcgtggcgccttgaagacgtgaagccgtggatgctgcaggtgaatccgaacgaagccgtggcggttaactccatcatgcagttgcatcggcttcttgcttcggactccgatccagcaggttcgggcatcgaaaccgtgctgggttggatccgaagcttgaacccgaagattatttccgttgtagaacaggaggcgaatcataacgaggacatgttcttggagcggttcacggaagcgttacattactactcgaccgttttcgactcgcttgaagcgtgtccggtcgaaccggacaaggcgcttgcggagatgtacctgcagagggagatatgcaacgtggtgtgctgcgagggaccggcgcgagtcgagaggcacgagccgctggataagtggaggaagcggctcgggaaagccggcttcaagccgctgcatttggggtccaacgcgtacaagcaggccagcatgttgttgactcttttctcggctgaagggtattgcgtggaagagaatcaaggatgcttgactttggggtggcatagccgccctctcattgcggcttcggcttggcatgccgcgccggtgcaggacagggaaacgctgcgtttcgagcagtgagtcatgggtttgaagaaacggaaaatttgtttatttattgtagtaactagtaaacaaaaagagtggtgtataatgtaaatttttctatctttctttattttctctttctttttttttcttttctgtttttttttaaatggtcatttttgcgaaattagtttgtggatcgtctatcctttcaattttc

SEQ ID NO: 53186 - protein, 419 aa, Glycine max
  peptide (1)..(419): Ceres Seq. ID no. 15174639
  misc_feature (33)..(307): Pfam Name: GRAS family transcription factor Pfam Description: GRAS family transcription factor
  misc_feature (19)..(404): Homolog of NCBI NO: 2339978 NR Description: RGA1 protein [Arabidopsis thaliana]
  misc_feature (19)..(404): Homolog of NCBI NO: 2569940 NR Description: GRS protein [Arabidopsis thaliana]
  misc_feature (19)..(404): Homolog of NCBI NO: 2339980 NR Description: RGA2 protein [Arabidopsis thaliana]
  misc_feature (19)..(404): Homolog of NCBI NO: 15223951 NR Description: gibberellin response modulator (GAI/RGA2)
  misc_feature (19)..(404): Homolog of NCBI NO: 2569938 NR Description: GAI [Arabidopsis thaliana]
  misc_feature (26)..(408): Homolog of NCBI NO: 31322802 NR Description: GAI-like protein [Lycopersicon esculentum]
  misc_feature (26)..(405): Homolog of NCBI NO: 29122893 NR Description: GIA/RGA-like gibberellin response modulator
  misc_feature (23)..(407): Homolog of NCBI NO: 20334379 NR Description: GAI-like protein 1 [Vitis vinifera]
  misc_feature (5)..(407): Homolog of NCBI NO: 34911732 NR Description: putative OsGAI [Oryza sativa (japonica
  misc_feature (5)..(407): Homolog of NCBI NO: 39841619 NR Description: GAI protein [Oryza sativa]
FDQTASLPYDFSELPDLDTDQIQNLKPTLVTMEEDSGIRLVHTLMTCADSVQHGDLPFAGSLIENMQGLLAHVNTNIGIGKVAGYFIDALRRRIFAQGVFLTSCSYPIEDDVLYHHYYEACPYLKFAHFTANQAILEAFNGHDCVHVIDFNLMQGLQWPALIQALALRPGGPPLLRLTGIGLPSSDNRDTLREIGLRLAELARSVNVRFAFRGVAAWRLEDVKPWMLQVNPNEAVAVNSIMQLHRLLASDSDPAGSGIETVLGWIRSLNPKIISVVEQEANHNEDMFLERFTEALHYYSTVFDSLEACPVEPDKALAEMYLQREICNVVCCEGPARVERHEPLDKWRKRLGKAGFKPLHLGSNAYKQASMLLTLFSAEGYCVEENQGCLTLGWHSRPLIAASAWHAAPVQDRETLRFEQ

SEQ ID NO: 53187 - protein, 388 aa, Glycine max
  peptide (1)..(388): Ceres Seq. ID no. 15174640
  misc_feature (2)..(276): Pfam Name: GRAS family transcription factor Pfam Description: GRAS family transcription factor
  misc_feature (1)..(373): Homolog of NCBI NO: 2339978 NR Description: RGA1 protein [Arabidopsis thaliana]
  misc_feature (1)..(373): Homolog of NCBI NO: 2569940 NR Description: GRS protein [Arabidopsis thaliana]
  misc_feature (1)..(373): Homolog of NCBI NO: 2339980 NR Description: RGA2 protein [Arabidopsis thaliana]
  misc_feature (1)..(373): Homolog of NCBI NO: 15223951 NR Description: gibberellin response modulator (GAI/RGA2)
  misc_feature (1)..(373): Homolog of NCBI NO: 2569938 NR Description: GAI [Arabidopsis thaliana]
  misc_feature (1)..(377): Homolog of NCBI NO: 31322802 NR Description: GAI-like protein [Lycopersicon esculentum]
  misc_feature (1)..(374): Homolog of NCBI NO: 29122893 NR Description: GIA/RGA-like gibberellin response modulator
  misc_feature (1)..(376): Homolog of NCBI NO: 20334379 NR Description: GAI-like protein 1 [Vitis vinifera]
  misc_feature (1)..(376): Homolog of NCBI NO: 34911732 NR Description: putative OsGAI [Oryza sativa (japonica
  misc_feature (1)..(376): Homolog of NCBI NO: 39841619 NR Description: GAI protein [Oryza sativa]
MEEDSGIRLVHTLMTCADSVQHGDLPFAGSLIENMQGLLAHVNTNIGIGKVAGYFIDALRRRIFAQGVFLTSCSYPIEDDVLYHHYYEACPYLKFAHFTANQAILEAFNGHDCVHVIDFNLMQGLQWPALIQALALRPGGPPLLRLTGIGLPSSDNRDTLREIGLRLAELARSVNVRFAFRGVAAWRLEDVKPWMLQVNPNEAVAVNSIMQLHRLLASDSDPAGSGIETVLGWIRSLNPKIISVVEQEANHNEDMFLERFTEALHYYSTVFDSLEACPVEPDKALAEMYLQREICNVVCCEGPARVERHEPLDKWRKRLGKAGFKPLHLGSNAYKQASMLLTLFSAEGYCVEENQGCLTLGWHSRPLIAASAWHAAPVQDRETLRFEQ

SEQ ID NO: 53188 - protein, 375 aa, Glycine max
  peptide (1)..(375): Ceres Seq. ID no. 15174641
  misc_feature (1)..(263): Pfam Name: GRAS family transcription factor Pfam Description: GRAS family transcription factor
  misc_feature (1)..(360): Homolog of NCBI NO: 2339978 NR Description: RGA1 protein [Arabidopsis thaliana]
  misc_feature (1)..(360): Homolog of NCBI NO: 2569940 NR Description: GRS protein [Arabidopsis thaliana]
  misc_feature (1)..(360): Homolog of NCBI NO: 2339980 NR Description: RGA2 protein [Arabidopsis thaliana]
  misc_feature (1)..(360): Homolog of NCBI NO: 15223951 NR Description: gibberellin response modulator (GAI/RGA2)
  misc_feature (1)..(360): Homolog of NCBI NO: 2569938 NR Description: GAI [Arabidopsis thaliana]
  misc_feature (1)..(364): Homolog of NCBI NO: 31322802 NR Description: GAI-like protein [Lycopersicon esculentum]
  misc_feature (1)..(361): Homolog of NCBI NO: 29122893 NR Description: GIA/RGA-like gibberellin response modulator
  misc_feature (1)..(363): Homolog of NCBI NO: 20334379 NR Description: GAI-like protein 1 [Vitis vinifera]
  misc_feature (1)..(363): Homolog of NCBI NO: 34911732 NR Description: putative OsGAI [Oryza sativa (japonica
  misc_feature (1)..(363): Homolog of NCBI NO: 39841619 NR Description: GAI protein [Oryza sativa]
MTCADSVQHGDLPFAGSLIENMQGLLAHVNTNIGIGKVAGYFIDALRRRIFAQGVFLTSCSYPIEDDVLYHHYYEACPYLKFAHFTANQAILEAFNGHDCVHVIDFNLMQGLQWPALIQALALRPGGPPLLRLTGIGLPSSDNRDTLREIGLRLAELARSVNVRFAFRGVAAWRLEDVKPWMLQVNPNEAVAVNSIMQLHRLLASDSDPAGSGIETVLGWIRSLNPKIISVVEQEANHNEDMFLERFTEALHYYSTVFDSLEACPVEPDKALAEMYLQREICNVVCCEGPARVERHEPLDKWRKRLGKAGFKPLHLGSNAYKQASMLLTLFSAEGYCVEENQGCLTLGWHSRPLIAASAWHAAPVQDRETLRFEQ

SEQ ID NO: 53189 - DNA, 1244 bp, Glycine max
  misc_feature (1)..(1244): Ceres Seq. ID no. 14304716
aacatcacacatcacaacacaacttccacattccgatggaggagtcatgggaaaattggcatcttcatatggaaaccggttgcgagaacgatttcttaggcaagtgtcacggcactgacgatgacgagttcttcagagacatccttcagcaaccaccacctgcggctttctcttccgaaagcgaaagcgatcactccttcctcgctgtccaaaacacttctagcatccccaacgacggtgccgttttgtctcctaggaattacctcgtcaaaagcagcagctccaactccttggtctctcaaaacgcttccaaacgacctcgtcgtttgtcctctcccaggacttacattctgtccttcgacaactcaaccatggttccggccacacccgaaacccgcccccgctcctccaataattcccctctgcctgccaaacgggccctggaaagcccaggcccagtagcccgaaggcccaaccaaggagctaagaagataagaacctcttctcagaccatcgatcacataatggccgagagacgacggaggcaggaactcacggagaggttcatagcactctcagccacgattcccggcttgaacaagacggacaaggcttctgtacttcgagcagcaattgattacgtgaaacaacttcaagaaagggtacaggaactggagaaacaagacaaaaaaaggagtacagagtcagtaatattcatcaagaaacccgacccaaatggaaacgatgaagacaccacctccactgaaacgaactgtagcatccttcctgagatggaagcaagggtgatggggaaggaggtgctcattgagatccactgtgagaaagaaaatggtgttgagctaaaaatattggaccaccttgaaaatcttcatctcagtgttaccggaagcagtgtcttgccatttggaaattctgctctctgcattaccatcacaactcagatgggtgacgggtaccaaatgactgtgaatgatctagtgaaaaaccttagacaattgttctcaaaatcacatgtgctaagcgacagcgatccgtactagtgtatcaaacaatgagttgtagtgtatggaaatcgaaagttttggatttattactctctttgattttggcttgttttcatgttgatcgtaacgttaataaacaaatactaaatgtctgacatgaatttatgcccggcatctaccctgatatcccattaatgtgaaaacgaaatttctttttag

SEQ ID NO: 53190 - protein, 352 aa, Glycine max
  peptide (1)..(352): Ceres Seq. ID no. 14304717
  misc_feature (169)..(218): Pfam Name: Helix-loop-helix DNA-binding domain Pfam Description: Helix-loop-helix DNA-binding domain
HHTSQHNFHIPMEESWENWHLHMETGCENDFLGKCHGTDDDEFFRDILQQPPPAAFSSESESDHSFLAVQNTSSIPNDGAVLSPRNYLVKSSSSNSLVSQNASKRPRRLSSPRTYILSFDNSTMVPATPETRPRSSNNSPLPAKRALESPGPVARRPNQGAKKIRTSSQTIDHIMAERRRRQELTERFIALSATIPGLNKTDKASVLRAAIDYVKQLQERVQELEKQDKKRSTESVIFIKKPDPNGNDEDTTSTETNCSILPEMEARVMGKEVLIEIHCEKENGVELKILDHLENLHLSVTGSSVLPFGNSALCITITTQMGDGYQMTVNDLVKNLRQLFSKSHVLSDSDPY

SEQ ID NO: 53191 - protein, 341 aa, Glycine max
  peptide (1)..(341): Ceres Seq. ID no. 14304718
  misc_feature (158)..(207): Pfam Name: Helix-loop-helix DNA-binding domain Pfam Description: Helix-loop-helix DNA-binding domain
MEESWENWHLHMETGCENDFLGKCHGTDDDEFFRDILQQPPPAAFSSESESDHSFLAVQNTSSIPNDGAVLSPRNYLVKSSSSNSLVSQNASKRPRRLSSPRTYILSFDNSTMVPATPETRPRSSNNSPLPAKRALESPGPVARRPNQGAKKIRTSSQTIDHIMAERRRRQELTERFIALSATIPGLNKTDKASVLRAAIDYVKQLQERVQELEKQDKKRSTESVIFIKKPDPNGNDEDTTSTETNCSILPEMEARVMGKEVLIEIHCEKENGVELKILDHLENLHLSVTGSSVLPFGNSALCITITTQMGDGYQMTVNDLVKNLRQLFSKSHVLSDSDPY

SEQ ID NO: 53192 - protein, 330 aa, Glycine max
  peptide (1)..(330): Ceres Seq. ID no. 14304719
  misc_feature (147)..(196): Pfam Name: Helix-loop-helix DNA-binding domain Pfam Description: Helix-loop-helix DNA-binding domain
METGCENDFLGKCHGTDDDEFFRDILQQPPPAAFSSESESDHSFLAVQNTSSIPNDGAVLSPRNYLVKSSSSNSLVSQNASKRPRRLSSPRTYILSFDNSTMVPATPETRPRSSNNSPLPAKRALESPGPVARRPNQGAKKIRTSSQTIDHIMAERRRRQELTERFIALSATIPGLNKTDKASVLRAAIDYVKQLQERVQELEKQDKKRSTESVIFIKKPDPNGNDEDTTSTETNCSILPEMEARVMGKEVLIEIHCEKENGVELKILDHLENLHLSVTGSSVLPFGNSALCITITTQMGDGYQMTVNDLVKNLRQLFSKSHVLSDSDPY

SEQ ID NO: 53193 - DNA, 1447 bp, Glycine max
  misc_feature (1)..(1447): Ceres Seq. ID no. 14304969
tcttcatctcaaagtttcactctcactcttcttcttcttcttcttcatcctttctgatctgtgctgttttttcagggtacaacaaaattgggtgctttcggttaaactgtgatgtctccgccagtgctgagcataggggaggaggagggtaaaagcaatgtcactttgttggtttcctcatcaaccaccatggaaagtgtgtgtctcaagagcttagaatttaaagagcgcaactacatgggattatctgattgttcttctgtggacagctcggttccgtccttctctgaagagactaaaagtaatctgaacctgaaagccactgaactcaggctcgggcttccaggatcacagtctcctgatagagattctgatctttgcttaagaagctcaactcaatttgatgaaaaaactttgtttccgttgcgtcctttgactgatgatcaccattcttcagccaagactgctgttttgggaaacaaaagagggttctctgatgccatgaacggcttctcctcagaggggaaattcctagttgattcggaggccgccaatccgatactgtctcccaggcctgcttctaacttgggattaaaacctggttctacacttgagaaggttggagttcagcaaaccaaaatgaaagaagtagcaacaacaaaggccaatgaagctagacccactattgatggttctgcaaataataataacagtgcaccagctaccaaggctcaggttgtgggatggcctcctataagatcattccggaaaaattcattggctaccacttcaaagaacaatgaagaagttgatggaaaagtgggggttggtgcactgtttgtcaaggtcagtatggatggtgctccctatttaaggaaagtagacttgaagaattactctacatatccagaattatcttctgctctagaaaagatgttcagctgttttactatgagtaaatgtggatctcatggaattctgggcagggagatgctgaatgaaaccaagctgaaggaccttcttcatggatcagaatatgttcttacatatgaggacagagagggcgattggatgcttgtgggtgatgttccctgggagatgtttattgaaacatgcaagaggctgaggatcatgaagagttctgatgccattggtctagctcccagggctgttgaaaaatgtaagagcagaacctaggcagtaccagtgttcctcttcgaacatggtgtattggaagcgagaactgaaggcatatgggactggatagaatctcatactaagctgccataatccttctattgtttattatgtgtccgttttatgttgtcatggcgtttatgatttagtaagcttcttttcaagattgttgtgataaaacttaacaaaactctaagacttgactgtgggagtagctatattttatgtacccgagttaatgttatggttg

SEQ ID NO: 53194 - protein, 361 aa, Glycine max
  peptide (1)..(361): Ceres Seq. ID no. 14304970
  misc_feature (66)..(353): Pfam Name: AUX/IAA family Pfam Description: AUX/IAA family
  misc_feature (1)..(360): Homolog of NCBI NO: 16610193 NR Description: IAA9 protein [Nicotiana tabacum]
  misc_feature (1)..(360): Homolog of NCBI NO: 25989504 NR Description: Aux/IAA protein [Solanum tuberosum]
  misc_feature (1)..(361): Homolog of NCBI NO: 6136832 NR Description: Aux/IAA protein [Cucumis sativus]
  misc_feature (1)..(360): Homolog of NCBI NO: 29465672 NR Description: Aux/IAA protein [Vitis vinifera]
  misc_feature (1)..(360): Homolog of NCBI NO: 20269051 NR Description: aux/IAA protein [Populus tremula x Populus
MSPPVLSIGEEEGKSNVTLLVSSSTTMESVCLKSLEFKERNYMGLSDCSSVDSSVPSFSEETKSNLNLKATELRLGLPGSQSPDRDSDLCLRSSTQFDEKTLFPLRPLTDDHHSSAKTAVLGNKRGFSDAMNGFSSEGKFLVDSEAANPILSPRPASNLGLKPGSTLEKVGVQQTKMKEVATTKANEARPTIDGSANNNNSAPATKAQVVGWPPIRSFRKNSLATTSKNNEEVDGKVGVGALFVKVSMDGAPYLRKVDLKNYSTYPELSSALEKMFSCFTMSKCGSHGILGREMLNETKLKDLLHGSEYVLTYEDREGDWMLVGDVPWEMFIETCKRLRIMKSSDAIGLAPRAVEKCKSRT

SEQ ID NO: 53195 - protein, 335 aa, Glycine max
  peptide (1)..(335): Ceres Seq. ID no. 14304971
  misc_feature (40)..(327): Pfam Name: AUX/IAA family Pfam Description: AUX/IAA family
  misc_feature (1)..(334): Homolog of NCBI NO: 16610193 NR Description: IAA9 protein [Nicotiana tabacum]
  misc_feature (1)..(334): Homolog of NCBI NO: 25989504 NR Description: Aux/IAA protein [Solanum tuberosum]
  misc_feature (1)..(335): Homolog of NCBI NO: 6136832 NR Description: Aux/IAA protein [Cucumis sativus]
  misc_feature (1)..(334): Homolog of NCBI NO: 29465672 NR Description: Aux/IAA protein [Vitis vinifera]
  misc_feature (1)..(334): Homolog of NCBI NO: 20269051 NR Description: aux/IAA protein [Populus tremula x Populus
MESVCLKSLEFKERNYMGLSDCSSVDSSVPSFSEETKSNLNLKATELRLGLPGSQSPDRDSDLCLRSSTQFDEKTLFPLRPLTDDHHSSAKTAVLGNKRGFSDAMNGFSSEGKFLVDSEAANPILSPRPASNLGLKPGSTLEKVGVQQTKMKEVATTKANEARPTIDGSANNNNSAPATKAQVVGWPPIRSFRKNSLATTSKNNEEVDGKVGVGALFVKVSMDGAPYLRKVDLKNYSTYPELSSALEKMFSCFTMSKCGSHGILGREMLNETKLKDLLHGSEYVLTYEDREGDWMLVGDVPWEMFIETCKRLRIMKSSDAIGLAPRAVEKCKSRT

SEQ ID NO: 53196 - protein, 319 aa, Glycine max
  peptide (1)..(319): Ceres Seq. ID no. 14304972
  misc_feature (24)..(311): Pfam Name: AUX/IAA family Pfam Description: AUX/IAA family
  misc_feature (1)..(318): Homolog of NCBI NO: 16610193 NR Description: IAA9 protein [Nicotiana tabacum]
  misc_feature (1)..(318): Homolog of NCBI NO: 25989504 NR Description: Aux/IAA protein [Solanum tuberosum]
  misc_feature (1)..(319): Homolog of NCBI NO: 6136832 NR Description: Aux/IAA protein [Cucumis sativus]
  misc_feature (1)..(318): Homolog of NCBI NO: 29465672 NR Description: Aux/IAA protein [Vitis vinifera]
  misc_feature (1)..(318): Homolog of NCBI NO: 20269051 NR Description: aux/IAA protein [Populus tremula x Populus
MGLSDCSSVDSSVPSFSEETKSNLNLKATELRLGLPGSQSPDRDSDLCLRSSTQFDEKTLFPLRPLTDDHHSSAKTAVLGNKRGFSDAMNGFSSEGKFLVDSEAANPILSPRPASNLGLKPGSTLEKVGVQQTKMKEVATTKANEARPTIDGSANNNNSAPATKAQVVGWPPIRSFRKNSLATTSKNNEEVDGKVGVGALFVKVSMDGAPYLRKVDLKNYSTYPELSSALEKMFSCFTMSKCGSHGILGREMLNETKLKDLLHGSEYVLTYEDREGDWMLVGDVPWEMFIETCKRLRIMKSSDAIGLAPRAVEKCKSRT

SEQ ID NO: 53197 - DNA, 1613 bp, Glycine max
  misc_feature (1)..(1613): Ceres Seq. ID no. 14311095
ggtatcagcataaaccacaacacattcaattccaccatgagaacttctttggggagtttttcttcacccttcacaagcttccgttccgcctcatcatggttcgaggtgtacgccgctttctccacattcatgatgcttctgagaaccgcgatcaacgatctcataccccaccaagttcgcaccttcatagtcacaaagataaaggctttgttctcagatcgccaaaatattaaccaggtctcactccagatcaacgagatttgggatggccaaatcaaccagctcttccaagccgcccaagagtatctccctgctcaaatatcccactcttacaagtccctcaaagttggaaagctcccaaagcacaagaacattgcggtggcagtggatggaacacaagaggtcgtggatcttttccaaggcatcaagctcagctggaagctcgttgagaaaagccccaaaagcgattctgatcaccgcgatcatcatcctaagtctagcggtgttggttacgagaggaagtcatttactctaagctttgatgagaagcatagagatgtagtaatgaacaagtacattaaccacgttctaagcacttaccaggacatgcagacagagcagaaaaccatcaagatccattccattggtggaaggtgttggcagaagagtgacttaactcatccagcttcctttgactcgcttgcattggaacctgagcagaaacaagccattattgatgatttgaatcggtttttgcgacggaaggagctttacaagaaggtggggaagccttggaaacgtggctacctcctttatgggcctcccgggacaggaaaatctagccttattgctgctatagccaactacttgaagtttgatgtgtatgatttggagctaagctctatgttttctaactcggaactcatgcgagtcatgagggaaacaaccaaccgctccatcatcgtcatcgaagacatagactgcaacaaagaggtgcatgctcgaccaacaacgaaacctttttcagattcagattcagacttcgaccgcaagcgtgttaaggttaagccttacaggtttactctgtcgggtctgcttaacaacatggatggtttgtggtcaagtggtggagaggagcgaattataatattcactactaaccacagagagagaattgaccctgcattgctgcgccctggtcgtatggacatgcacattcacttgtccttcctcaaaggcaaggcctttcgagtcttggcttccaattatttaggaattgaagatcattcactttttgaagaaattgatggactattggagaaattagaagtcacccctgcagtagtagcagagcaactgatgagaaatgaggatcctgaagttgctttggaaggacttgttgaatttctcaaagaaaaggacaaagaaagcctacttagatttatgaatgagactgcagactaaatagcatgttttagagtcttttcatctgtatcaccaccagtataagatgcagaataaaaatgaatgccctttgcttttgtaatgtttaggatttgtacttatgtatggaattgttgtacaatttcaatgcaaaaaagatttgaagattt

SEQ ID NO: 53198 - protein, 487 aa, Glycine max
  peptide (1)..(487): Ceres Seq. ID no. 14311096
  misc_feature (268)..(343): Pfam Name: ATPase family associated with various cellular Pfam Description: ATPase family associated with various cellular
  misc_feature (14)..(477): Homolog of NCBI NO: 30693378 NR Description: AAA-type ATPase family [Arabidopsis thaliana]
  misc_feature (29)..(476): Homolog of NCBI NO: 30680264 NR Description: AAA-type ATPase family [Arabidopsis thaliana]
  misc_feature (29)..(476): Homolog of NCBI NO: 25411838 NR Description: probable AAA-type ATPase [imported] - Arabidopsis
  misc_feature (21)..(473): Homolog of NCBI NO: 39104562 NR Description: putative BCS1 protein [Arabidopsis thaliana]
  misc_feature (21)..(473): Homolog of NCBI NO: 30693380 NR Description: AAA-type ATPase family [Arabidopsis thaliana]
  misc_feature (21)..(476): Homolog of NCBI NO: 30680274 NR Description: AAA-type ATPase family [Arabidopsis thaliana]
  misc_feature (21)..(476): Homolog of NCBI NO: 25411838 NR Description: probable AAA-type ATPase [imported] - Arabidopsis
  misc_feature (353)..(473): Homolog of NCBI NO: 7485704 NR Description: hypothetical protein F18B3.220 - Arabidopsis
  misc_feature (21)..(343): Homolog of NCBI NO: 7485704 NR Description: hypothetical protein F18B3.220 - Arabidopsis
  misc_feature (17)..(473): Homolog of NCBI NO: 34912442 NR Description: P0681B11.25 [Oryza sativa (japonica
GISINHNTFNSTMRTSLGSFSSPFTSFRSASSWFEVYAAFSTFMMLLRTAINDLIPHQVRTFIVTKIKALFSDRQNINQVSLQINEIWDGQINQLFQAAQEYLPAQISHSYKSLKVGKLPKHKNIAVAVDGTQEVVDLFQGIKLSWKLVEKSPKSDSDHRDHHPKSSGVGYERKSFTLSFDEKHRDVVMNKYINHVLSTYQDMQTEQKTIKIHSIGGRCWQKSDLTHPASFDSLALEPEQKQAIIDDLNRFLRRKELYKKVGKPWKRGYLLYGPPGTGKSSLIAAIANYLKFDVYDLELSSMFSNSELMRVMRETTNRSIIVIEDIDCNKEVHARPTTKPFSDSDSDFDRKRVKVKPYRFTLSGLLNNMDGLWSSGGEERIIIFTTNHRERIDPALLRPGRMDMHIHLSFLKGKAFRVLASNYLGIEDHSLFEEIDGLLEKLEVTPAVVAEQLMRNEDPEVALEGLVEFLKEKDKESLLRFMNETAD

SEQ ID NO: 53199 - protein, 475 aa, Glycine max
  peptide (1)..(475): Ceres Seq. ID no. 14311097
  misc_feature (256)..(331): Pfam Name: ATPase family associated with various cellular Pfam Description: ATPase family associated with various cellular
  misc_feature (2)..(465): Homolog of NCBI NO: 30693378 NR Description: AAA-type ATPase family [Arabidopsis thaliana]
  misc_feature (17)..(464): Homolog of NCBI NO: 30680264 NR Description: AAA-type ATPase family [Arabidopsis thaliana]
  misc_feature (17)..(464): Homolog of NCBI NO: 25411838 NR Description: probable AAA-type ATPase [imported] - Arabidopsis
  misc_feature (9)..(461): Homolog of NCBI NO: 39104562 NR Description: putative BCS1 protein [Arabidopsis thaliana]
  misc_feature (9)..(461): Homolog of NCBI NO: 30693380 NR Description: AAA-type ATPase family [Arabidopsis thaliana]
  misc_feature (9)..(464): Homolog of NCBI NO: 30680274 NR Description: AAA-type ATPase family [Arabidopsis thaliana]
  misc_feature (9)..(464): Homolog of NCBI NO: 25411838 NR Description: probable AAA-type ATPase [imported] - Arabidopsis
  misc_feature (341)..(461): Homolog of NCBI NO: 7485704 NR Description: hypothetical protein F18B3.220 - Arabidopsis
  misc_feature (9)..(331): Homolog of NCBI NO: 7485704 NR Description: hypothetical protein F18B3.220 - Arabidopsis
  misc_feature (5)..(461): Homolog of NCBI NO: 34912442 NR Description: P0681B11.25 [Oryza sativa (japonica
MRTSLGSFSSPFTSFRSASSWFEVYAAFSTFMMLLRTAINDLIPHQVRTFIVTKIKALFSDRQNINQVSLQINEIWDGQINQLFQAAQEYLPAQISHSYKSLKVGKLPKHKNIAVAVDGTQEVVDLFQGIKLSWKLVEKSPKSDSDHRDHHPKSSGVGYERKSFTLSFDEKHRDVVMNKYINHVLSTYQDMQTEQKTIKIHSIGGRCWQKSDLTHPASFDSLALEPEQKQAIIDDLNRFLRRKELYKKVGKPWKRGYLLYGPPGTGKSSLIAAIANYLKFDVYDLELSSMFSNSELMRVMRETTNRSIIVIEDIDCNKEVHARPTTKPFSDSDSDFDRKRVKVKPYRFTLSGLLNNMDGLWSSGGEERIIIFTTNHRERIDPALLRPGRMDMHIHLSFLKGKAFRVLASNYLGIEDHSLFEEIDGLLEKLEVTPAVVAEQLMRNEDPEVALEGLVEFLKEKDKESLLRFMNETAD

SEQ ID NO: 53200 - protein, 444 aa, Glycine max
  peptide (1)..(444): Ceres Seq. ID no. 14311098
  misc_feature (225)..(300): Pfam Name: ATPase family associated with various cellular Pfam Description: ATPase family associated with various cellular
  misc_feature (1)..(434): Homolog of NCBI NO: 30693378 NR Description: AAA-type ATPase family [Arabidopsis thaliana]
  misc_feature (1)..(433): Homolog of NCBI NO: 30680264 NR Description: AAA-type ATPase family [Arabidopsis thaliana]
  misc_feature (1)..(433): Homolog of NCBI NO: 25411838 NR Description: probable AAA-type ATPase [imported] - Arabidopsis
  misc_feature (1)..(430): Homolog of NCBI NO: 39104562 NR Description: putative BCS1 protein [Arabidopsis thaliana]
  misc_feature (1)..(430): Homolog of NCBI NO: 30693380 NR Description: AAA-type ATPase family [Arabidopsis thaliana]
  misc_feature (1)..(433): Homolog of NCBI NO: 30680274 NR Description: AAA-type ATPase family [Arabidopsis thaliana]
  misc_feature (1)..(433): Homolog of NCBI NO: 25411838 NR Description: probable AAA-type ATPase [imported] - Arabidopsis
  misc_feature (310)..(430): Homolog of NCBI NO: 7485704 NR Description: hypothetical protein F18B3.220 - Arabidopsis
  misc_feature (1)..(300): Homolog of NCBI NO: 7485704 NR Description: hypothetical protein F18B3.220 - Arabidopsis
  misc_feature (1)..(430): Homolog of NCBI NO: 34912442 NR Description: P0681B11.25 [Oryza sativa (japonica
MMLLRTAINDLIPHQVRTFIVTKIKALFSDRQNINQVSLQINEIWDGQINQLFQAAQEYLPAQISHSYKSLKVGKLPKHKNIAVAVDGTQEVVDLFQGIKLSWKLVEKSPKSDSDHRDHHPKSSGVGYERKSFTLSFDEKHRDVVMNKYINHVLSTYQDMQTEQKTIKIHSIGGRCWQKSDLTHPASFDSLALEPEQKQAIIDDLNRFLRRKELYKKVGKPWKRGYLLYGPPGTGKSSLIAAIANYLKFDVYDLELSSMFSNSELMRVMRETTNRSIIVIEDIDCNKEVHARPTTKPFSDSDSDFDRKRVKVKPYRFTLSGLLNNMDGLWSSGGEERIIIFTTNHRERIDPALLRPGRMDMHIHLSFLKGKAFRVLASNYLGIEDHSLFEEIDGLLEKLEVTPAVVAEQLMRNEDPEVALEGLVEFLKEKDKESLLRFMNETAD

SEQ ID NO: 53201 - DNA, 1469 bp, Glycine max
  misc_feature (1)..(1469): Ceres Seq. ID no. 14311337
gatttaggcctataattcattctttgtggccaatgaagtttcggacccacatgtgtgtctctagataaacaaaaaattacttgagaaaacgggcccttttcaaaagaagatacgagtgcttaaataaagaaaagaggaacagctaaatgagaagaccaaggcaatgttaaagctaattgaagaagatgcagattcctttgcccaacgtgcagagatgtattacaagaagagaccacagcttgtgagcatggttgaagatttctataggacacaccgctcattagccgagcggtatgatcaagtcactggaattcgccagcagaagacaggatcacctttttctccaatcaagaatcatcaatcagagaagttgatgagttttacacatgacagttatgatagctattctgagtgttttgatgtagaggagtctgtggaatctgaagttgatgatcctgagcaagaagaggaagaggttaccaaatttgataactgtatagaagaggaggaagttaagattgtggctgcaaatgatgaagtgatggggctgaggaaagaaatcaacagacttggtgaagagaacaaggatcataaagatcaaattaaggagaaatataacgtttatgatgaagttatggtgttgagggaagaagtagaaggactcagaaaagagaatagagtgcagaaggatgagctcaaccagaaaagtatcatttgtggtgaagtaatgatattgagggaagaaatagaacgactcaaagaagagaatagagagcagaaggatgaactcaaccagaaagatatcatttgtggtgaagtaatgatgttgagggaagaaattgaaggactcagaaaagagaatagagagcagaagggtgaactcaaccagaaaagtatcatttgtagtgacgtaatgatgttgagggaagaaatagaacgactcagaaaagagaatagagagcaaaatgatgaactcaagcagaaaggtaccatttatggtgaagtaatgatgttaaggaaggagatagaaagagtcagcgaagagaatatggtacagaaggaccatctcatgcaaaaagacctagagaaaatagaggtgattagacacctgagtttagctatagatgtgctgaagcaggagaatgtaaagatgagaagcttcattgctaaggaatttaccaacaaatggaacaacccatttgagtttaaaaaactcatgggatcattatcgatgaagttgtttaatggaaagaatcaacctagtattgtagctctatagatatggttcagaaagtaaatagcgtagttctgtagagcaatcttataaaaatgtctacgtaaatattttggggacttatcaagtaacccacaattcttgtaaacagtacattcctaatcagagaatcctagtagactttcctatacaactaattaatatttttatacatccttcgttagcgaaaaaaaag

SEQ ID NO: 53202 - protein, 371 aa, Glycine max
  peptide (1)..(371): Ceres Seq. ID no. 14311338
  misc_feature (1)..(324): Pfam Name: Synaptonemal complex protein 1 (SCP-1) Pfam Description: Synaptonemal complex protein 1 (SCP-1)
  misc_feature (1)..(326): Homolog of NCBI NO: 34896156 NR Description: P0701D05.33 [Oryza sativa (japonica
  misc_feature (1)..(180): Homolog of NCBI NO: 17473609 NR Description: unknown protein [Arabidopsis thaliana]
  misc_feature (1)..(356): Homolog of NCBI NO: 37534452 NR Description: putative centromere protein
  misc_feature (1)..(326): Homolog of NCBI NO: 28416683 NR Description: At2g30500 [Arabidopsis thaliana]
  misc_feature (1)..(326): Homolog of NCBI NO: 15224515 NR Description: expressed protein [Arabidopsis thaliana]
  misc_feature (1)..(202): Homolog of NCBI NO: 34899254 NR Description: hypothetical protein~similar to Arabidopsis
  misc_feature (1)..(202): Homolog of NCBI NO: 38175740 NR Description: unknown protein [Oryza sativa (japonica
  misc_feature (1)..(171): Homolog of NCBI NO: 30678573 NR Description: expressed protein [Arabidopsis thaliana]
  misc_feature (1)..(171): Homolog of NCBI NO: 9280668 NR Description: F21B7.9 [Arabidopsis thaliana]
  misc_feature (1)..(171): Homolog of NCBI NO: 7485917 NR Description: hypothetical protein F21B7.25 - Arabidopsis
MLKLIEEDADSFAQRAEMYYKKRPQLVSMVEDFYRTHRSLAERYDQVTGIRQQKTGSPFSPIKNHQSEKLMSFTHDSYDSYSECFDVEESVESEVDDPEQEEEEVTKFDNCIEEEEVKIVAANDEVMGLRKEINRLGEENKDHKDQIKEKYNVYDEVMVLREEVEGLRKENRVQKDELNQKSIICGEVMILREEIERLKEENREQKDELNQKDIICGEVMMLREEIEGLRKENREQKGELNQKSIICSDVMMLREEIERLRKENREQNDELKQKGTIYGEVMMLRKEIERVSEENMVQKDHLMQKDLEKIEVIRHLSLAIDVLKQENVKMRSFIAKEFTNKWNNPFEFKKLMGSLSMKLFNGKNQPSIVAL

SEQ ID NO: 53203 - protein, 354 aa, Glycine max
  peptide (1)..(354): Ceres Seq. ID no. 14311339
  misc_feature (1)..(307): Pfam Name: Synaptonemal complex protein 1 (SCP-1) Pfam Description: Synaptonemal complex protein 1 (SCP-1)
  misc_feature (1)..(309): Homolog of NCBI NO: 34896156 NR Description: P0701D05.33 [Oryza sativa (japonica
  misc_feature (1)..(163): Homolog of NCBI NO: 17473609 NR Description: unknown protein [Arabidopsis thaliana]
  misc_feature (1)..(339): Homolog of NCBI NO: 37534452 NR Description: putative centromere protein
  misc_feature (1)..(309): Homolog of NCBI NO: 28416683 NR Description: At2g30500 [Arabidopsis thaliana]
  misc_feature (1)..(309): Homolog of NCBI NO: 15224515 NR Description: expressed protein [Arabidopsis thaliana]
  misc_feature (1)..(185): Homolog of NCBI NO: 34899254 NR Description: hypothetical protein~similar to Arabidopsis
  misc_feature (1)..(185): Homolog of NCBI NO: 38175740 NR Description: unknown protein [Oryza sativa (japonica
  misc_feature (1)..(154): Homolog of NCBI NO: 30678573 NR Description: expressed protein [Arabidopsis thaliana]
  misc_feature (1)..(154): Homolog of NCBI NO: 9280668 NR Description: F21B7.9 [Arabidopsis thaliana]
  misc_feature (1)..(154): Homolog of NCBI NO: 7485917 NR Description: hypothetical protein F21B7.25 - Arabidopsis
MYYKKRPQLVSMVEDFYRTHRSLAERYDQVTGIRQQKTGSPFSPIKNHQSEKLMSFTHDSYDSYSECFDVEESVESEVDDPEQEEEEVTKFDNCIEEEEVKIVAANDEVMGLRKEINRLGEENKDHKDQIKEKYNVYDEVMVLREEVEGLRKENRVQKDELNQKSIICGEVMILREEIERLKEENREQKDELNQKDIICGEVMMLREEIEGLRKENREQKGELNQKSIICSDVMMLREEIERLRKENREQNDELKQKGTIYGEVMMLRKEIERVSEENMVQKDHLMQKDLEKIEVIRHLSLAIDVLKQENVKMRSFIAKEFTNKWNNPFEFKKLMGSLSMKLFNGKNQPSIVAL

SEQ ID NO: 53204 - protein, 343 aa, Glycine max
  peptide (1)..(343): Ceres Seq. ID no. 14311340
  misc_feature (1)..(296): Pfam Name: Synaptonemal complex protein 1 (SCP-1) Pfam Description: Synaptonemal complex protein 1 (SCP-1)
  misc_feature (1)..(298): Homolog of NCBI NO: 34896156 NR Description: P0701D05.33 [Oryza sativa (japonica
  misc_feature (1)..(152): Homolog of NCBI NO: 17473609 NR Description: unknown protein [Arabidopsis thaliana]
  misc_feature (1)..(328): Homolog of NCBI NO: 37534452 NR Description: putative centromere protein
  misc_feature (1)..(298): Homolog of NCBI NO: 28416683 NR Description: At2g30500 [Arabidopsis thaliana]
  misc_feature (1)..(298): Homolog of NCBI NO: 15224515 NR Description: expressed protein [Arabidopsis thaliana]
  misc_feature (1)..(174): Homolog of NCBI NO: 34899254 NR Description: hypothetical protein~similar to Arabidopsis
  misc_feature (1)..(174): Homolog of NCBI NO: 38175740 NR Description: unknown protein [Oryza sativa (japonica
  misc_feature (1)..(143): Homolog of NCBI NO: 30678573 NR Description: expressed protein [Arabidopsis thaliana]
  misc_feature (1)..(143): Homolog of NCBI NO: 9280668 NR Description: F21B7.9 [Arabidopsis thaliana]
  misc_feature (1)..(143): Homolog of NCBI NO: 7485917 NR Description: hypothetical protein F21B7.25 - Arabidopsis
MVEDFYRTHRSLAERYDQVTGIRQQKTGSPFSPIKNHQSEKLMSFTHDSYDSYSECFDVEESVESEVDDPEQEEEEVTKFDNCIEEEEVKIVAANDEVMGLRKEINRLGEENKDHKDQIKEKYNVYDEVMVLREEVEGLRKENRVQKDELNQKSIICGEVMILREEIERLKEENREQKDELNQKDIICGEVMMLREEIEGLRKENREQKGELNQKSIICSDVMMLREEIERLRKENREQNDELKQKGTIYGEVMMLRKEIERVSEENMVQKDHLMQKDLEKIEVIRHLSLAIDVLKQENVKMRSFIAKEFTNKWNNPFEFKKLMGSLSMKLFNGKNQPSIVAL

SEQ ID NO: 53205 - DNA, 1423 bp, Glycine max
  misc_feature (1)..(1423): Ceres Seq. ID no. 12611971
ctacctcctcttcctcttcctcttcctgcatttctccgcgtgtgtgtatgtgtgtatactctctcaagtacgcacatacatacacatccattcgtacataaatacttatatctcttcttccttcgccgttaattctctgaatccctagctcttctgttctccgatccgatcatggcctcgcttgtcaacaacgctaacggcgccgtcaatggttttcctggaatatcccagaagctcattatcgataccgaccctgggatcgatgatagcatggccattcttatggcttttcaaagtccagatgtggaggttctgggtttgacaaccatttttggtaatacaactaccgaactttcaacactcaatgctttgcttttgtgtgagatggcaggccgtgaagatattccagttgcacagggaagccatgagccattgaagggtggaaagcctcgtgttgctgattttgttcatggtaaagatggactagggaacacattcctacccccacctaaaggtgagaaaattgagaaaagtgctagtgagtttttggtagagaaagtctctgaatatcctggtgaagtatctgtgctagcacttggaccactaacaaatttggctttggcaatcaaaagggattcttcctttgcaagcaaagtgaagagaatagttatacttggtggtgcattctttgccttggggaatgtgaatcctgctgcagaagccaatatccatggagacccggaagccgcagatattgtgtttacctctggggcagatattgttgttattggaataaacattacaacccaagtccaattcacagatgctgatctcctcgaactgaaggaatctaaaggaaagtatgctcccttcttgagtgacatatgcaaattctatagggactttcatgtaaaatctgatggtgtccacggaattttcctccacgatcctgtaagttttgtggcagttgtgcgtccagatcttttcacatacaagaagggggtagtgagggtagaaacacaaggcatctgtgttgggcatacacttatggaccaaggattgaaaaactggaatacgagcaacccatggacgggttattctcctgttgcagttgcttggacagtgaatctcgaggaagttcttgattatatcagggagctggtgatgaaaccctgaagtataggcatttgtactacccttctgacagacaaaaagcattggaaagtgataggacgatagcttcttatttgcaaaaatatgcataaggtcattttctttatttcattcaaggtcacaatgagttcttaccccgtttaatattataaagttcatgtaccaatgaaattctctttacatgaacttatttgtgtttggatttcgctactcttatttgagaagaaagcagtcattctttacttttcct

SEQ ID NO: 53206 - protein, 334 aa, Glycine max
  peptide (1)..(334): Ceres Seq. ID no. 12611972
  misc_feature (20)..(328): Pfam Name: Inosine-uridine preferring nucleoside hydrolase Pfam Description: Inosine-uridine preferring nucleoside hydrolase
  misc_feature (21)..(327): Homolog of NCBI NO: 15966659 NR Description: PUTATIVE NUCLEOSIDE HYDROLASE PROTEIN
  misc_feature (17)..(333): Homolog of NCBI NO: 17935486 NR Description: inosine-uridine preferring nucleoside hydrolase
  misc_feature (17)..(333): Homolog of NCBI NO: 15888904 NR Description: AGR_C_2923p [Agrobacterium tumefaciens]
  misc_feature (223)..(333): Homolog of NCBI NO: 25321071 NR Description: hypothetical protein [imported] - Arabidopsis
  misc_feature (17)..(238): Homolog of NCBI NO: 25321071 NR Description: hypothetical protein [imported] - Arabidopsis
  misc_feature (17)..(333): Homolog of NCBI NO: 18390550 NR Description: expressed protein
  misc_feature (20)..(329): Homolog of NCBI NO: 30089728 NR Description: putative inosine-uridine preferring nucleoside
  misc_feature (252)..(302): Homolog of NCBI NO: 25321061 NR Description: hypothetical protein At2g36310 [imported] -
  misc_feature (34)..(254): Homolog of NCBI NO: 25321061 NR Description: hypothetical protein At2g36310 [imported] -
  misc_feature (5)..(334): Homolog of NCBI NO: 18404099 NR Description: expressed protein
MASLVNNANGAVNGFPGISQKLIIDTDPGIDDSMAILMAFQSPDVEVLGLTTIFGNTTTELSTLNALLLCEMAGREDIPVAQGSHEPLKGGKPRVADFVHGKDGLGNTFLPPPKGEKIEKSASEFLVEKVSEYPGEVSVLALGPLTNLALAIKRDSSFASKVKRIVILGGAFFALGNVNPAAEANIHGDPEAADIVFTSGADIVVIGINITTQVQFTDADLLELKESKGKYAPFLSDICKFYRDFHVKSDGVHGIFLHDPVSFVAVVRPDLFTYKKGVVRVETQGICVGHTLMDQGLKNWNTSNPWTGYSPVAVAWTVNLEEVLDYIRELVMKP

SEQ ID NO: 53207 - protein, 301 aa, Glycine max
  peptide (1)..(301): Ceres Seq. ID no. 12611973
  misc_feature (1)..(295): Pfam Name: Inosine-uridine preferring nucleoside hydrolase Pfam Description: Inosine-uridine preferring nucleoside hydrolase
  misc_feature (1)..(294): Homolog of NCBI NO: 15966659 NR Description: PUTATIVE NUCLEOSIDE HYDROLASE PROTEIN
  misc_feature (1)..(300): Homolog of NCBI NO: 17935486 NR Description: inosine-uridine preferring nucleoside hydrolase
  misc_feature (1)..(300): Homolog of NCBI NO: 15888904 NR Description: AGR_C_2923p [Agrobacterium tumefaciens]
  misc_feature (190)..(300): Homolog of NCBI NO: 25321071 NR Description: hypothetical protein [imported] - Arabidopsis
  misc_feature (1)..(205): Homolog of NCBI NO: 25321071 NR Description: hypothetical protein [imported] - Arabidopsis
  misc_feature (1)..(300): Homolog of NCBI NO: 18390550 NR Description: expressed protein
  misc_feature (1)..(296): Homolog of NCBI NO: 30089728 NR Description: putative inosine-uridine preferring nucleoside
  misc_feature (219)..(269): Homolog of NCBI NO: 25321061 NR Description: hypothetical protein At2g36310 [imported] -
  misc_feature (1)..(221): Homolog of NCBI NO: 25321061 NR Description: hypothetical protein At2g36310 [imported] -
  misc_feature (1)..(301): Homolog of NCBI NO: 18404099 NR Description: expressed protein
MAILMAFQSPDVEVLGLTTIFGNTTTELSTLNALLLCEMAGREDIPVAQGSHEPLKGGKPRVADFVHGKDGLGNTFLPPPKGEKIEKSASEFLVEKVSEYPGEVSVLALGPLTNLALAIKRDSSFASKVKRIVILGGAFFALGNVNPAAEANIHGDPEAADIVFTSGADIVVIGINITTQVQFTDADLLELKESKGKYAPFLSDICKFYRDFHVKSDGVHGIFLHDPVSFVAVVRPDLFTYKKGVVRVETQGICVGHTLMDQGLKNWNTSNPWTGYSPVAVAWTVNLEEVLDYIRELVMKP

SEQ ID NO: 53208 - protein, 297 aa, Glycine max
  peptide (1)..(297): Ceres Seq. ID no. 12611974
  misc_feature (1)..(291): Pfam Name: Inosine-uridine preferring nucleoside hydrolase Pfam Description: Inosine-uridine preferring nucleoside hydrolase
  misc_feature (1)..(290): Homolog of NCBI NO: 15966659 NR Description: PUTATIVE NUCLEOSIDE HYDROLASE PROTEIN
  misc_feature (1)..(296): Homolog of NCBI NO: 17935486 NR Description: inosine-uridine preferring nucleoside hydrolase
  misc_feature (1)..(296): Homolog of NCBI NO: 15888904 NR Description: AGR_C_2923p [Agrobacterium tumefaciens]
  misc_feature (186)..(296): Homolog of NCBI NO: 25321071 NR Description: hypothetical protein [imported] - Arabidopsis
  misc_feature (1)..(201): Homolog of NCBI NO: 25321071 NR Description: hypothetical protein [imported] - Arabidopsis
  misc_feature (1)..(296): Homolog of NCBI NO: 18390550 NR Description: expressed protein
  misc_feature (1)..(292): Homolog of NCBI NO: 30089728 NR Description: putative inosine-uridine preferring nucleoside
  misc_feature (215)..(265): Homolog of NCBI NO: 25321061 NR Description: hypothetical protein At2g36310 [imported] -
  misc_feature (1)..(217): Homolog of NCBI NO: 25321061 NR Description: hypothetical protein At2g36310 [imported] -
  misc_feature (1)..(297): Homolog of NCBI NO: 18404099 NR Description: expressed protein
MAFQSPDVEVLGLTTIFGNTTTELSTLNALLLCEMAGREDIPVAQGSHEPLKGGKPRVADFVHGKDGLGNTFLPPPKGEKIEKSASEFLVEKVSEYPGEVSVLALGPLTNLALAIKRDSSFASKVKRIVILGGAFFALGNVNPAAEANIHGDPEAADIVFTSGADIVVIGINITTQVQFTDADLLELKESKGKYAPFLSDICKFYRDFHVKSDGVHGIFLHDPVSFVAVVRPDLFTYKKGVVRVETQGICVGHTLMDQGLKNWNTSNPWTGYSPVAVAWTVNLEEVLDYIRELVMKP

SEQ ID NO: 53209 - DNA, 561 bp, Glycine max
  misc_feature (1)..(561): Ceres Seq. ID no. 12564563
acgctcaattcattttcttctcctctctctctctcctagggttagggttttctctcttcatcactctctgtgtcgctccgtttcaatggctcagcaagacgctcaaaacggcgggtcggagaatgccgctgctgctgctacggtgtcgtttgtcgctgtgaagccgcagctcctcgtcgaagctcccaaagccaacgacgccattctgttcttcaaggctgcgtttggcgctgaggaagttggccgtacgctcaaccctaagcgcaaagctgagcacgagctccctctcatactctccgcagaactcaaaatcgctggctccaccattctcgtcgccgacctcgttgatgacacttcttcgccagcgaaaacggggggaaacggtgtcgttttgtgcttggagacggaggacgtggatggggcagtagctaaggcggtgagcgctggtgcagttgcggagggcgaagtagcggaaggtgaagtcgcgtgctgcggcgggcgcgtggggaaggttaaggacccgtatggcttcgtttggctcttctgcactccagggaagaa

SEQ ID NO: 53210 - protein, 186 aa, Glycine max
  peptide (1)..(186): Ceres Seq. ID no. 12564564
  misc_feature (67)..(183): Homolog of NCBI NO: 33595699 NR Description: putative glyxalase [Bordetella parapertussis]
  misc_feature (67)..(183): Homolog of NCBI NO: 33600222 NR Description: putative glyxalase [Bordetella bronchiseptica]
  misc_feature (29)..(181): Homolog of NCBI NO: 18422918 NR Description: expressed protein
  misc_feature (29)..(185): Homolog of NCBI NO: 28565534 NR Description: early tobacco anther 1 [Nicotiana tabacum]
RSIHFLLLSLSPRVRVFSLHHSLCRSVSMAQQDAQNGGSENAAAAATVSFVAVKPQLLVEAPKANDAILFFKAAFGAEEVGRTLNPKRKAEHELPLILSAELKIAGSTILVADLVDDTSSPAKTGGNGVVLCLETEDVDGAVAKAVSAGAVAEGEVAEGEVACCGGRVGKVKDPYGFVWLFCTPGK

SEQ ID NO: 53211 - protein, 158 aa, Glycine max
  peptide (1)..(158): Ceres Seq. ID no. 12564565
  misc_feature (39)..(155): Homolog of NCBI NO: 33595699 NR Description: putative glyxalase [Bordetella parapertussis]
  misc_feature (39)..(155): Homolog of NCBI NO: 33600222 NR Description: putative glyxalase [Bordetella bronchiseptica]
  misc_feature (1)..(153): Homolog of NCBI NO: 18422918 NR Description: expressed protein
  misc_feature (1)..(157): Homolog of NCBI NO: 28565534 NR Description: early tobacco anther 1 [Nicotiana tabacum]
MAQQDAQNGGSENAAAAATVSFVAVKPQLLVEAPKANDAILFFKAAFGAEEVGRTLNPKRKAEHELPLILSAELKIAGSTILVADLVDDTSSPAKTGGNGVVLCLETEDVDGAVAKAVSAGAVAEGEVAEGEVACCGGRVGKVKDPYGFVWLFCTPGK

SEQ ID NO: 53212 - DNA, 1659 bp, Glycine max
  misc_feature (1)..(1659): Ceres Seq. ID no. 14304502
attctaggttccgcaccccgcaaaggaacccgaacctgccatgtgctcgtcgcattccccgaaccaccgttcgaaatgcagagctccagcacctgccaatgccatcatcttcctccttgtaccactcctctgttccctctccttcattaacgtcaattcccagattctagaagcatgctctgccgctacggattgtgggccaggtttgttctgtggcaattgcccctctttgggcttgaagcaacccatctgcaccagaggccaagtcacacttcccacttccattgtcaatgggttgcccttcaacaagtacacgtggatagtgacccacaattccttcagcattgtcgatgcaccgcctttgcccggtgttcagagaattaccttttacaatcaagaagacactgtcactaaccagttgaggaatggagttaggggactgatgttggacatgtacgacttccagaatgatatatggctctgtcactcatttcgcgggcaatgcttcaacttcactgcatttcaaccggcagttaatactttgaaagaagtggaggcgttcttgacggaaaatccaactgagattgttaccatcataattgaagactatgtgcacactccaaaggggttgactaatgtgttcacaagtgctggactggataagtattggtttcctgtgtccaagatgccgaaaaagggtgacgattggcccactgtgacggagatggttcaagcaaatcaccgacttgttgttttcacttccgatgcttcaaaggaagcaggggaaggaatagcttatcagtggaagcacatggttgaaaatgagtctggagatcctggagtgcaacagggttcttgtccgcacagaaaagaatcaaaggcattaaattctaaaagtcattcacttttcctgatgaattactttccgacatatccagttgaagctgactcttgcaaagagcattcagctccacttgctgagatggtcaatacctgttacaaagctgcagggaatttgatgcccaactttatagctgttaatttttacatgaggagtgatggaggtggtgtttttgatattgtggataaaatgaatggccatacactgtgtgggtgtagcactgtcacagcctgccaggtgggtgtaccctttgggtcttgcaagaatatttctgtacctagtacgagtccagtgactaatactgctggaagctttactggatctgttcagttctctaaatcagcttcagctgtccatcttccaaattgtttgcttgtcgtcttttacttcctgcaaagtcttgctgcaactatgatgactataagcactgttttataacttatgtaaggtagtctttaaagaaggatctctagtatcttagcatgtacactgcagtattgtctcaagctgtgaaatgtcatggaactgttactaggttagaaaaattagatatagacaaattcttgtttcttgctgaggttatgttcaaggatctgtgaagttatttgagttggtagtcatgagagaccaagaatttatctggagctataagtagttcaggtatgttatagttatacttatattcttggatgtacaaatcaaattctagatattgcaagtatgcaactctggatgcatcactttctttcttttctctc

SEQ ID NO: 53213 - protein, 432 aa, Glycine max
  peptide (1)..(432): Ceres Seq. ID no. 14304503
  misc_feature (15)..(372): Homolog of NCBI NO: 34897530 NR Description: OSJNBa0042L16.2 [Oryza sativa (japonica
  misc_feature (23)..(391): Homolog of NCBI NO: 38345515 NR Description: OSJNBa0039K24.18 [Oryza sativa (japonica
  misc_feature (15)..(365): Homolog of NCBI NO: 38345461 NR Description: OSJNBa0042L16.16 [Oryza sativa (japonica
  misc_feature (44)..(375): Homolog of NCBI NO: 27754722 NR Description: unknown protein [Arabidopsis thaliana]
  misc_feature (25)..(375): Homolog of NCBI NO: 15230348 NR Description: expressed protein [Arabidopsis thaliana]
  misc_feature (22)..(374): Homolog of NCBI NO: 18402763 NR Description: expressed protein [Arabidopsis thaliana]
  misc_feature (17)..(428): Homolog of NCBI NO: 38637049 NR Description: MAP3K-like protein kinase [Oryza sativa (japonica
  misc_feature (32)..(390): Homolog of NCBI NO: 25407778 NR Description: MAP3K-like protein kinase [imported] -
  misc_feature (13)..(417): Homolog of NCBI NO: 21593427 NR Description: unknown [Arabidopsis thaliana]
  misc_feature (13)..(417): Homolog of NCBI NO: 18425155 NR Description: expressed protein [Arabidopsis thaliana]
MCSSHSPNHRSKCRAPAPANAIIFLLVPLLCSLSFINVNSQILEACSAATDCGPGLFCGNCPSLGLKQPICTRGQVTLPTSIVNGLPFNKYTWIVTHNSFSIVDAPPLPGVQRITFYNQEDTVTNQLRNGVRGLMLDMYDFQNDIWLCHSFRGQCFNFTAFQPAVNTLKEVEAFLTENPTEIVTIIIEDYVHTPKGLTNVFTSAGLDKYWFPVSKMPKKGDDWPTVTEMVQANHRLVVFTSDASKEAGEGIAYQWKHMVENESGDPGVQQGSCPHRKESKALNSKSHSLFLMNYFPTYPVEADSCKEHSAPLAEMVNTCYKAAGNLMPNFIAVNFYMRSDGGGVFDIVDKMNGHTLCGCSTVTACQVGVPFGSCKNISVPSTSPVTNTAGSFTGSVQFSKSASAVHLPNCLLVVFYFLQSLAATMMTISTVL

SEQ ID NO: 53214 - protein, 298 aa, Glycine max
  peptide (1)..(298): Ceres Seq. ID no. 14304504
  misc_feature (1)..(238): Homolog of NCBI NO: 34897530 NR Description: OSJNBa0042L16.2 [Oryza sativa (japonica
  misc_feature (1)..(257): Homolog of NCBI NO: 38345515 NR Description: OSJNBa0039K24.18 [Oryza sativa (japonica
  misc_feature (1)..(231): Homolog of NCBI NO: 38345461 NR Description: OSJNBa0042L16.16 [Oryza sativa (japonica
  misc_feature (1)..(241): Homolog of NCBI NO: 27754722 NR Description: unknown protein [Arabidopsis thaliana]
  misc_feature (1)..(241): Homolog of NCBI NO: 15230348 NR Description: expressed protein [Arabidopsis thaliana]
  misc_feature (1)..(240): Homolog of NCBI NO: 18402763 NR Description: expressed protein [Arabidopsis thaliana]
  misc_feature (1)..(294): Homolog of NCBI NO: 38637049 NR Description: MAP3K-like protein kinase [Oryza sativa (japonica
  misc_feature (1)..(256): Homolog of NCBI NO: 25407778 NR Description: MAP3K-like protein kinase [imported] -
  misc_feature (1)..(283): Homolog of NCBI NO: 21593427 NR Description: unknown [Arabidopsis thaliana]
  misc_feature (1)..(283): Homolog of NCBI NO: 18425155 NR Description: expressed protein [Arabidopsis thaliana]
MLDMYDFQNDIWLCHSFRGQCFNFTAFQPAVNTLKEVEAFLTENPTEIVTIIIEDYVHTPKGLTNVFTSAGLDKYWFPVSKMPKKGDDWPTVTEMVQANHRLVVFTSDASKEAGEGIAYQWKHMVENESGDPGVQQGSCPHRKESKALNSKSHSLFLMNYFPTYPVEADSCKEHSAPLAEMVNTCYKAAGNLMPNFIAVNFYMRSDGGGVFDIVDKMNGHTLCGCSTVTACQVGVPFGSCKNISVPSTSPVTNTAGSFTGSVQFSKSASAVHLPNCLLVVFYFLQSLAATMMTISTVL

SEQ ID NO: 53215 - protein, 295 aa, Glycine max
  peptide (1)..(295): Ceres Seq. ID no. 14304505
  misc_feature (1)..(235): Homolog of NCBI NO: 34897530 NR Description: OSJNBa0042L16.2 [Oryza sativa (japonica
  misc_feature (1)..(254): Homolog of NCBI NO: 38345515 NR Description: OSJNBa0039K24.18 [Oryza sativa (japonica
  misc_feature (1)..(228): Homolog of NCBI NO: 38345461 NR Description: OSJNBa0042L16.16 [Oryza sativa (japonica
  misc_feature (1)..(238): Homolog of NCBI NO: 27754722 NR Description: unknown protein [Arabidopsis thaliana]
  misc_feature (1)..(238): Homolog of NCBI NO: 15230348 NR Description: expressed protein [Arabidopsis thaliana]
  misc_feature (1)..(237): Homolog of NCBI NO: 18402763 NR Description: expressed protein [Arabidopsis thaliana]
  misc_feature (1)..(291): Homolog of NCBI NO: 38637049 NR Description: MAP3K-like protein kinase [Oryza sativa (japonica
  misc_feature (1)..(253): Homolog of NCBI NO: 25407778 NR Description: MAP3K-like protein kinase [imported] -
  misc_feature (1)..(280): Homolog of NCBI NO: 21593427 NR Description: unknown [Arabidopsis thaliana]
  misc_feature (1)..(280): Homolog of NCBI NO: 18425155 NR Description: expressed protein [Arabidopsis thaliana]
MYDFQNDIWLCHSFRGQCFNFTAFQPAVNTLKEVEAFLTENPTEIVTIIIEDYVHTPKGLTNVFTSAGLDKYWFPVSKMPKKGDDWPTVTEMVQANHRLVVFTSDASKEAGEGIAYQWKHMVENESGDPGVQQGSCPHRKESKALNSKSHSLFLMNYFPTYPVEADSCKEHSAPLAEMVNTCYKAAGNLMPNFIAVNFYMRSDGGGVFDIVDKMNGHTLCGCSTVTACQVGVPFGSCKNISVPSTSPVTNTAGSFTGSVQFSKSASAVHLPNCLLVVFYFLQSLAATMMTISTVL

SEQ ID NO: 53216 - DNA, 2250 bp, Glycine max
  misc_feature (1)..(2250): Ceres Seq. ID no. 13495070
aacttcattttctccttccgttcctttcttcgttccttccccaacccaatcttcgccttcgcccacaacaactcctccttcaggatcgctgccaacgttactttccatttttacccttcatcctcgagaaaaaaatggcgaacgcagcatctggtatggccgtccatgatgagtgcaagctaaagtttctggagctcaaggcgaagaggacgtaccggtatatcgtttttaagattgaggagaaatcgaagcaagttattgtggagaagctgggtgaccctgcaaatggctatgatgaattcgctgccagtcttcctgctgatgagtgtcgatatgctgtttatgattttgattttgtcactgaagagaattgccaaaagagcagaattttcttcattgcttggtcccctgatacatctagggttaggagcaagatgatttatgccagctccaaagatagattcaagagggagcttgatggaattcagattgagctgcaagcaactgatcctactgagatgggtcttgatgtgttcaaaagccgtgccaattaaatgattccgattattcataaataggagttgtgatggggatggtcaacttggctaatttggactcaattttccaagttttgacatgaggtctattgcagcttcaacaaagcttctcttgttccagtgtatcttgtggtttgcgacatataacccgtgtttgggtgtaatcttagtcctattcctagtagttaattttgtaactgttctttgtgtgattgaacgaaaatttgggaccaggtattgatgtaatgttgccagttgccatcttactaatgtcttatgacttaaattaactaaaatactttcttgaaaacaatttaatacatattatgaactatgttatcataacaaagtcgaggggtaagttttgtggatgcaaaaaaaaaaaaaaaatcgaaacgaggtcgttttgtgttccgccgaaggcaccggaggttgtagcaggctagcagctatggatttggcatccaatctcggtggcaagattgacaaagccgaagttctctctgccgttcagaagtatgagaagtatcatgtttgctatggaggtcaagaggaagagaggaaagctaattataccgatatggttaataaatactacgatcttgttaccagcttttatgagtttggctggggggaatctttccattttgcacccagatggaaaggggaatctcttcgagagagcatcaagcgacatgaacacttccttcctttacaacttggactgaagccagggcagaaggttttggatgttggatgtggaattgggggaccattaagagaaatttctcgatttagctcaacttcaattaccgggttgaataacaatgagtaccagataacaagaggaaaggaactcaatcgcattgctggagtggacaagacttgcaattttgtcaaggctgacttcatgaaaatgccattcccagacaacagttttgatgcagtgtatgcgattgaagccacttgccatgcaccggatgcttatggatgctataaagagatttttagagtgttaaagcctggtcaatattttgctgcttatgaatggtgcatgaccgattcttttgatccccaaaacccagagcaccaaaaaatcaaggcagaaattgagattggtgatgggctacctgacattcgattgactgctaagtgtcttgaagctctgaagcaagcaggttttgaggtaatatgggagaaagatctagcagtggactctcctcttccttggtatttgcctttagacaaaagtcacttctcactgagtagcttccgtctaactgctgtcgggcgacttttcaccaaaaacatggtcaaggttctggagtatgttggactggctccaaagggtagtctaagggttcaagacttcctggagaaggctgcagagggactagttgaaggagggaagagagagattttcacaccaatgtacttcttcctggcacggaagcctgatttagacaggaactaagctggctgtacaaataggttgctgttttcatcagttacggtgattctggtagggtgaaccgtaagctaggattgtttttggccttgttgccttagtgattcttgctgtttctttgttttgtttaggttaccaacacttcattttgctgcttgtttcgatgaagcagtgctcctccatattatgtttaccctacatattatatgctcttttactttgttt

SEQ ID NO: 53217 - protein, 367 aa, Glycine max
  peptide (1)..(367): Ceres Seq. ID no. 13495071
  misc_feature (87)..(279): Pfam Name: ubiE/COQ5 methyltransferase family Pfam Description: ubiE/COQ5 methyltransferase family
  misc_feature (49)..(362): Homolog of NCBI NO: 1872473 NR Description: delta-24-sterol methyltransferase [Triticum
  misc_feature (23)..(362): Homolog of NCBI NO: 3560531 NR Description: cycloartenol-C24-methyltransferase [Oryza sativa
  misc_feature (26)..(365): Homolog of NCBI NO: 3603295 NR Description: S-adenosyl-methionine
  misc_feature (23)..(365): Homolog of NCBI NO: 7443715 NR Description: sterol 24-C-methyltransferase (EC 2.1.1.41) -
  misc_feature (23)..(365): Homolog of NCBI NO: 7443716 NR Description: sterol 24-C-methyltransferase (EC 2.1.1.41)
  misc_feature (23)..(365): Homolog of NCBI NO: 3560474 NR Description: S-adenosyl-methionine-sterol-C- methyltransferase
  misc_feature (23)..(362): Homolog of NCBI NO: 7443719 NR Description: sterol 24-C-methyltransferase (EC 2.1.1.41) -
  misc_feature (28)..(363): Homolog of NCBI NO: 21434843 NR Description: cephalopod [Arabidopsis thaliana]
  misc_feature (28)..(363): Homolog of NCBI NO: 15240691 NR Description: 24-sterol C-methyltransferase [Arabidopsis
  misc_feature (1)..(367): Homolog of NCBI NO: 7443720 NR Description: probable sterol 24-C-methyltransferase (EC
MQKKKKNRNEVVLCSAEGTGGCSRLAAMDLASNLGGKIDKAEVLSAVQKYEKYHVCYGGQEEERKANYTDMVNKYYDLVTSFYEFGWGESFHFAPRWKGESLRESIKRHEHFLPLQLGLKPGQKVLDVGCGIGGPLREISRFSSTSITGLNNNEYQITRGKELNRIAGVDKTCNFVKADFMKMPFPDNSFDAVYAIEATCHAPDAYGCYKEIFRVLKPGQYFAAYEWCMTDSFDPQNPEHQKIKAEIEIGDGLPDIRLTAKCLEALKQAGFEVIWEKDLAVDSPLPWYLPLDKSHFSLSSFRLTAVGRLFTKNMVKVLEYVGLAPKGSLRVQDFLEKAAEGLVEGGKREIFTPMYFFLARKPDLDRN

SEQ ID NO: 53218 - protein, 340 aa, Glycine max
  peptide (1)..(340): Ceres Seq. ID no. 13495072
  misc_feature (60)..(252): Pfam Name: ubiE/COQ5 methyltransferase family Pfam Description: ubiE/COQ5 methyltransferase family
  misc_feature (22)..(335): Homolog of NCBI NO: 1872473 NR Description: delta-24-sterol methyltransferase [Triticum
  misc_feature (1)..(335): Homolog of NCBI NO: 3560531 NR Description: cycloartenol-C24-methyltransferase [Oryza sativa
  misc_feature (1)..(338): Homolog of NCBI NO: 3603295 NR Description: S-adenosyl-methionine
  misc_feature (1)..(338): Homolog of NCBI NO: 7443715 NR Description: sterol 24-C-methyltransferase (EC 2.1.1.41) -
  misc_feature (1)..(338): Homolog of NCBI NO: 7443716 NR Description: sterol 24-C-methyltransferase (EC 2.1.1.41)
  misc_feature (1)..(338): Homolog of NCBI NO: 3560474 NR Description: S-adenosyl-methionine-sterol-C- methyltransferase
  misc_feature (1)..(335): Homolog of NCBI NO: 7443719 NR Description: sterol 24-C-methyltransferase (EC 2.1.1.41) -
  misc_feature (1)..(336): Homolog of NCBI NO: 21434843 NR Description: cephalopod [Arabidopsis thaliana]
  misc_feature (1)..(336): Homolog of NCBI NO: 15240691 NR Description: 24-sterol C-methyltransferase [Arabidopsis
  misc_feature (1)..(340): Homolog of NCBI NO: 7443720 NR Description: probable sterol 24-C-methyltransferase (EC
MDLASNLGGKIDKAEVLSAVQKYEKYHVCYGGQEEERKANYTDMVNKYYDLVTSFYEFGWGESFHFAPRWKGESLRESIKRHEHFLPLQLGLKPGQKVLDVGCGIGGPLREISRFSSTSITGLNNNEYQITRGKELNRIAGVDKTCNFVKADFMKMPFPDNSFDAVYAIEATCHAPDAYGCYKEIFRVLKPGQYFAAYEWCMTDSFDPQNPEHQKIKAEIEIGDGLPDIRLTAKCLEALKQAGFEVIWEKDLAVDSPLPWYLPLDKSHFSLSSFRLTAVGRLFTKNMVKVLEYVGLAPKGSLRVQDFLEKAAEGLVEGGKREIFTPMYFFLARKPDLDRN

SEQ ID NO: 53219 - protein, 297 aa, Glycine max
  peptide (1)..(297): Ceres Seq. ID no. 13495073
  misc_feature (17)..(209): Pfam Name: ubiE/COQ5 methyltransferase family Pfam Description: ubiE/COQ5 methyltransferase family
  misc_feature (1)..(292): Homolog of NCBI NO: 1872473 NR Description: delta-24-sterol methyltransferase [Triticum
  misc_feature (1)..(292): Homolog of NCBI NO: 3560531 NR Description: cycloartenol-C24-methyltransferase [Oryza sativa
  misc_feature (1)..(295): Homolog of NCBI NO: 3603295 NR Description: S-adenosyl-methionine
  misc_feature (1)..(295): Homolog of NCBI NO: 7443715 NR Description: sterol 24-C-methyltransferase (EC 2.1.1.41) -
  misc_feature (1)..(295): Homolog of NCBI NO: 7443716 NR Description: sterol 24-C-methyltransferase (EC 2.1.1.41)
  misc_feature (1)..(295): Homolog of NCBI NO: 3560474 NR Description: S-adenosyl-methionine-sterol-C- methyltransferase
  misc_feature (1)..(292): Homolog of NCBI NO: 7443719 NR Description: sterol 24-C-methyltransferase (EC 2.1.1.41) -
  misc_feature (1)..(293): Homolog of NCBI NO: 21434843 NR Description: cephalopod [Arabidopsis thaliana]
  misc_feature (1)..(293): Homolog of NCBI NO: 15240691 NR Description: 24-sterol C-methyltransferase [Arabidopsis
  misc_feature (1)..(297): Homolog of NCBI NO: 7443720 NR Description: probable sterol 24-C-methyltransferase (EC
MVNKYYDLVTSFYEFGWGESFHFAPRWKGESLRESIKRHEHFLPLQLGLKPGQKVLDVGCGIGGPLREISRFSSTSITGLNNNEYQITRGKELNRIAGVDKTCNFVKADFMKMPFPDNSFDAVYAIEATCHAPDAYGCYKEIFRVLKPGQYFAAYEWCMTDSFDPQNPEHQKIKAEIEIGDGLPDIRLTAKCLEALKQAGFEVIWEKDLAVDSPLPWYLPLDKSHFSLSSFRLTAVGRLFTKNMVKVLEYVGLAPKGSLRVQDFLEKAAEGLVEGGKREIFTPMYFFLARKPDLDRN

SEQ ID NO: 53220 - DNA, 1230 bp, Glycine max
  misc_feature (1)..(1230): Ceres Seq. ID no. 15177557
gatctgcccctttctctgtgcaattagcgtgccctaggcctgsccatgggagacgaagaagaggaggaggtgctcggttcgggtcaatcagcctccaccaacagcttgccacctcccgctgatagcacactcctcaaattgaaccatctcgacatacatgctgatgatgctgtatcacacgcttctcttgctgccaagaagaaaaagagaggcggccaacgggctgttggacctgataagagtggaagaggtctccgccaatttagtatgaaagtgtgtgagaaggtagaaagcaggggaagaacaacatacaatgaggtggcagatgagcttgttgccgaattttctgaaccaagcaatagtgaattgccccctgatcagcaacaatatgatgagaaaaacatccgccgaagggtctatgatgctctgaacgttctcatggcaatggatattatttctaaggacaaaaaagaaattcaatggaggggccttcctcgtactactgtgaatgatattgaagaactaaagacagagcgtcttgggctcaggaatagaattgaaaagaaaacagcctatctgcaggagcttgaggagcaattcgtaggtcttcagaaccttattcaacgaaatgagcagttatatagctcaggaaatcctcccagtggaggtgtatctttaccttttattttggtacagacacgtcctcatgcaactgtggaagtggaaatatcagaagatatgcagcttgttcattttgatttcaatagcactccttttgagctgcatgacgacaattatgttctcaaggcaatgaaatttggtgagagaccactggaagataatatgacacataatcttactgatggaggtgaaggttctagcatgtcaggcttgtgtcagccgcaggctcctacaattctaaatgtgtcaaacaggcctccaacatcacctcctctccctggcatactaaaggcaagagttaagcaagagcattaatctgtaaggttatcatattatgttgtcttatgtaaaagcatgtttgtatattttgtagagaaatttgctgcagttgatagaccgtcataatagttattcatcagttcagccaagtcattctgtaggttagaagcagatcggtatatcttctttgttaggggtagactttggcacattctttgcctatcatccgtcatttattaccgtaaaatttttaattttttgttttcccac

SEQ ID NO: 53221 - protein, 316 aa, Glycine max
  peptide (1)..(316): Ceres Seq. ID no. 15177558
  misc_feature (69)..(305): Pfam Name: Transcription factor E2F/dimerisation partner (TDP) Pfam Description: Transcription factor E2F/dimerisation partner
  misc_feature (57)..(256): Homolog of NCBI NO: 913227 NR Description: transcription factor XlDP-1
  misc_feature (57)..(284): Homolog of NCBI NO: 22326573 NR Description: DPA transcription factor [Arabidopsis thaliana]
  misc_feature (57)..(284): Homolog of NCBI NO: 11357273 NR Description: DP-2 transcription factor-like - Arabidopsis
  misc_feature (15)..(217): Homolog of NCBI NO: 37534748 NR Description: putative DP-like protein [Oryza sativa (japonica
  misc_feature (25)..(305): Homolog of NCBI NO: 11358893 NR Description: transcription factor-like protein - Arabidopsis
  misc_feature (10)..(305): Homolog of NCBI NO: 30680032 NR Description: DPB transcription factor [Arabidopsis thaliana]
  misc_feature (10)..(305): Homolog of NCBI NO: 21554147 NR Description: unknown [Arabidopsis thaliana]
  misc_feature (15)..(316): Homolog of NCBI NO: 29367654 NR Description: DP TF [Oryza sativa (japonica cultivar-group)]
  misc_feature (5)..(316): Homolog of NCBI NO: 29371983 NR Description: E2F dimerization factor [Oryza sativa (japonica
  misc_feature (10)..(316): Homolog of NCBI NO: 32187097 NR Description: DP1 [Populus tremula x Populus tremuloides]
MGDEEEEEVLGSGQSASTNSLPPPADSTLLKLNHLDIHADDAVSHASLAAKKKKRGGQRAVGPDKSGRGLRQFSMKVCEKVESRGRTTYNEVADELVAEFSEPSNSELPPDQQQYDEKNIRRRVYDALNVLMAMDIISKDKKEIQWRGLPRTTVNDIEELKTERLGLRNRIEKKTAYLQELEEQFVGLQNLIQRNEQLYSSGNPPSGGVSLPFILVQTRPHATVEVEISEDMQLVHFDFNSTPFELHDDNYVLKAMKFGERPLEDNMTHNLTDGGEGSSMSGLCQPQAPTILNVSNRPPTSPPLPGILKARVKQEH

SEQ ID NO: 53222 - protein, 242 aa, Glycine max
  peptide (1)..(242): Ceres Seq. ID no. 15177559
  misc_feature (1)..(231): Pfam Name: Transcription factor E2F/dimerisation partner (TDP) Pfam Description: Transcription factor E2F/dimerisation partner
  misc_feature (1)..(182): Homolog of NCBI NO: 913227 NR Description: transcription factor XlDP-1
  misc_feature (1)..(210): Homolog of NCBI NO: 22326573 NR Description: DPA transcription factor [Arabidopsis thaliana]
  misc_feature (1)..(210): Homolog of NCBI NO: 11357273 NR Description: DP-2 transcription factor-like - Arabidopsis
  misc_feature (1)..(143): Homolog of NCBI NO: 37534748 NR Description: putative DP-like protein [Oryza sativa (japonica
  misc_feature (1)..(231): Homolog of NCBI NO: 11358893 NR Description: transcription factor-like protein - Arabidopsis
  misc_feature (1)..(231): Homolog of NCBI NO: 30680032 NR Description: DPB transcription factor [Arabidopsis thaliana]
  misc_feature (1)..(231): Homolog of NCBI NO: 21554147 NR Description: unknown [Arabidopsis thaliana]
  misc_feature (1)..(242): Homolog of NCBI NO: 29367654 NR Description: DP TF [Oryza sativa (japonica cultivar-group)]
  misc_feature (1)..(242): Homolog of NCBI NO: 29371983 NR Description: E2F dimerization factor [Oryza sativa (japonica
  misc_feature (1)..(242): Homolog of NCBI NO: 32187097 NR Description: DP1 [Populus tremula x Populus tremuloides]
MKVCEKVESRGRTTYNEVADELVAEFSEPSNSELPPDQQQYDEKNIRRRVYDALNVLMAMDIISKDKKEIQWRGLPRTTVNDIEELKTERLGLRNRIEKKTAYLQELEEQFVGLQNLIQRNEQLYSSGNPPSGGVSLPFILVQTRPHATVEVEISEDMQLVHFDFNSTPFELHDDNYVLKAMKFGERPLEDNMTHNLTDGGEGSSMSGLCQPQAPTILNVSNRPPTSPPLPGILKARVKQEH

SEQ ID NO: 53223 - protein, 185 aa, Glycine max
  peptide (1)..(185): Ceres Seq. ID no. 15177560
  misc_feature (1)..(174): Pfam Name: Transcription factor E2F/dimerisation partner (TDP) Pfam Description: Transcription factor E2F/dimerisation partner
  misc_feature (1)..(125): Homolog of NCBI NO: 913227 NR Description: transcription factor XlDP-1
  misc_feature (1)..(153): Homolog of NCBI NO: 22326573 NR Description: DPA transcription factor [Arabidopsis thaliana]
  misc_feature (1)..(153): Homolog of NCBI NO: 11357273 NR Description: DP-2 transcription factor-like - Arabidopsis
  misc_feature (1)..(86): Homolog of NCBI NO: 37534748 NR Description: putative DP-like protein [Oryza sativa (japonica
  misc_feature (1)..(174): Homolog of NCBI NO: 11358893 NR Description: transcription factor-like protein - Arabidopsis
  misc_feature (1)..(174): Homolog of NCBI NO: 30680032 NR Description: DPB transcription factor [Arabidopsis thaliana]
  misc_feature (1)..(174): Homolog of NCBI NO: 21554147 NR Description: unknown [Arabidopsis thaliana]
  misc_feature (1)..(185): Homolog of NCBI NO: 29367654 NR Description: DP TF [Oryza sativa (japonica cultivar-group)]
  misc_feature (1)..(185): Homolog of NCBI NO: 29371983 NR Description: E2F dimerization factor [Oryza sativa (japonica
  misc_feature (1)..(185): Homolog of NCBI NO: 32187097 NR Description: DP1 [Populus tremula x Populus tremuloides]
MAMDIISKDKKEIQWRGLPRTTVNDIEELKTERLGLRNRIEKKTAYLQELEEQFVGLQNLIQRNEQLYSSGNPPSGGVSLPFILVQTRPHATVEVEISEDMQLVHFDFNSTPFELHDDNYVLKAMKFGERPLEDNMTHNLTDGGEGSSMSGLCQPQAPTILNVSNRPPTSPPLPGILKARVKQEH

SEQ ID NO: 53224 - DNA, 1679 bp, Glycine max
  misc_feature (1)..(1679): Ceres Seq. ID no. 14311291
tattataattttattttcaatcacatgagttacaaatgtatctgcgtgcaaaaaagattgaatgttccttgaagatactaaataatacaattttatcaagcagaaccaagttatatttttaagtgtatcgttacctatcattgcattctattacaaatattctatcattgcattctattacatgggattataagtgttctgatttgtctttagttatatttttaattacttaatgttctaattaattgaaaaaaccattttttaaataaagttgctttctgattagtatttgttagagatgcaatataaagtcattcatgtatcgttacctagcagcttgagctttttggatagtttgttaatgacatggtatgaaattctctgactatgtggtctagagttcaatcctttatactcttattcttctaataaaacgttaaatttcaaccaaggtagatcatatgtggacttgtgcattatccacacttaatgtccaaaaggctcttgcatgagaggcatgttaaagatgtaaaataaaatcattcatgtatcttcacctatgaacttaagctttttggataatttgttcttgatagtaataattagtaaaatcaaatctgttatttaaatgtatcaaaatttacatgtgaaaatttaaattggtctaagttcattatagtttgtctttgactattatagtcctttatacctttctttaaatgggtatgtactaagttgtggggatgttatcgcatcatcactttccttttttatgaaatttcattaacattaagtttaaaaacttccagccactaggtcacttgatttttcctgctcaatttataggttactcaaatgaagcaggagcatgacaagaggcaagcaagcctcatagctgaacacaacgaacagctaaagcgtacccaactgcaagctgaaaatgaattgagagagaaaacaatgtttatgaggaatgatcatgaagctcagatcaaagcattgaggtgtgaacttgaagatgagtgtcggaagctggaagaggagttgcatcttcaaaaaatccaaagaagacaggcaaagggctttgttgcagttgcagtggaaagtgatgagtgacaagcctaaagaggaccaagaagtgaattcaaaacaggccacgaggttgtaacatatgaaagtccgcgaccgatgatggggattcatcgtttagtgtttgtgttatttcgtcaactgggtagggaaacagtgtatgcaccaggatggcgccagaatttcaacactagagaatttgctgaactctacaaccttggattgccagttgctgctgtctatttcaacattcagagggaatctggctctggtggaagaaggttataccattgagggttctagaaatatttctcccacactctttagtagtaaatgagtgcttttcaacttaatattaaactgagcatatagtgaaataaattgcttgctagatcagttggtagcaacaagtcctctacatatacacataaatgaaatcgaagcatctcggttcatttttcttatttctattatcagctgcagaatgttatagatatattatatatgtaaagtggaaaacaacttgagcccaagttaaattatggggtacttatacttttgctaaaaaaaaaaaaaaaaaaaaaaaaaag

SEQ ID NO: 53225 - protein, 86 aa, Glycine max
  peptide (1)..(86): Ceres Seq. ID no. 14311292
  misc_feature (1)..(78): Homolog of NCBI NO: 25518574 NR Description: hypothetical protein T16E15.11 - Arabidopsis
  misc_feature (1)..(78): Homolog of NCBI NO: 18395097 NR Description: hypothetical protein [Arabidopsis thaliana]
  misc_feature (1)..(78): Homolog of NCBI NO: 30687788 NR Description: expressed protein [Arabidopsis thaliana]
  misc_feature (1)..(78): Homolog of NCBI NO: 25402962 NR Description: protein T16E15.12 [imported] - Arabidopsis
MKQEHDKRQASLIAEHNEQLKRTQLQAENELREKTMFMRNDHEAQIKALRCELEDECRKLEEELHLQKIQRRQAKGFVAVAVESDE

SEQ ID NO: 53226 - protein, 64 aa, Glycine max
  peptide (1)..(64): Ceres Seq. ID no. 14311293
  misc_feature (1)..(62): Homolog of NCBI NO: 15218709 NR Description: flowering signals mediating protein FT
  misc_feature (1)..(61): Homolog of NCBI NO: 38524448 NR Description: flowering locus T [Populus nigra]
  misc_feature (1)..(60): Homolog of NCBI NO: 4903139 NR Description: extensive homology to FT (FLOWERING LOCUS T, and TSF (TWIN SISTER OF FT, AB027506) genes of Arabidopsis
  misc_feature (1)..(61): Homolog of NCBI NO: 38347694 NR Description: flowering locus T [Populus nigra]
  misc_feature (1)..(63): Homolog of NCBI NO: 34898248 NR Description: FT-like protein [Oryza sativa (japonica
  misc_feature (1)..(62): Homolog of NCBI NO: 34904042 NR Description: putative phophatidylethanolamine binding protein
  misc_feature (1)..(61): Homolog of NCBI NO: 38524446 NR Description: flowering locus T [Populus nigra]
  misc_feature (1)..(63): Homolog of NCBI NO: 34898254 NR Description: Hd3a [Oryza sativa (japonica cultivar-group)]
  misc_feature (1)..(64): Homolog of NCBI NO: 14517618 NR Description: Hd3a [Oryza sativa (indica cultivar-group)]
  misc_feature (1)..(61): Homolog of NCBI NO: 28200390 NR Description: SP3D [Lycopersicon esculentum]
MMGIHRLVFVLFRQLGRETVYAPGWRQNFNTREFAELYNLGLPVAAVYFNIQRESGSGGRRLYH

SEQ ID NO: 53227 - protein, 63 aa, Glycine max
  peptide (1)..(63): Ceres Seq. ID no. 14311294
  misc_feature (1)..(61): Homolog of NCBI NO: 15218709 NR Description: flowering signals mediating protein FT
  misc_feature (1)..(60): Homolog of NCBI NO: 38524448 NR Description: flowering locus T [Populus nigra]
  misc_feature (1)..(59): Homolog of NCBI NO: 4903139 NR Description: extensive homology to FT (FLOWERING LOCUS T, and TSF (TWIN SISTER OF FT, AB027506) genes of Arabidopsis
  misc_feature (1)..(60): Homolog of NCBI NO: 38347694 NR Description: flowering locus T [Populus nigra]
  misc_feature (1)..(62): Homolog of NCBI NO: 34898248 NR Description: FT-like protein [Oryza sativa (japonica
  misc_feature (1)..(61): Homolog of NCBI NO: 34904042 NR Description: putative phophatidylethanolamine binding protein
  misc_feature (1)..(60): Homolog of NCBI NO: 38524446 NR Description: flowering locus T [Populus nigra]
  misc_feature (1)..(62): Homolog of NCBI NO: 34898254 NR Description: Hd3a [Oryza sativa (japonica cultivar-group)]
  misc_feature (1)..(63): Homolog of NCBI NO: 14517618 NR Description: Hd3a [Oryza sativa (indica cultivar-group)]
  misc_feature (1)..(60): Homolog of NCBI NO: 28200390 NR Description: SP3D [Lycopersicon esculentum]
MGIHRLVFVLFRQLGRETVYAPGWRQNFNTREFAELYNLGLPVAAVYFNIQRESGSGGRRLYH

SEQ ID NO: 53228 - DNA, 1533 bp, Glycine max
  misc_feature (1)..(1533): Ceres Seq. ID no. 15176423
gaggacaaaactcgaagcagaaactcaactcaccaacacagttgcattattttctttccagatccaactcaaaattgcaatgggagtagaagatacagatatttgtatcatcaaggagccagatcatgttgtagtctattcagatggcatttcccatgattcaggtcatgaagctggaagtgatcatcacaatattacagagtcttatgaacaaatcaatgagactactgaacatcatagttcagaggagagtgcaaaggaatatgaggtgaaggaatgtacaacagaaatttctgttaaggtctctgatgtctctaatgttaaaaaatgtgaggataagttaacctcagattctgagggtgtcctcagtgagaaaagttttaaatctcacaaaacaaggtgtaaacataagccacgagataccgggaagaatggatcaagacctcctgttacaggcagtgcccaaatcaggcccacagttccacaaccgttttccctagcaactgagaagcgtgcttcgatcgcaactcgtcctgcttttgaagaagacaacaagggcagtaacgagagaaaatctttgaacaaaaaaaatgtgctatctcccaatctgtttaaacagaatcagttgaaatctcctgtagtttcaagaatgccattgcaacctgataacaagaagcatcctgatgatgatgattcttgttcagttgcttcaataactgcagcttctgtgagatcaatcaagtccaggacaactgttgcttctgctcccgtgtttcggtctactcaacgtgcagaaaaacggaaggagttttattcaaaattagaggaaaagcagcaagcaatggaagctgagaagaatcaaagtgaagctaggaccaaggaagagatggaggaagctatcaagcagctaaggaagagtctaacttttaaagcaagccctatgccaagcttttaccatgaagggcctcctcctaaggttgaattgaagaagcttccagccacgcgagcaaaatctccaaagctgggtcggcgaaagagcaacaatggtgcagttaatttatctgaaggtgacaaggagaaaggagctggaatcaggagaaagcatcacacaccgaagaccaacaactatggtgataagagtgatgtaaatggcttatctgaccccaaaaacaagaccaagcatattgaaggaattaatgcaaccgaggtaactggacaagcaaacttggagattggcagccagtgaagttttcagtgagattagattctcatttttctaatttatatgtatccagggactgtggtcttgtttcttgcaacaagcatcttcactttgtttttccttttaacttatgagcacttgctgctgtgtgcattgtgtaattagtgaaagtgtttatttgtaatttatttcaaattatttgtaaaattcaatcatgttgctcataagagcaatttgagcatttgtttgtctgtctgaagtccaggatcagattgttttaagtcgccattaaataatgctgttcgattaac

SEQ ID NO: 53229 - protein, 414 aa, Glycine max
  peptide (1)..(414): Ceres Seq. ID no. 15176424
  misc_feature (184)..(378): Homolog of NCBI NO: 30679219 NR Description: expressed protein [Arabidopsis thaliana]
  misc_feature (184)..(378): Homolog of NCBI NO: 21618286 NR Description: unknown [Arabidopsis thaliana]
  misc_feature (184)..(378): Homolog of NCBI NO: 18396961 NR Description: expressed protein [Arabidopsis thaliana]
  misc_feature (184)..(378): Homolog of NCBI NO: 6175167 NR Description: unknown protein [Arabidopsis thaliana]
  misc_feature (143)..(395): Homolog of NCBI NO: 34897180 NR Description: unknown protein [Oryza sativa (japonica
  misc_feature (202)..(373): Homolog of NCBI NO: 32395575 NR Description: seed specific protein Bn15D14A [Brassica napus]
  misc_feature (33)..(133): Homolog of NCBI NO: 15228950 NR Description: expressed protein [Arabidopsis thaliana]
  misc_feature (33)..(133): Homolog of NCBI NO: 9294199 NR Description: gb|AAF04893.1~gene_id:MXC7.13~similar to unknown
  misc_feature (152)..(373): Homolog of NCBI NO: 15228950 NR Description: expressed protein [Arabidopsis thaliana]
  misc_feature (152)..(373): Homolog of NCBI NO: 9294199 NR Description: gb|AAF04893.1~gene_id:MXC7.13~similar to unknown
RTKLEAETQLTNTVALFSFQIQLKIAMGVEDTDICIIKEPDHVVVYSDGISHDSGHEAGSDHHNITESYEQINETTEHHSSEESAKEYEVKECTTEISVKVSDVSNVKKCEDKLTSDSEGVLSEKSFKSHKTRCKHKPRDTGKNGSRPPVTGSAQIRPTVPQPFSLATEKRASIATRPAFEEDNKGSNERKSLNKKNVLSPNLFKQNQLKSPVVSRMPLQPDNKKHPDDDDSCSVASITAASVRSIKSRTTVASAPVFRSTQRAEKRKEFYSKLEEKQQAMEAEKNQSEARTKEEMEEAIKQLRKSLTFKASPMPSFYHEGPPPKVELKKLPATRAKSPKLGRRKSNNGAVNLSEGDKEKGAGIRRKHHTPKTNNYGDKSDVNGLSDPKNKTKHIEGINATEVTGQANLEIGSQ

SEQ ID NO: 53230 - protein, 388 aa, Glycine max
  peptide (1)..(388): Ceres Seq. ID no. 15176425
  misc_feature (158)..(352): Homolog of NCBI NO: 30679219 NR Description: expressed protein [Arabidopsis thaliana]
  misc_feature (158)..(352): Homolog of NCBI NO: 21618286 NR Description: unknown [Arabidopsis thaliana]
  misc_feature (158)..(352): Homolog of NCBI NO: 18396961 NR Description: expressed protein [Arabidopsis thaliana]
  misc_feature (158)..(352): Homolog of NCBI NO: 6175167 NR Description: unknown protein [Arabidopsis thaliana]
  misc_feature (117)..(369): Homolog of NCBI NO: 34897180 NR Description: unknown protein [Oryza sativa (japonica
  misc_feature (176)..(347): Homolog of NCBI NO: 32395575 NR Description: seed specific protein Bn15D14A [Brassica napus]
  misc_feature (7)..(107): Homolog of NCBI NO: 15228950 NR Description: expressed protein [Arabidopsis thaliana]
  misc_feature (7)..(107): Homolog of NCBI NO: 9294199 NR Description: gb|AAF04893.1~gene_id:MXC7.13~similar to unknown
  misc_feature (126)..(347): Homolog of NCBI NO: 15228950 NR Description: expressed protein [Arabidopsis thaliana]
  misc_feature (126)..(347): Homolog of NCBI NO: 9294199 NR Description: gb|AAF04893.1~gene_id:MXC7.13~similar to unknown
MGVEDTDICIIKEPDHVVVYSDGISHDSGHEAGSDHHNITESYEQINETTEHHSSEESAKEYEVKECTTEISVKVSDVSNVKKCEDKLTSDSEGVLSEKSFKSHKTRCKHKPRDTGKNGSRPPVTGSAQIRPTVPQPFSLATEKRASIATRPAFEEDNKGSNERKSLNKKNVLSPNLFKQNQLKSPVVSRMPLQPDNKKHPDDDDSCSVASITAASVRSIKSRTTVASAPVFRSTQRAEKRKEFYSKLEEKQQAMEAEKNQSEARTKEEMEEAIKQLRKSLTFKASPMPSFYHEGPPPKVELKKLPATRAKSPKLGRRKSNNGAVNLSEGDKEKGAGIRRKHHTPKTNNYGDKSDVNGLSDPKNKTKHIEGINATEVTGQANLEIGSQ

SEQ ID NO: 53231 - DNA, 1291 bp, Glycine max
  misc_feature (1)..(1291): Ceres Seq. ID no. 14310917
gaatcttaaataagagaacagcccaaaacctttcaaaatacacatgctgcaaattgctcacccaatcaccagccatgggagaggttgacgcagcattcatccaagacccaccacacaggccaaagctctccaccatccaagccgaaggaattcccataattgatctctctccaataaccaaccacagagtttcagacccttctgctattgaaggcttagtgaaggagataggtagtgcatgcaacgagtggggtttcttccaagtaacaaaccatggagtgcccctcactctaaggcaaaacattgagaaagcctcaaaattgttctttgcacagagtgcggaggaaaagagaaaggttagcagaaatgagagctctccagcgggttattatgacacagaacacaccaaaaacgttagggactggaaagaagtctttgattttctagccaaagaacccactttcattcctgtcacttctgatgaacatgatgatcgagtcaatcagtggactaatcaatcccctgaataccctctaaactttagggttgtaacacaagagtatattcaagagatggaaaagctgtcctttaagattttagagcttatagctttgagcttaggccttgaagcaaagaggtttgaagaatttttcatcaaagaccaaactagctttattcgactcaaccactatcctccatgcccttatcctgaccttgctcttggcgtcggtcgacacaaggaccctggtgccttaaccattcttgcacaggatgaggttggaggacttgaagtgagacgtaaagcagatcaagagtggataagagtgaaacccaccccagatgcttatatcatcaacattggtgacactgttcaggtttggagcaatgatgcatatgagagtgtggatcacagagtggtggtcaactctgagaaggaaaggttttccattcctttcttcttcttccctgcacacgacaccgaagttaagcctttggaggagctgataaatgagcaaaacccttcaaaatataggccatacaagtggggcaagtttcttgtccacagagggaacagcaattttaagaagcaaaatgaggagaacattcaaatttatcattacaagatagcttaaagggtaaattgtgtatgatattatcatgatatgaggcagcgttgatccaagacaacgttactgatatgaataagtccgatcaacttcactgctaaatttcctagtgtgccttatgtattgaacaatcactgaataaaagaactaaattattaccattt

SEQ ID NO: 53232 - protein, 376 aa, Glycine max
  peptide (1)..(376): Ceres Seq. ID no. 14310918
  misc_feature (221)..(322): Pfam Name: 2OG-Fe(II) oxygenase superfamily Pfam Description: 2OG-Fe(II) oxygenase superfamily
  misc_feature (47)..(351): Homolog of NCBI NO: 21537324 NR Description: leucoanthocyanidin dioxygenase-like protein
  misc_feature (50)..(354): Homolog of NCBI NO: 18402992 NR Description: oxidoreductase, 2OG-Fe(II) oxygenase family
  misc_feature (47)..(351): Homolog of NCBI NO: 15239179 NR Description: oxidoreductase, 2OG-Fe(II) oxygenase family
  misc_feature (67)..(277): Homolog of NCBI NO: 18103924 NR Description: putative oxylase protein [Pinus pinaster]
  misc_feature (247)..(374): Homolog of NCBI NO: 40253917 NR Description: putative Isopenicillin N synthase and related
  misc_feature (28)..(176): Homolog of NCBI NO: 40253917 NR Description: putative Isopenicillin N synthase and related
  misc_feature (25)..(292): Homolog of NCBI NO: 30685157 NR Description: flavonol synthase family [Arabidopsis thaliana]
  misc_feature (25)..(375): Homolog of NCBI NO: 21593702 NR Description: unknown [Arabidopsis thaliana]
  misc_feature (25)..(375): Homolog of NCBI NO: 18402081 NR Description: flavonol synthase family [Arabidopsis thaliana]
  misc_feature (25)..(374): Homolog of NCBI NO: 18402079 NR Description: oxidoreductase, 2OG-Fe(II) oxygenase family
ILNKRTAQNLSKYTCCKLLTQSPAMGEVDAAFIQDPPHRPKLSTIQAEGIPIIDLSPITNHRVSDPSAIEGLVKEIGSACNEWGFFQVTNHGVPLTLRQNIEKASKLFFAQSAEEKRKVSRNESSPAGYYDTEHTKNVRDWKEVFDFLAKEPTFIPVTSDEHDDRVNQWTNQSPEYPLNFRVVTQEYIQEMEKLSFKILELIALSLGLEAKRFEEFFIKDQTSFIRLNHYPPCPYPDLALGVGRHKDPGALTILAQDEVGGLEVRRKADQEWIRVKPTPDAYIINIGDTVQVWSNDAYESVDHRVVVNSEKERFSIPFFFFPAHDTEVKPLEELINEQNPSKYRPYKWGKFLVHRGNSNFKKQNEENIQIYHYKIA

SEQ ID NO: 53233 - protein, 352 aa, Glycine max
  peptide (1)..(352): Ceres Seq. ID no. 14310919
  misc_feature (197)..(298): Pfam Name: 2OG-Fe(II) oxygenase superfamily Pfam Description: 2OG-Fe(II) oxygenase superfamily
  misc_feature (23)..(327): Homolog of NCBI NO: 21537324 NR Description: leucoanthocyanidin dioxygenase-like protein
  misc_feature (26)..(330): Homolog of NCBI NO: 18402992 NR Description: oxidoreductase, 2OG-Fe(II) oxygenase family
  misc_feature (23)..(327): Homolog of NCBI NO: 15239179 NR Description: oxidoreductase, 2OG-Fe(II) oxygenase family
  misc_feature (43)..(253): Homolog of NCBI NO: 18103924 NR Description: putative oxylase protein [Pinus pinaster]
  misc_feature (223)..(350): Homolog of NCBI NO: 40253917 NR Description: putative Isopenicillin N synthase and related
  misc_feature (4)..(152): Homolog of NCBI NO: 40253917 NR Description: putative Isopenicillin N synthase and related
  misc_feature (1)..(268): Homolog of NCBI NO: 30685157 NR Description: flavonol synthase family [Arabidopsis thaliana]
  misc_feature (1)..(351): Homolog of NCBI NO: 21593702 NR Description: unknown [Arabidopsis thaliana]
  misc_feature (1)..(351): Homolog of NCBI NO: 18402081 NR Description: flavonol synthase family [Arabidopsis thaliana]
  misc_feature (1)..(350): Homolog of NCBI NO: 18402079 NR Description: oxidoreductase, 2OG-Fe(II) oxygenase family
MGEVDAAFIQDPPHRPKLSTIQAEGIPIIDLSPITNHRVSDPSAIEGLVKEIGSACNEWGFFQVTNHGVPLTLRQNIEKASKLFFAQSAEEKRKVSRNESSPAGYYDTEHTKNVRDWKEVFDFLAKEPTFIPVTSDEHDDRVNQWTNQSPEYPLNFRVVTQEYIQEMEKLSFKILELIALSLGLEAKRFEEFFIKDQTSFIRLNHYPPCPYPDLALGVGRHKDPGALTILAQDEVGGLEVRRKADQEWIRVKPTPDAYIINIGDTVQVWSNDAYESVDHRVVVNSEKERFSIPFFFFPAHDTEVKPLEELINEQNPSKYRPYKWGKFLVHRGNSNFKKQNEENIQIYHYKIA

SEQ ID NO: 53234 - DNA, 1589 bp, Glycine max
  misc_feature (1)..(1589): Ceres Seq. ID no. 14304288
aatcgcaactcgcgaaagttgttttgtaaagtcgtcacttcccacttcgtctccgttgctgtagttgtgttctgtgtgggtcgctgaagggcccttcatcagcacagatggatttccatggattcctaaacgacttgcaggattgggaattttctagaaaggataaagcacgaccacaaaaggaaaatgttggcttcatcttctcgaattacgggatctgtgggtgtggagaaggcatcaaaaggagataccatttcttttgataatgcaagaaattctccaggacagtatgatttatcaagaattaatcatttgcatagtagttttgttcctgaagatgttcctgatgctgcttccgagaaagacctgggcaacgagtttttcaagcagaaaaagtttaaggaagctagagactgctattcaaggagcattgccttatcaccaacagctgtagcatatgcaaatagggcaatggccaatatcaagctcagaagattccaagaggctgaggatgactgcacagaggccttaaatcttgatgatcgttacataaaagcatactcacgaagagcaacagctagaaaagaacttggaaaaattaaagaatcaatggacgatgctgaatttgccttgaggttggaaccaaacaatcaagaaatcaagaaacagtatgctgatgctaagtctttctatgagaaagatattcttcagaaagcatcaggggttctgagaagcactgtacagggaactcaaaaagtgggaaagtcagaggaaaaagttaatggagacagcatccaccccatttcacgtagtactcaaaagtctggactagctgaagttcatcatcataaaaagagaaataaaagccagaagctggcctcaatcacaaggagatgatggttctaagggaggtttgagtgcaagcaacagtttggagcagagaaatcacagaattaccaagccagaaatgaaagcttctgttcaacagcttgcttctcgcgctgcttctagagccatgtctgaagctgccaaaaacgtaacacctccaactacagcttatcagtttgaggtctcctggagagcattttcaggtgatcttgctctgcaggctcgtctattaaaggctatatctccccatgaattgccgaaaatattcaaaaatgccttgtcttctaccatactaattgagatcatcaagtgtcttgcatctcttttcactgaggacatggatctggttgtcagttatttggagcatttgaccaaggtaccaagatttgatgtgattgtaatgtgcctttcatcaacaaataaggatgacatacgcaagatctgggatgaagtgttcagcggtgaggcaacaccaatagagtatgcagagattctggacaaccttcaatcaaagttcggccttggacagtgacatcttcccctgtatgttttaatatttttttttcctcggtggatcctctcccttccgcaactatcttcacttgtaaattattatgctattgaaatgtttgagcattattgacggtcaacttgatccatctttaagcgttagttgataatgaggaaatgggaggaaaaag

SEQ ID NO: 53235 - protein, 236 aa, Glycine max
  peptide (1)..(236): Ceres Seq. ID no. 14304289
  misc_feature (55)..(88): Pfam Name: TPR Domain Pfam Description: TPR Domain
  misc_feature (45)..(159): Homolog of NCBI NO: 31745160 NR Description: small glutamine rich protein with
  misc_feature (45)..(159): Homolog of NCBI NO: 21450231 NR Description: RIKEN cDNA C630001O05 [Mus musculus]
  misc_feature (45)..(159): Homolog of NCBI NO: 24308141 NR Description: small glutamine rich protein with
  misc_feature (14)..(163): Homolog of NCBI NO: 28277896 NR Description: Similar to hypothetical protein FLJ21908 [Danio
  misc_feature (55)..(176): Homolog of NCBI NO: 13386276 NR Description: RIKEN cDNA 2310042P20 [Mus musculus]
  misc_feature (37)..(190): Homolog of NCBI NO: 13375809 NR Description: hypothetical protein FLJ21908 [Homo sapiens]
  misc_feature (37)..(190): Homolog of NCBI NO: 33989661 NR Description: Unknown (protein for MGC:64954) [Homo sapiens]
  misc_feature (1)..(176): Homolog of NCBI NO: 13375809 NR Description: hypothetical protein FLJ21908 [Homo sapiens]
  misc_feature (1)..(217): Homolog of NCBI NO: 33989661 NR Description: Unknown (protein for MGC:64954) [Homo sapiens]
  misc_feature (40)..(186): Homolog of NCBI NO: 15223536 NR Description: serine/threonine protein phosphatase - related
MLASSSRITGSVGVEKASKGDTISFDNARNSPGQYDLSRINHLHSSFVPEDVPDAASEKDLGNEFFKQKKFKEARDCYSRSIALSPTAVAYANRAMANIKLRRFQEAEDDCTEALNLDDRYIKAYSRRATARKELGKIKESMDDAEFALRLEPNNQEIKKQYADAKSFYEKDILQKASGVLRSTVQGTQKVGKSEEKVNGDSIHPISRSTQKSGLAEVHHHKKRNKSQKLASITRR

SEQ ID NO: 53236 - protein, 150 aa, Glycine max
  peptide (1)..(150): Ceres Seq. ID no. 14304290
  misc_feature (18)..(125): Homolog of NCBI NO: 13375809 NR Description: hypothetical protein FLJ21908 [Homo sapiens]
  misc_feature (18)..(125): Homolog of NCBI NO: 33989661 NR Description: Unknown (protein for MGC:64954) [Homo sapiens]
MKASVQQLASRAASRAMSEAAKNVTPPTTAYQFEVSWRAFSGDLALQARLLKAISPHELPKIFKNALSSTILIEIIKCLASLFTEDMDLVVSYLEHLTKVPRFDVIVMCLSSTNKDDIRKIWDEVFSGEATPIEYAEILDNLQSKFGLGQ

SEQ ID NO: 53237 - protein, 141 aa, Glycine max
  peptide (1)..(141): Ceres Seq. ID no. 14304291
  misc_feature (1)..(64): Homolog of NCBI NO: 31745160 NR Description: small glutamine rich protein with
  misc_feature (1)..(64): Homolog of NCBI NO: 21450231 NR Description: RIKEN cDNA C630001O05 [Mus musculus]
  misc_feature (1)..(64): Homolog of NCBI NO: 24308141 NR Description: small glutamine rich protein with
  misc_feature (1)..(68): Homolog of NCBI NO: 28277896 NR Description: Similar to hypothetical protein FLJ21908 [Danio
  misc_feature (1)..(81): Homolog of NCBI NO: 13386276 NR Description: RIKEN cDNA 2310042P20 [Mus musculus]
  misc_feature (1)..(95): Homolog of NCBI NO: 13375809 NR Description: hypothetical protein FLJ21908 [Homo sapiens]
  misc_feature (1)..(95): Homolog of NCBI NO: 33989661 NR Description: Unknown (protein for MGC:64954) [Homo sapiens]
  misc_feature (1)..(81): Homolog of NCBI NO: 13375809 NR Description: hypothetical protein FLJ21908 [Homo sapiens]
  misc_feature (1)..(122): Homolog of NCBI NO: 33989661 NR Description: Unknown (protein for MGC:64954) [Homo sapiens]
  misc_feature (1)..(91): Homolog of NCBI NO: 15223536 NR Description: serine/threonine protein phosphatase - related
MANIKLRRFQEAEDDCTEALNLDDRYIKAYSRRATARKELGKIKESMDDAEFALRLEPNNQEIKKQYADAKSFYEKDILQKASGVLRSTVQGTQKVGKSEEKVNGDSIHPISRSTQKSGLAEVHHHKKRNKSQKLASITRR

SEQ ID NO: 53238 - DNA, 1316 bp, Glycine max
  misc_feature (1)..(1316): Ceres Seq. ID no. 15176375
gaaattcaaaaaaaaaaaaaaaaaacctgttacagagagatacagagagagagagacggagatggagatggagaaaacgggcgcaggagtagtagtgttatcggcgaaggaggcattcgagaagcttgagaaggtcggagaagggacatacgggaaggtgtacagggcacgagagaaggccactgggaaaatcgttgctctcaagaagactcgtcttcacgaggaccaagacggtgttcctcccaccacacttcgcgaggtttccatcttgcgaatgctctctcgcgatccccatgtcgttaggttaatggatgtgaagcaaggccagaacaaggaagggaagacagtgttgtacttggtgtttgagtacatggacactgatctcaagaaattcatccgctccttcgatcaaccgggacaaaacattccacccgaaactatcaaaagcttgatgtaccagctttgcaaggggattgctttctgccacggtcatggcatcttgcacagggacttgaagcctcacaatctgttgatggaccgaaaaacaatgatgcttaaaattgctgatcttggactcgctcgggcatttactgtgccaattaagaaatatacacatgagatactaaccctgtggtatagagctcatgaagtcctcttgggtgctacccattactcaatggcagtggacatatggtccgttggctgcatatttgccgaacttgtcaccagacgagctctctttcctggtgattccgagcttcaacaactcctgcatatattcaggctattgggtactcctaatgaagaggtgtggccaggggtgagtaaactaaaggactggcatgaatacccccaatggaactctcaaagtctgtcaacggctgttccaggtttggaggagcttggactcgatttgctatctcaaatgttggagtatgaaccttccaagaggatttctgcaaagaaagcaatggaacatgcttacttcgatgacctggacaagaggaatctttagaaagacacagattgattcaagatttggttgtagaaatttatgactaccaatttatttttatgcttctctcgagcgtgtatcgttttaggatgatggacttttgctgtttaacttttcatatttgaggactgacggagtgattgattgcgcttgggatttatttgcagaaactacatttgaaattaggattagtaaaaaaaatgttctgtttagttttcaatataaagcaatagagatagttgcatctacagctacatgtggatcttgcatgacttcctataaatgaagggataactttcac

SEQ ID NO: 53239 - protein, 337 aa, Glycine max
  peptide (1)..(337): Ceres Seq. ID no. 15176376
  misc_feature (39)..(329): Pfam Name: Protein kinase domain Pfam Description: Protein kinase domain
  misc_feature (37)..(334): Homolog of NCBI NO: 7489567 NR Description: protein kinase cdc2 homolog - rice
  misc_feature (37)..(336): Homolog of NCBI NO: 21537217 NR Description: putative cell division control protein cdc2
  misc_feature (29)..(336): Homolog of NCBI NO: 14488071 NR Description: At1g76540/F14G6_14 [Arabidopsis thaliana]
  misc_feature (29)..(336): Homolog of NCBI NO: 15223081 NR Description: cell division control protein, putative
  misc_feature (21)..(337): Homolog of NCBI NO: 11125685 NR Description: B2-type cyclin dependent kinase [Lycopersicon
  misc_feature (37)..(337): Homolog of NCBI NO: 21536682 NR Description: putative cell division control protein cdc2
  misc_feature (34)..(337): Homolog of NCBI NO: 5921447 NR Description: CELL DIVISION CONTROL PROTEIN 2 HOMOLOG D
  misc_feature (23)..(337): Homolog of NCBI NO: 15218072 NR Description: cell division control protein, putative
  misc_feature (32)..(337): Homolog of NCBI NO: 32187089 NR Description: cyclin-dependent kinase [Populus tremula x
  misc_feature (23)..(337): Homolog of NCBI NO: 7434327 NR Description: probable cdc2-like protein kinase cdc2MsF -
KFKKKKKKPVTERYRERETEMEMEKTGAGVVVLSAKEAFEKLEKVGEGTYGKVYRAREKATGKIVALKKTRLHEDQDGVPPTTLREVSILRMLSRDPHVVRLMDVKQGQNKEGKTVLYLVFEYMDTDLKKFIRSFDQPGQNIPPETIKSLMYQLCKGIAFCHGHGILHRDLKPHNLLMDRKTMMLKIADLGLARAFTVPIKKYTHEILTLWYRAHEVLLGATHYSMAVDIWSVGCIFAELVTRRALFPGDSELQQLLHIFRLLGTPNEEVWPGVSKLKDWHEYPQWNSQSLSTAVPGLEELGLDLLSQMLEYEPSKRISAKKAMEHAYFDDLDKRNL

SEQ ID NO: 53240 - protein, 317 aa, Glycine max
  peptide (1)..(317): Ceres Seq. ID no. 15176377
  misc_feature (19)..(309): Pfam Name: Protein kinase domain Pfam Description: Protein kinase domain
  misc_feature (17)..(314): Homolog of NCBI NO: 7489567 NR Description: protein kinase cdc2 homolog - rice
  misc_feature (17)..(316): Homolog of NCBI NO: 21537217 NR Description: putative cell division control protein cdc2
  misc_feature (9)..(316): Homolog of NCBI NO: 14488071 NR Description: At1g76540/F14G6_14 [Arabidopsis thaliana]
  misc_feature (9)..(316): Homolog of NCBI NO: 15223081 NR Description: cell division control protein, putative
  misc_feature (1)..(317): Homolog of NCBI NO: 11125685 NR Description: B2-type cyclin dependent kinase [Lycopersicon
  misc_feature (17)..(317): Homolog of NCBI NO: 21536682 NR Description: putative cell division control protein cdc2
  misc_feature (14)..(317): Homolog of NCBI NO: 5921447 NR Description: CELL DIVISION CONTROL PROTEIN 2 HOMOLOG D
  misc_feature (3)..(317): Homolog of NCBI NO: 15218072 NR Description: cell division control protein, putative
  misc_feature (12)..(317): Homolog of NCBI NO: 32187089 NR Description: cyclin-dependent kinase [Populus tremula x
  misc_feature (3)..(317): Homolog of NCBI NO: 7434327 NR Description: probable cdc2-like protein kinase cdc2MsF -
MEMEKTGAGVVVLSAKEAFEKLEKVGEGTYGKVYRAREKATGKIVALKKTRLHEDQDGVPPTTLREVSILRMLSRDPHVVRLMDVKQGQNKEGKTVLYLVFEYMDTDLKKFIRSFDQPGQNIPPETIKSLMYQLCKGIAFCHGHGILHRDLKPHNLLMDRKTMMLKIADLGLARAFTVPIKKYTHEILTLWYRAHEVLLGATHYSMAVDIWSVGCIFAELVTRRALFPGDSELQQLLHIFRLLGTPNEEVWPGVSKLKDWHEYPQWNSQSLSTAVPGLEELGLDLLSQMLEYEPSKRISAKKAMEHAYFDDLDKRNL

SEQ ID NO: 53241 - protein, 315 aa, Glycine max
  peptide (1)..(315): Ceres Seq. ID no. 15176378
  misc_feature (17)..(307): Pfam Name: Protein kinase domain Pfam Description: Protein kinase domain
  misc_feature (15)..(312): Homolog of NCBI NO: 7489567 NR Description: protein kinase cdc2 homolog - rice
  misc_feature (15)..(314): Homolog of NCBI NO: 21537217 NR Description: putative cell division control protein cdc2
  misc_feature (7)..(314): Homolog of NCBI NO: 14488071 NR Description: At1g76540/F14G6_14 [Arabidopsis thaliana]
  misc_feature (7)..(314): Homolog of NCBI NO: 15223081 NR Description: cell division control protein, putative
  misc_feature (1)..(315): Homolog of NCBI NO: 11125685 NR Description: B2-type cyclin dependent kinase [Lycopersicon
  misc_feature (15)..(315): Homolog of NCBI NO: 21536682 NR Description: putative cell division control protein cdc2
  misc_feature (12)..(315): Homolog of NCBI NO: 5921447 NR Description: CELL DIVISION CONTROL PROTEIN 2 HOMOLOG D
  misc_feature (1)..(315): Homolog of NCBI NO: 15218072 NR Description: cell division control protein, putative
  misc_feature (10)..(315): Homolog of NCBI NO: 32187089 NR Description: cyclin-dependent kinase [Populus tremula x
  misc_feature (1)..(315): Homolog of NCBI NO: 7434327 NR Description: probable cdc2-like protein kinase cdc2MsF -
MEKTGAGVVVLSAKEAFEKLEKVGEGTYGKVYRAREKATGKIVALKKTRLHEDQDGVPPTTLREVSILRMLSRDPHVVRLMDVKQGQNKEGKTVLYLVFEYMDTDLKKFIRSFDQPGQNIPPETIKSLMYQLCKGIAFCHGHGILHRDLKPHNLLMDRKTMMLKIADLGLARAFTVPIKKYTHEILTLWYRAHEVLLGATHYSMAVDIWSVGCIFAELVTRRALFPGDSELQQLLHIFRLLGTPNEEVWPGVSKLKDWHEYPQWNSQSLSTAVPGLEELGLDLLSQMLEYEPSKRISAKKAMEHAYFDDLDKRNL

SEQ ID NO: 53242 - DNA, 1745 bp, Glycine max
  misc_feature (1)..(1745): Ceres Seq. ID no. 14304573
aaaaataaaataaaaaggaaacgtatagaaaaagcttttccaagaattggcaaaaagagaagaagggagagagattcatgttcatattttccccttcgtgcccgtcaagtttctgattctctttttcaattcctttctctttcaggtgattttttctccacgataaagttgcgatttcgccggtgtcgttttgccgcaagatggtgtcgttttcgggaatataaaatcagggttgaagttctttcttcagcattgaatctttggttacataggttggtttctttagaactcgattcaatttcaaataattggtcctccctttttgtggaactcaattctattaggttagtggaaagagaaaaaaaaaacatggttgaatcaattgctgcaacttcactccttggccaccgtccaatttgtggtggaaatttaaccagggatgtatctgttaaacgcaaatctttgaatactgttcggttcccaacaactgagtttcttggtggtggaaggattgtggtttctctggctttgcctaaatctgataagcaagataggtttgtgttttcatcaattaaggccttggctgtggagttaacaagagaagcacatgcttatagggaagagaaattgcccaacagggataccaagattgatcgtggatttgatcaaaggcctgattcgtggcctcctgcgaatagggcagataaaccgtcgcttcggaatccactactccgtcatgagaggatgggatgtggttggttgggtgctatatttgagtgggagggtgttctaattgaagacaaccctgatttagagaagcaggcttggctggcactctctcaggaagaaggcaaaccctctcctcctgcttttatcctcaagagaatagagggcatgaagaatgaacaggcgatttcagaagtgctgtgttggtctagggatccggcacagttgagaagaatggctaatagaaaggaagaaatctaccaatctttgcagggtgggatatataggttcttgtctggatccaaggagtttgttagtgttttgatgcattataagataccaatggcattggtttccacgcggcctaggaaggctcttgagtctgctataggggagattgggattgaggacactttcagtgttattgtagcagcagaggatgttcataggggaaagcctgatccagaaatgtttgtgtatgctgcacagcttttgaacttcatacctgagaggtgcattgtgtttggtaactccaatctaacagtggaggctgcacatgaagcgcggatgaagtgtgtggctgttgctagcaagcatcctgtatatgagcttggggctgcagacttggttgtcaggcgcctagatgagctttcagtggttgatttgaagaatcttgcagacattgaaatgactgaatttgggtctgtggagcctgagatggagctggaggtggaaaaagattatggctcatcatcagttgatgacaatttctggtaaatcctataatgtacagttgattgaacctcatctgattgttgatgatattagttacaggttagttacttgtgtatatggtaatcagaataaatggggggaaaaaatgataagtggtatgcattgaacattgatgttactactaatgcattttctgttcatatacattcacgaatttttagatttgatttactggtgtttccatccataaaatagaatacaaattacctcatgaagtttaggtc

SEQ ID NO: 53243 - protein, 500 aa, Glycine max
  peptide (1)..(500): Ceres Seq. ID no. 14304574
  misc_feature (253)..(440): Pfam Name: haloacid dehalogenase-like hydrolase Pfam Description: haloacid dehalogenase-like hydrolase
  misc_feature (254)..(471): Homolog of NCBI NO: 37521914 NR Description: hypothetical protein glr2345 [Gloeobacter
  misc_feature (256)..(459): Homolog of NCBI NO: 23018808 NR Description: hypothetical protein [Thermobifida fusca]
  misc_feature (257)..(457): Homolog of NCBI NO: 21672855 NR Description: hydrolase, haloacid dehalogenase-like family
  misc_feature (255)..(467): Homolog of NCBI NO: 14532506 NR Description: AT3g10970/F9F8_21 [Arabidopsis thaliana]
  misc_feature (255)..(467): Homolog of NCBI NO: 21592870 NR Description: unknown [Arabidopsis thaliana]
  misc_feature (255)..(467): Homolog of NCBI NO: 18399067 NR Description: haloacid dehalogenase-like hydrolase family
  misc_feature (227)..(487): Homolog of NCBI NO: 38345597 NR Description: OSJNBb0012E24.15 [Oryza sativa (japonica
  misc_feature (227)..(486): Homolog of NCBI NO: 18542168 NR Description: putative genetic modifier [Zea mays]
  misc_feature (227)..(486): Homolog of NCBI NO: 10444400 NR Description: genetic modifier [Zea mays]
  misc_feature (124)..(499): Homolog of NCBI NO: 15234236 NR Description: haloacid dehalogenase-like hydrolase family
KNKIKRKRIEKAFPRIGKKRRRERDSCSYFPLRARQVSDSLFQFLSLSGDFFSTIKLRFRRCRFAARWCRFREYKIRVEVLSSALNLWLHRLVSLELDSISNNWSSLFVELNSIRLVEREKKNMVESIAATSLLGHRPICGGNLTRDVSVKRKSLNTVRFPTTEFLGGGRIVVSLALPKSDKQDRFVFSSIKALAVELTREAHAYREEKLPNRDTKIDRGFDQRPDSWPPANRADKPSLRNPLLRHERMGCGWLGAIFEWEGVLIEDNPDLEKQAWLALSQEEGKPSPPAFILKRIEGMKNEQAISEVLCWSRDPAQLRRMANRKEEIYQSLQGGIYRFLSGSKEFVSVLMHYKIPMALVSTRPRKALESAIGEIGIEDTFSVIVAAEDVHRGKPDPEMFVYAAQLLNFIPERCIVFGNSNLTVEAAHEARMKCVAVASKHPVYELGAADLVVRRLDELSVVDLKNLADIEMTEFGSVEPEMELEVEKDYGSSSVDDNFW

SEQ ID NO: 53244 - protein, 377 aa, Glycine max
  peptide (1)..(377): Ceres Seq. ID no. 14304575
  misc_feature (130)..(317): Pfam Name: haloacid dehalogenase-like hydrolase Pfam Description: haloacid dehalogenase-like hydrolase
  misc_feature (131)..(348): Homolog of NCBI NO: 37521914 NR Description: hypothetical protein glr2345 [Gloeobacter
  misc_feature (133)..(336): Homolog of NCBI NO: 23018808 NR Description: hypothetical protein [Thermobifida fusca]
  misc_feature (134)..(334): Homolog of NCBI NO: 21672855 NR Description: hydrolase, haloacid dehalogenase-like family
  misc_feature (132)..(344): Homolog of NCBI NO: 14532506 NR Description: AT3g10970/F9F8_21 [Arabidopsis thaliana]
  misc_feature (132)..(344): Homolog of NCBI NO: 21592870 NR Description: unknown [Arabidopsis thaliana]
  misc_feature (132)..(344): Homolog of NCBI NO: 18399067 NR Description: haloacid dehalogenase-like hydrolase family
  misc_feature (104)..(364): Homolog of NCBI NO: 38345597 NR Description: OSJNBb0012E24.15 [Oryza sativa (japonica
  misc_feature (104)..(363): Homolog of NCBI NO: 18542168 NR Description: putative genetic modifier [Zea mays]
  misc_feature (104)..(363): Homolog of NCBI NO: 10444400 NR Description: genetic modifier [Zea mays]
  misc_feature (1)..(376): Homolog of NCBI NO: 15234236 NR Description: haloacid dehalogenase-like hydrolase family
MVESIAATSLLGHRPICGGNLTRDVSVKRKSLNTVRFPTTEFLGGGRIVVSLALPKSDKQDRFVFSSIKALAVELTREAHAYREEKLPNRDTKIDRGFDQRPDSWPPANRADKPSLRNPLLRHERMGCGWLGAIFEWEGVLIEDNPDLEKQAWLALSQEEGKPSPPAFILKRIEGMKNEQAISEVLCWSRDPAQLRRMANRKEEIYQSLQGGIYRFLSGSKEFVSVLMHYKIPMALVSTRPRKALESAIGEIGIEDTFSVIVAAEDVHRGKPDPEMFVYAAQLLNFIPERCIVFGNSNLTVEAAHEARMKCVAVASKHPVYELGAADLVVRRLDELSVVDLKNLADIEMTEFGSVEPEMELEVEKDYGSSSVDDNFW

SEQ ID NO: 53245 - protein, 252 aa, Glycine max
  peptide (1)..(252): Ceres Seq. ID no. 14304576
  misc_feature (5)..(192): Pfam Name: haloacid dehalogenase-like hydrolase Pfam Description: haloacid dehalogenase-like hydrolase
  misc_feature (6)..(223): Homolog of NCBI NO: 37521914 NR Description: hypothetical protein glr2345 [Gloeobacter
  misc_feature (8)..(211): Homolog of NCBI NO: 23018808 NR Description: hypothetical protein [Thermobifida fusca]
  misc_feature (9)..(209): Homolog of NCBI NO: 21672855 NR Description: hydrolase, haloacid dehalogenase-like family
  misc_feature (7)..(219): Homolog of NCBI NO: 14532506 NR Description: AT3g10970/F9F8_21 [Arabidopsis thaliana]
  misc_feature (7)..(219): Homolog of NCBI NO: 21592870 NR Description: unknown [Arabidopsis thaliana]
  misc_feature (7)..(219): Homolog of NCBI NO: 18399067 NR Description: haloacid dehalogenase-like hydrolase family
  misc_feature (1)..(239): Homolog of NCBI NO: 38345597 NR Description: OSJNBb0012E24.15 [Oryza sativa (japonica
  misc_feature (1)..(238): Homolog of NCBI NO: 18542168 NR Description: putative genetic modifier [Zea mays]
  misc_feature (1)..(238): Homolog of NCBI NO: 10444400 NR Description: genetic modifier [Zea mays]
  misc_feature (1)..(251): Homolog of NCBI NO: 15234236 NR Description: haloacid dehalogenase-like hydrolase family
MGCGWLGAIFEWEGVLIEDNPDLEKQAWLALSQEEGKPSPPAFILKRIEGMKNEQAISEVLCWSRDPAQLRRMANRKEEIYQSLQGGIYRFLSGSKEFVSVLMHYKIPMALVSTRPRKALESAIGEIGIEDTFSVIVAAEDVHRGKPDPEMFVYAAQLLNFIPERCIVFGNSNLTVEAAHEARMKCVAVASKHPVYELGAADLVVRRLDELSVVDLKNLADIEMTEFGSVEPEMELEVEKDYGSSSVDDNFW

SEQ ID NO: 53246 - DNA, 1393 bp, Glycine max
  misc_feature (1)..(1393): Ceres Seq. ID no. 14311088
acattactcaactcatcctttctggttctggttcaacacagcacaccatttctaatgctgtaaaatttgtaccatgcagcaaggggctctgcttctgcttttgtgcttggtctctctgttccccctcactcactatgcctgactttcttgccacaaacccacttaccttttcagctgcagaatctccaagattccccttcctcaattcacgcccaactcttacaccaagaacccaactcaacccaaattcccgtgtcctcttttctcccaaaccatccaaaaccagttgcaataacaagagtgtctctttggcactgagctccaggtcgaatgaagggccatcaaggggttatggcttttacaacgagcttgagtttgaggacagaaatgaggaaactttggggttggagataaaccctgttgttgctgaggattcccagagtgaaactgagtctctcccatttgatggggtggaaggtgatgataattataagggagaggatgatttggttcgggttcagggggatgcagatggagatggggatggtttgaagaaagattatgatgatgacgatgatcaaggtgagaatgagaaatttggaggtaaacttagagtcagaagaggtaaacaggtaattagaaggtcgaatttgttggccaagcaagtgatcagtattcgctctgcgcttagcttggggttcgtttcacagctttgggtggacacttcctcttggatggtgttgtttgtggaggttagaccaaacttgctctctggggattcagagaaattccttctggaggacattagtcagattggagatgttgtccttgtccaggatgaaagtgtgatagacaatgaatttaaaatggttggattggagacactggttggatacaaagttgtaacaccctctcgaaggaatattggaaaggtgcgagggtacactttcagtatcaattcaggtgctgttgaagaacttgaacttgattcatttggactatccattattccatcaagtttggtgagtacctacgctttgctggttgaggacgtgctggaagtagtatttgacgcagttgttgtgcatgaagctgcagctttacgaattcaaaggctttctaaggggtttttgggcaaccagaatgtgagaatttcagtggatgattttgaagatttagactctgaacaatctgatacatacggtcctatttcaatgagaagaaaaagtaccggaggaaagaaacctaatcaaagagattgggatgatgaagataattgggagcttccgatggactatccttgattctaatggattttctactaaatttcatgtaaaacacatttttgtttattaaaaataatgaaaatttgaataaacctattaaatacacc

SEQ ID NO: 53247 - protein, 433 aa, Glycine max
  peptide (1)..(433): Ceres Seq. ID no. 14311089
  misc_feature (210)..(283): Pfam Name: PRC-barrel domain Pfam Description: PRC-barrel domain
  misc_feature (214)..(396): Homolog of NCBI NO: 33863852 NR Description: conserved hypothetical protein
  misc_feature (214)..(423): Homolog of NCBI NO: 33860618 NR Description: conserved hypothetical protein
  misc_feature (214)..(396): Homolog of NCBI NO: 33864876 NR Description: conserved hypothetical protein [Synechococcus sp.
  misc_feature (214)..(377): Homolog of NCBI NO: 33239524 NR Description: Protein implicated in RNA metabolism (PRC-barrel
  misc_feature (214)..(412): Homolog of NCBI NO: 16330095 NR Description: unknown protein [Synechocystis sp. PCC 6803]
  misc_feature (207)..(429): Homolog of NCBI NO: 23041561 NR Description: hypothetical protein [Trichodesmium erythraeum
  misc_feature (209)..(416): Homolog of NCBI NO: 17228624 NR Description: hypothetical protein [Nostoc sp. PCC 7120]
  misc_feature (200)..(416): Homolog of NCBI NO: 23127762 NR Description: hypothetical protein [Nostoc punctiforme]
  misc_feature (207)..(358): Homolog of NCBI NO: 15224902 NR Description: hypothetical protein [Arabidopsis thaliana]
  misc_feature (210)..(427): Homolog of NCBI NO: 22298396 NR Description: ORF_ID:tll0853~hypothetical protein
ITQLILSGSGSTQHTISNAVKFVPCSKGLCFCFCAWSLCSPSLTMPDFLATNPLTFSAAESPRFPFLNSRPTLTPRTQLNPNSRVLFSPKPSKTSCNNKSVSLALSSRSNEGPSRGYGFYNELEFEDRNEETLGLEINPVVAEDSQSETESLPFDGVEGDDNYKGEDDLVRVQGDADGDGDGLKKDYDDDDDQGENEKFGGKLRVRRGKQVIRRSNLLAKQVISIRSALSLGFVSQLWVDTSSWMVLFVEVRPNLLSGDSEKFLLEDISQIGDVVLVQDESVIDNEFKMVGLETLVGYKVVTPSRRNIGKVRGYTFSINSGAVEELELDSFGLSIIPSSLVSTYALLVEDVLEVVFDAVVVHEAAALRIQRLSKGFLGNQNVRISVDDFEDLDSEQSDTYGPISMRRKSTGGKKPNQRDWDDEDNWELPMDYP

SEQ ID NO: 53248 - protein, 389 aa, Glycine max
  peptide (1)..(389): Ceres Seq. ID no. 14311090
  misc_feature (166)..(239): Pfam Name: PRC-barrel domain Pfam Description: PRC-barrel domain
  misc_feature (170)..(352): Homolog of NCBI NO: 33863852 NR Description: conserved hypothetical protein
  misc_feature (170)..(379): Homolog of NCBI NO: 33860618 NR Description: conserved hypothetical protein
  misc_feature (170)..(352): Homolog of NCBI NO: 33864876 NR Description: conserved hypothetical protein [Synechococcus sp.
  misc_feature (170)..(333): Homolog of NCBI NO: 33239524 NR Description: Protein implicated in RNA metabolism (PRC-barrel
  misc_feature (170)..(368): Homolog of NCBI NO: 16330095 NR Description: unknown protein [Synechocystis sp. PCC 6803]
  misc_feature (163)..(385): Homolog of NCBI NO: 23041561 NR Description: hypothetical protein [Trichodesmium erythraeum
  misc_feature (165)..(372): Homolog of NCBI NO: 17228624 NR Description: hypothetical protein [Nostoc sp. PCC 7120]
  misc_feature (156)..(372): Homolog of NCBI NO: 23127762 NR Description: hypothetical protein [Nostoc punctiforme]
  misc_feature (163)..(314): Homolog of NCBI NO: 15224902 NR Description: hypothetical protein [Arabidopsis thaliana]
  misc_feature (166)..(383): Homolog of NCBI NO: 22298396 NR Description: ORF_ID:tll0853~hypothetical protein
MPDFLATNPLTFSAAESPRFPFLNSRPTLTPRTQLNPNSRVLFSPKPSKTSCNNKSVSLALSSRSNEGPSRGYGFYNELEFEDRNEETLGLEINPVVAEDSQSETESLPFDGVEGDDNYKGEDDLVRVQGDADGDGDGLKKDYDDDDDQGENEKFGGKLRVRRGKQVIRRSNLLAKQVISIRSALSLGFVSQLWVDTSSWMVLFVEVRPNLLSGDSEKFLLEDISQIGDVVLVQDESVIDNEFKMVGLETLVGYKVVTPSRRNIGKVRGYTFSINSGAVEELELDSFGLSIIPSSLVSTYALLVEDVLEVVFDAVVVHEAAALRIQRLSKGFLGNQNVRISVDDFEDLDSEQSDTYGPISMRRKSTGGKKPNQRDWDDEDNWELPMDYP

SEQ ID NO: 53249 - DNA, 1818 bp, Glycine max
  misc_feature (1)..(1818): Ceres Seq. ID no. 15176444
aacaacaatggcaagaaaaactttagcttggtccttgcttctagggatggcttgttccatagttattggttcatatgaggagagctttcctactaggacattttctagtaacaactatcatgaagcaatacaaagattgcagtcatttaaggcctctctaacaagacatgattccattgcttcagcctcatcttccttatcaaccttctcaagcccttcttctgctccttctccttctctctcacttcagggcgtgaacaatccacgcgtgtaccgtgtgacgtcttatggtgcagatccaacgggtaattcggatagcactgaagcactccttgcagccatagaagatgcagccaagggtcctagtgaaggatatttgatggaaggcatcagagaccttggaggtgctcagattaatcttgagggtggaaattacttgatcagccggtcactcaagttgccggtggccggggtggggaaccttatgatacatggagggactataagagcctcagataattttccagaagacggctatatcattgatttgtcaccctcttctaatggaagaaacagtttaccatcctacaattttgagttcataactctcaaggaactcttgctggactcaaacttcaggggtggaggcatttcagtcataaactcacttaggactaacatagacaattgttacatcacacatttcaccaccaatggaattttagtccaaagtggtcatgaaacatacatcaggaactctttcctcggccagcatataactgctggcggcgacaaaaatgagaggaacttctcaggcactggaataaccctccagggtaatgacaatgctgtcactgatgttgtaattttctctgctgctataggaataatggttactggtcaagctaatgccttttctggtgtacattgttacaataaggccactggctttggaggcactggaatttatttgaaactaccaggtttgacccaaaccaggattgtgaattcttacatggattacactagtattgtggcggaagacccggttcaactccatatctccagcagtttcttccttggtgatgccaatattgtcctaaagtccaagaatggaattgtgaatggtgttgatattgttgataacatgttctcaggttcaaatcagggtgttgaaattgttcagcttgaccaatcaaatagtcctttccaacaaattgatcaagttattgttgatagaaacattgcaagggggatgaagttaaaggccacagttgccaaaatgtctatgcaagggaatggaacctcttggagtgttgattttaacaatgttttgctttttcctaacctcataaagaatgttcagtactctttaagctcctcaggcagcaccttccccaatcatgctctgaggaacgtgtccgagaatcgtgttgtgattgaaacaaatgaagcagtggctgccaatgtttttgttacggtggatcaaagtgcgttaagttgaagaaggtctgaaggtggtgaccaaaaagtttggtcaagagtcttgactcgaaggaattgtgcataccgagttgtgaactctttctttggatcaacttaaagtaaccatagtaccatatactaaacactgctatagatttagaagatgtagattgactgaaccacacattatacagtaactgaatgaaaagtattgtattgataaaagatatactctttctatagtttgtttttgtaaaacaggtcctaggttgaatcaaaaccagcatcttgttctcattatacagaataaaaaaaatgagagaattttattat

SEQ ID NO: 53250 - protein, 500 aa, Glycine max
  peptide (1)..(500): Ceres Seq. ID no. 15176445
  misc_feature (61)..(496): Homolog of NCBI NO: 18415427 NR Description: expressed protein [Arabidopsis thaliana]
  misc_feature (61)..(496): Homolog of NCBI NO: 7485728 NR Description: hypothetical protein F18F4.140 - Arabidopsis
  misc_feature (86)..(498): Homolog of NCBI NO: 38347355 NR Description: OSJNBa0070C17.16 [Oryza sativa (japonica
  misc_feature (29)..(496): Homolog of NCBI NO: 15235269 NR Description: expressed protein [Arabidopsis thaliana]
TTMARKTLAWSLLLGMACSIVIGSYEESFPTRTFSSNNYHEAIQRLQSFKASLTRHDSIASASSSLSTFSSPSSAPSPSLSLQGVNNPRVYRVTSYGADPTGNSDSTEALLAAIEDAAKGPSEGYLMEGIRDLGGAQINLEGGNYLISRSLKLPVAGVGNLMIHGGTIRASDNFPEDGYIIDLSPSSNGRNSLPSYNFEFITLKELLLDSNFRGGGISVINSLRTNIDNCYITHFTTNGILVQSGHETYIRNSFLGQHITAGGDKNERNFSGTGITLQGNDNAVTDVVIFSAAIGIMVTGQANAFSGVHCYNKATGFGGTGIYLKLPGLTQTRIVNSYMDYTSIVAEDPVQLHISSSFFLGDANIVLKSKNGIVNGVDIVDNMFSGSNQGVEIVQLDQSNSPFQQIDQVIVDRNIARGMKLKATVAKMSMQGNGTSWSVDFNNVLLFPNLIKNVQYSLSSSGSTFPNHALRNVSENRVVIETNEAVAANVFVTVDQSALS

SEQ ID NO: 53251 - protein, 498 aa, Glycine max
  peptide (1)..(498): Ceres Seq. ID no. 15176446
  misc_feature (59)..(494): Homolog of NCBI NO: 18415427 NR Description: expressed protein [Arabidopsis thaliana]
  misc_feature (59)..(494): Homolog of NCBI NO: 7485728 NR Description: hypothetical protein F18F4.140 - Arabidopsis
  misc_feature (84)..(496): Homolog of NCBI NO: 38347355 NR Description: OSJNBa0070C17.16 [Oryza sativa (japonica
  misc_feature (27)..(494): Homolog of NCBI NO: 15235269 NR Description: expressed protein [Arabidopsis thaliana]
MARKTLAWSLLLGMACSIVIGSYEESFPTRTFSSNNYHEAIQRLQSFKASLTRHDSIASASSSLSTFSSPSSAPSPSLSLQGVNNPRVYRVTSYGADPTGNSDSTEALLAAIEDAAKGPSEGYLMEGIRDLGGAQINLEGGNYLISRSLKLPVAGVGNLMIHGGTIRASDNFPEDGYIIDLSPSSNGRNSLPSYNFEFITLKELLLDSNFRGGGISVINSLRTNIDNCYITHFTTNGILVQSGHETYIRNSFLGQHITAGGDKNERNFSGTGITLQGNDNAVTDVVIFSAAIGIMVTGQANAFSGVHCYNKATGFGGTGIYLKLPGLTQTRIVNSYMDYTSIVAEDPVQLHISSSFFLGDANIVLKSKNGIVNGVDIVDNMFSGSNQGVEIVQLDQSNSPFQQIDQVIVDRNIARGMKLKATVAKMSMQGNGTSWSVDFNNVLLFPNLIKNVQYSLSSSGSTFPNHALRNVSENRVVIETNEAVAANVFVTVDQSALS

SEQ ID NO: 53252 - protein, 485 aa, Glycine max
  peptide (1)..(485): Ceres Seq. ID no. 15176447
  misc_feature (46)..(481): Homolog of NCBI NO: 18415427 NR Description: expressed protein [Arabidopsis thaliana]
  misc_feature (46)..(481): Homolog of NCBI NO: 7485728 NR Description: hypothetical protein F18F4.140 - Arabidopsis
  misc_feature (71)..(483): Homolog of NCBI NO: 38347355 NR Description: OSJNBa0070C17.16 [Oryza sativa (japonica
  misc_feature (14)..(481): Homolog of NCBI NO: 15235269 NR Description: expressed protein [Arabidopsis thaliana]
MACSIVIGSYEESFPTRTFSSNNYHEAIQRLQSFKASLTRHDSIASASSSLSTFSSPSSAPSPSLSLQGVNNPRVYRVTSYGADPTGNSDSTEALLAAIEDAAKGPSEGYLMEGIRDLGGAQINLEGGNYLISRSLKLPVAGVGNLMIHGGTIRASDNFPEDGYIIDLSPSSNGRNSLPSYNFEFITLKELLLDSNFRGGGISVINSLRTNIDNCYITHFTTNGILVQSGHETYIRNSFLGQHITAGGDKNERNFSGTGITLQGNDNAVTDVVIFSAAIGIMVTGQANAFSGVHCYNKATGFGGTGIYLKLPGLTQTRIVNSYMDYTSIVAEDPVQLHISSSFFLGDANIVLKSKNGIVNGVDIVDNMFSGSNQGVEIVQLDQSNSPFQQIDQVIVDRNIARGMKLKATVAKMSMQGNGTSWSVDFNNVLLFPNLIKNVQYSLSSSGSTFPNHALRNVSENRVVIETNEAVAANVFVTVDQSALS

SEQ ID NO: 53253 - DNA, 1718 bp, Glycine max
  misc_feature (1)..(1718): Ceres Seq. ID no. 14311074
actactactacattagtgaagaccatttttcaattagtctcctctctctctctctctctctcacacacacactttggccttaacagaaccgaacacaacacgagagagatagagatacaacagaagaacaaactccgacatctctcgctttctctactttgccctgtttttattcggaagcaagcaaggcttaaatatatagatccctctttcccgtgtttttccttggatgaatctcaatctgaatggtataaggaataaaaaattcatcgtcataatcaggtatggaagttgggagcgtggtgttagtatggtggtggattagtctgatcccgaggattttatcagatccaagcgacgaagcatgcctgacgaacctaagcaagtccttggaagacccaaacaaactgctccataactggaaggaagagaacttcgccaagccctgcaacgactcctcctcgaatctccgaggcgcaatctgcaacaacggacgcatctacaagctctccctcaacaacctctctctccgcggcaccatatcccctttcctctcaaactgtaccaatctccaaaccctagacctctcctccaacttcctcacaggcccaatccccccagaactacagtccctggtcaacctcgccgttctgaacctctcttcgaacagtctccaaggggtgatccccccggtgctcacaatgtgcgcctacctcaacatcatcgacctccacgataatttgcttactgggcccatccctcagcaattgggcctgctcgttcgcctctccgctttcgatgtgtccaataaccgcctctcagggcccatcccggcttcgctttccaaccggagcgggaacttgcccagattcaacgccagctcattcctagagaataaggatctctacggttacccgttgccgccgcttaggaatagagggttgtccgttttggccattgttgggatcggcttgggaagtggccttgctagcttggtgcttagcttcaccggggtttgtatttggttgaaatttaccgagcgcaagatggcgctcgaggaaggcaaaatcagccaccttatgcctgattattgaatattgaaacaacaccttttaatcaccaattactacaatagtttcaaattattccaattccaagctagtactagtatctttcattattcaacttgattgatcggatcgctgatgcttcttcacctcagaaaaaaaaaaaaaatagtacccgtaccaggagggtagggtaggttagtgggtgcggtgctgctactgctacatgaagtcttgaagatgcgctgcgccgttgaactgctaaaatatatactacaaactcatcaaacagctggtgccatctttctaatctgcacaagagtcacattatcggaaggagccgctgggggacaccaacggtactacacagccacatggattgggacttgttgttgttctactcttgttcacttgttagtccaacgtcaactagtcaaccctctttatttactatatgtaaccctccctacttagcttaggattaggatcactatttttagatcatgcaaaacttactaacttagtatattagattattttattttaatttgaatctgaataaaatattcagatgatgaattttgtcattgtttctactctaatgagattatatttaacaatgggtaattaaatgatagtattattatactt

SEQ ID NO: 53254 - protein, 269 aa, Glycine max
  peptide (1)..(269): Ceres Seq. ID no. 14311075
  misc_feature (6)..(255): Homolog of NCBI NO: 8777368 NR Description: receptor-like protein kinase [Arabidopsis
  misc_feature (1)..(255): Homolog of NCBI NO: 18422906 NR Description: leucine rich repeat protein family [Arabidopsis
  misc_feature (1)..(255): Homolog of NCBI NO: 17064966 NR Description: receptor-like protein kinase [Arabidopsis
  misc_feature (12)..(269): Homolog of NCBI NO: 15223445 NR Description: leucine-rich repeat transmembrane protein kinase,
  misc_feature (1)..(218): Homolog of NCBI NO: 34907548 NR Description: B1078G07.14 [Oryza sativa (japonica
  misc_feature (21)..(265): Homolog of NCBI NO: 15233004 NR Description: leucine-rich repeat transmembrane protein kinase,
  misc_feature (21)..(269): Homolog of NCBI NO: 15229606 NR Description: leucine rich repeat protein family [Arabidopsis
  misc_feature (19)..(269): Homolog of NCBI NO: 15239162 NR Description: leucine rich repeat protein family [Arabidopsis
  misc_feature (15)..(269): Homolog of NCBI NO: 7486525 NR Description: hypothetical protein F6H11.60 - Arabidopsis
  misc_feature (19)..(269): Homolog of NCBI NO: 21553823 NR Description: unknown [Arabidopsis thaliana]
MEVGSVVLVWWWISLIPRILSDPSDEACLTNLSKSLEDPNKLLHNWKEENFAKPCNDSSSNLRGAICNNGRIYKLSLNNLSLRGTISPFLSNCTNLQTLDLSSNFLTGPIPPELQSLVNLAVLNLSSNSLQGVIPPVLTMCAYLNIIDLHDNLLTGPIPQQLGLLVRLSAFDVSNNRLSGPIPASLSNRSGNLPRFNASSFLENKDLYGYPLPPLRNRGLSVLAIVGIGLGSGLASLVLSFTGVCIWLKFTERKMALEEGKISHLMPDY

SEQ ID NO: 53255 - DNA, 1164 bp, Glycine max
  misc_feature (1)..(1164): Ceres Seq. ID no. 13637509
atcatgcgttctcagcttgtgaaatcgaatatcaaaacccctccaaggccaaaacggcgtcgtcaaccactcaaatcatggcctgttactttctccccctttgctcgcgctctcgctctctctcgcatcacctctctctctccaccaaaccctaccccaaccctctctgctaagaaaccgcaaccctctcatggatctgtccatgcagatttatcccaaccggaacactccgagtcttccgacgaggacttcgatggagttgtccaagcagatttttcatttttcgatcccaaacctaatgattttcacggagccaagaccttgctgcaaacctacctcgacgaccaggaatgggatttgagtgcctttgtagacttgattttggcacagaccaccgtaggctctgttgttaagatagaggacgacgaggatgaagggctcttcgctcttgttactgctcttaatttatatagatacagggagcataagtgtattgcgacagttaaggattttctcctccataaagtgcgccaagagaagagtgtccatgaccagttgaaattgctgttgggggagcaagcgcatgatgttggtctcctggtatcgcagcgcatggtgaaccttcctccccagcttctgccacctctttatgatgccctttttgatgaagtgtcctgggccacggaagatgagccgacggaggagctccagaattccttcaagtttaagcattatataatacttaccaaaatttacgtgctcaagaatgtagaacagaaaagaaaacagagcaatggtagtgatgaggcaataatatacataaagcttgaggatgaaatttttcacaagttaagctcgtggtccttctgttttccattgcaaactcagcagcttgcacctcatgagctgaggaattacaggtcaacgggattaatcgtggctgttgaagctgacaaaattccaacatttcgtcaagaattagcttctctaataaatgaaacctgaaggcatcgacaaggctactggataatttattatatgatagaatcttaatactttcatgagacatgcatttttacgcagattgaattctttttgcaagggtttgagctgccaaattttgaaattttgttttttaattttctatgatcccttttgttctgc

SEQ ID NO: 53256 - protein, 334 aa, Glycine max
  peptide (1)..(334): Ceres Seq. ID no. 13637510
  misc_feature (48)..(296): Homolog of NCBI NO: 14602523 NR Description: cdk inhibitor p21 binding protein [Homo sapiens]
  misc_feature (71)..(330): Homolog of NCBI NO: 32415908 NR Description: hypothetical protein [Neurospora crassa]
  misc_feature (58)..(332): Homolog of NCBI NO: 40739074 NR Description: hypothetical protein AN6865.2 [Aspergillus
  misc_feature (55)..(311): Homolog of NCBI NO: 19075196 NR Description: hypothetical protein [Schizosaccharomyces pombe]
  misc_feature (14)..(256): Homolog of NCBI NO: 15237534 NR Description: hypothetical protein [Arabidopsis thaliana]
  misc_feature (114)..(252): Homolog of NCBI NO: 20258819 NR Description: unknown protein [Arabidopsis thaliana]
  misc_feature (41)..(256): Homolog of NCBI NO: 29126339 NR Description: putative p21 C-terminal-binding protein,
  misc_feature (41)..(333): Homolog of NCBI NO: 29126338 NR Description: putative p21 C-terminal-binding protein
  misc_feature (14)..(332): Homolog of NCBI NO: 7486435 NR Description: hypothetical protein At2g44510 [imported] -
  misc_feature (14)..(332): Homolog of NCBI NO: 18406554 NR Description: expressed protein [Arabidopsis thaliana]
IMRSQLVKSNIKTPPRPKRRRQPLKSWPVTFSPFARALALSRITSLSPPNPTPTLSAKKPQPSHGSVHADLSQPEHSESSDEDFDGVVQADFSFFDPKPNDFHGAKTLLQTYLDDQEWDLSAFVDLILAQTTVGSVVKIEDDEDEGLFALVTALNLYRYREHKCIATVKDFLLHKVRQEKSVHDQLKLLLGEQAHDVGLLVSQRMVNLPPQLLPPLYDALFDEVSWATEDEPTEELQNSFKFKHYIILTKIYVLKNVEQKRKQSNGSDEAIIYIKLEDEIFHKLSSWSFCFPLQTQQLAPHELRNYRSTGLIVAVEADKIPTFRQELASLINET

SEQ ID NO: 53257 - protein, 333 aa, Glycine max
  peptide (1)..(333): Ceres Seq. ID no. 13637511
  misc_feature (47)..(295): Homolog of NCBI NO: 14602523 NR Description: cdk inhibitor p21 binding protein [Homo sapiens]
  misc_feature (70)..(329): Homolog of NCBI NO: 32415908 NR Description: hypothetical protein [Neurospora crassa]
  misc_feature (57)..(331): Homolog of NCBI NO: 40739074 NR Description: hypothetical protein AN6865.2 [Aspergillus
  misc_feature (54)..(310): Homolog of NCBI NO: 19075196 NR Description: hypothetical protein [Schizosaccharomyces pombe]
  misc_feature (13)..(255): Homolog of NCBI NO: 15237534 NR Description: hypothetical protein [Arabidopsis thaliana]
  misc_feature (113)..(251): Homolog of NCBI NO: 20258819 NR Description: unknown protein [Arabidopsis thaliana]
  misc_feature (40)..(255): Homolog of NCBI NO: 29126339 NR Description: putative p21 C-terminal-binding protein,
  misc_feature (40)..(332): Homolog of NCBI NO: 29126338 NR Description: putative p21 C-terminal-binding protein
  misc_feature (13)..(331): Homolog of NCBI NO: 7486435 NR Description: hypothetical protein At2g44510 [imported] -
  misc_feature (13)..(331): Homolog of NCBI NO: 18406554 NR Description: expressed protein [Arabidopsis thaliana]
MRSQLVKSNIKTPPRPKRRRQPLKSWPVTFSPFARALALSRITSLSPPNPTPTLSAKKPQPSHGSVHADLSQPEHSESSDEDFDGVVQADFSFFDPKPNDFHGAKTLLQTYLDDQEWDLSAFVDLILAQTTVGSVVKIEDDEDEGLFALVTALNLYRYREHKCIATVKDFLLHKVRQEKSVHDQLKLLLGEQAHDVGLLVSQRMVNLPPQLLPPLYDALFDEVSWATEDEPTEELQNSFKFKHYIILTKIYVLKNVEQKRKQSNGSDEAIIYIKLEDEIFHKLSSWSFCFPLQTQQLAPHELRNYRSTGLIVAVEADKIPTFRQELASLINET

SEQ ID NO: 53258 - DNA, 1367 bp, Glycine max
  misc_feature (1)..(1367): Ceres Seq. ID no. 15174776
agttagttgtttaatgaacgcaattcggtcccgttggttgacgagaatggcagaagacattgggaaaagcaacctcgaatcctcttctgcttcaacaacttcccgaggcttctggccttctgtcttacgttggatcccctcttccaccgatcacatcatcaatgctgaaaaacgccttctctctcttgtcaagactccgtatgctcaagaacaggtcaatataggttccggtccacctgattccaaagttagatggttccgttcatctagcaatgaaccacggtttattaacacggttacatttgacagtaaggatgattctcctacgctggtgatggttcatggatatgcagcatcgcagggtttcttctttcgcaattttgatgcccttgcctcccgtttcagagtgattgctattgatcaacttggttggggtggatctagcaggcctgactttacatgcagaagcactgaagaaactgaggcatggttcattgattcttttgaggaatggagaaaggccaaaaacctgagcaattttatactacttggacattcttttggtggttatgttgcttccaagtacgcacttaagcaccctgagcatgtcaatcacttgattctggtgggacctgctggattttcatcagaatcagaaagaattacaaagttcttatcaacatggaaaggatcaatcctgaaccaaatatgggaatctaattttacacctcagaaaatcatcagaggtttaggtccttggggtcctgatatggtcctcaagtataccagtgccaggtttgttacatatacaactggggaaacgctgacagaatctgaatcgagattactgacagattatgtttaccatactttagcagccaaagctagtggcgagctgtgcttaaaatatatattttcatttggaggactcccgaggtcacctcttcttcacagtgcttcagagtggaaggtgcctaccaccttcatatatggttttcaggactggatgaattatgaaggagcccaagaagcacgcaaacaaatgaaggttccatgtgaaatccttagggttccccaggccgggcactttgtgttcattgacaacccaagtggcttccattcagcagtgttttatgcttgtagaaggtttcttaggcctgatccagacagtgaatcccttcctgaagggctaacctctgcatagagtataatcttgtgtaatgctgtctatgattatatatttcttttacaaattaaactcctttatttattcaagccatgtcctattcatgcttaaatggaatttgcaattgtaacttgtaatggcaattcaaaaaataatgacgtctaatataaatttcattact

SEQ ID NO: 53259 - protein, 400 aa, Glycine max
  peptide (1)..(400): Ceres Seq. ID no. 15174777
  misc_feature (134)..(379): Pfam Name: alpha/beta hydrolase fold Pfam Description: alpha/beta hydrolase fold
  misc_feature (44)..(389): Homolog of NCBI NO: 31204749 NR Description: ENSANGP00000017492 [Anopheles gambiae]
  misc_feature (98)..(380): Homolog of NCBI NO: 26326239 NR Description: unnamed protein product [Mus musculus]
  misc_feature (56)..(380): Homolog of NCBI NO: 24586387 NR Description: CG1882-PB [Drosophila melanogaster]
  misc_feature (34)..(380): Homolog of NCBI NO: 11545767 NR Description: abhydrolase domain containing 4 [Homo sapiens]
  misc_feature (34)..(380): Homolog of NCBI NO: 19353227 NR Description: hypothetical protein FLJ12816 [Homo sapiens]
  misc_feature (44)..(380): Homolog of NCBI NO: 34875013 NR Description: similar to RIKEN cDNA 1110035H23 [Rattus
  misc_feature (44)..(380): Homolog of NCBI NO: 19527302 NR Description: RIKEN cDNA 1110035H23 [Mus musculus]
  misc_feature (22)..(380): Homolog of NCBI NO: 24586385 NR Description: CG1882-PA [Drosophila melanogaster]
  misc_feature (16)..(397): Homolog of NCBI NO: 30686425 NR Description: hydrolase, alpha/beta fold family [Arabidopsis
  misc_feature (16)..(397): Homolog of NCBI NO: 7446839 NR Description: hypothetical protein T19F6.150 - Arabidopsis
VSCLMNAIRSRWLTRMAEDIGKSNLESSSASTTSRGFWPSVLRWIPSSTDHIINAEKRLLSLVKTPYAQEQVNIGSGPPDSKVRWFRSSSNEPRFINTVTFDSKDDSPTLVMVHGYAASQGFFFRNFDALASRFRVIAIDQLGWGGSSRPDFTCRSTEETEAWFIDSFEEWRKAKNLSNFILLGHSFGGYVASKYALKHPEHVNHLILVGPAGFSSESERITKFLSTWKGSILNQIWESNFTPQKIIRGLGPWGPDMVLKYTSARFVTYTTGETLTESESRLLTDYVYHTLAAKASGELCLKYIFSFGGLPRSPLLHSASEWKVPTTFIYGFQDWMNYEGAQEARKQMKVPCEILRVPQAGHFVFIDNPSGFHSAVFYACRRFLRPDPDSESLPEGLTSA

SEQ ID NO: 53260 - protein, 396 aa, Glycine max
  peptide (1)..(396): Ceres Seq. ID no. 15174778
  misc_feature (130)..(375): Pfam Name: alpha/beta hydrolase fold Pfam Description: alpha/beta hydrolase fold
  misc_feature (40)..(385): Homolog of NCBI NO: 31204749 NR Description: ENSANGP00000017492 [Anopheles gambiae]
  misc_feature (94)..(376): Homolog of NCBI NO: 26326239 NR Description: unnamed protein product [Mus musculus]
  misc_feature (52)..(376): Homolog of NCBI NO: 24586387 NR Description: CG1882-PB [Drosophila melanogaster]
  misc_feature (30)..(376): Homolog of NCBI NO: 11545767 NR Description: abhydrolase domain containing 4 [Homo sapiens]
  misc_feature (30)..(376): Homolog of NCBI NO: 19353227 NR Description: hypothetical protein FLJ12816 [Homo sapiens]
  misc_feature (40)..(376): Homolog of NCBI NO: 34875013 NR Description: similar to RIKEN cDNA 1110035H23 [Rattus
  misc_feature (40)..(376): Homolog of NCBI NO: 19527302 NR Description: RIKEN cDNA 1110035H23 [Mus musculus]
  misc_feature (18)..(376): Homolog of NCBI NO: 24586385 NR Description: CG1882-PA [Drosophila melanogaster]
  misc_feature (12)..(393): Homolog of NCBI NO: 30686425 NR Description: hydrolase, alpha/beta fold family [Arabidopsis
  misc_feature (12)..(393): Homolog of NCBI NO: 7446839 NR Description: hypothetical protein T19F6.150 - Arabidopsis
MNAIRSRWLTRMAEDIGKSNLESSSASTTSRGFWPSVLRWIPSSTDHIINAEKRLLSLVKTPYAQEQVNIGSGPPDSKVRWFRSSSNEPRFINTVTFDSKDDSPTLVMVHGYAASQGFFFRNFDALASRFRVIAIDQLGWGGSSRPDFTCRSTEETEAWFIDSFEEWRKAKNLSNFILLGHSFGGYVASKYALKHPEHVNHLILVGPAGFSSESERITKFLSTWKGSILNQIWESNFTPQKIIRGLGPWGPDMVLKYTSARFVTYTTGETLTESESRLLTDYVYHTLAAKASGELCLKYIFSFGGLPRSPLLHSASEWKVPTTFIYGFQDWMNYEGAQEARKQMKVPCEILRVPQAGHFVFIDNPSGFHSAVFYACRRFLRPDPDSESLPEGLTSA

SEQ ID NO: 53261 - protein, 385 aa, Glycine max
  peptide (1)..(385): Ceres Seq. ID no. 15174779
  misc_feature (119)..(364): Pfam Name: alpha/beta hydrolase fold Pfam Description: alpha/beta hydrolase fold
  misc_feature (29)..(374): Homolog of NCBI NO: 31204749 NR Description: ENSANGP00000017492 [Anopheles gambiae]
  misc_feature (83)..(365): Homolog of NCBI NO: 26326239 NR Description: unnamed protein product [Mus musculus]
  misc_feature (41)..(365): Homolog of NCBI NO: 24586387 NR Description: CG1882-PB [Drosophila melanogaster]
  misc_feature (19)..(365): Homolog of NCBI NO: 11545767 NR Description: abhydrolase domain containing 4 [Homo sapiens]
  misc_feature (19)..(365): Homolog of NCBI NO: 19353227 NR Description: hypothetical protein FLJ12816 [Homo sapiens]
  misc_feature (29)..(365): Homolog of NCBI NO: 34875013 NR Description: similar to RIKEN cDNA 1110035H23 [Rattus
  misc_feature (29)..(365): Homolog of NCBI NO: 19527302 NR Description: RIKEN cDNA 1110035H23 [Mus musculus]
  misc_feature (7)..(365): Homolog of NCBI NO: 24586385 NR Description: CG1882-PA [Drosophila melanogaster]
  misc_feature (1)..(382): Homolog of NCBI NO: 30686425 NR Description: hydrolase, alpha/beta fold family [Arabidopsis
  misc_feature (1)..(382): Homolog of NCBI NO: 7446839 NR Description: hypothetical protein T19F6.150 - Arabidopsis
MAEDIGKSNLESSSASTTSRGFWPSVLRWIPSSTDHIINAEKRLLSLVKTPYAQEQVNIGSGPPDSKVRWFRSSSNEPRFINTVTFDSKDDSPTLVMVHGYAASQGFFFRNFDALASRFRVIAIDQLGWGGSSRPDFTCRSTEETEAWFIDSFEEWRKAKNLSNFILLGHSFGGYVASKYALKHPEHVNHLILVGPAGFSSESERITKFLSTWKGSILNQIWESNFTPQKIIRGLGPWGPDMVLKYTSARFVTYTTGETLTESESRLLTDYVYHTLAAKASGELCLKYIFSFGGLPRSPLLHSASEWKVPTTFIYGFQDWMNYEGAQEARKQMKVPCEILRVPQAGHFVFIDNPSGFHSAVFYACRRFLRPDPDSESLPEGLTSA

SEQ ID NO: 53262 - DNA, 1266 bp, Glycine max
  misc_feature (1)..(1266): Ceres Seq. ID no. 14311229
accatttctcttccctcaactaaactcatattccaaaacgcagagccaaaccatgtcgttccccttcaaccactctcacgccacccacacccaccaccgcagggacgacgacgacgacgaacgacccaccgtttaccctccgccgggaaactccttcagcaacccgccacctccgttctacggcgtccctcaaccaccaccccctcagccggagacccacgtgttccattccgctcacgtgacaccaggacacgtgtcccatgacttcaacaactactccgctcccccgcctccacccccttcccaccatcatcatgatcgtcatcatgactccttcacccacgcttacccacctgctcccgctgcagctgattaccccgctcacggaggcagcagtaccaccgtgcaccacgtggctcacgagtctcaccaccacaccccccattccgctttctcctcccacaacaacgcaccccccaccactgttcatcacgtgagccaccaggttaacaccggtggtctctcgaccaaacccactgtcagggttttcaccaaagctaatcccaatttctctctcaccattcgtcgcggccaagtcattctcgctccctccgatcccaccaatgagtaccagcattggtataaggatgagaagtacagcacgagggtgaaggatgaagaggggtgccctgctttctctttgatcaacaaggccactggtgaggccttgaagcactccatcggtgctactcatccagttcggctgataccttacaagccagactatcttgatgagtctattctttggactgaaagccgtgacttaggagatggccacagagctataaggatggtcaacaatgttcatcttaatgtggatgcttttcatggcgataagaattctggaggtgtgcgtgatggcactacaatagtcctctgggactggaacaaaggtgataaccaacggtggaagatcttaccttactgagtaaaattgacgggatttgtgagtggctttgaagatgcattaagttgagaggactattggcccttctatttgagtagtttggtgttgtctagagtatgaatggtgtgtattgcatttactggtaccaagcaatcggcttttttcaatagaataagtgtgtttatctaatatttattgcatacatgtggcactggttaatgtgctgattgccatatatatattggtatacagttcatgtatcttcttactagtatatcttaatgtgattcagtgtgaac

SEQ ID NO: 53263 - protein, 328 aa, Glycine max
  peptide (1)..(328): Ceres Seq. ID no. 14311230
  misc_feature (280)..(328): Pfam Name: QXW lectin repeat Pfam Description: QXW lectin repeat
  misc_feature (167)..(328): Homolog of NCBI NO: 34902150 NR Description: Putative r40c1 protein - rice
  misc_feature (167)..(328): Homolog of NCBI NO: 7489571 NR Description: r40c1 protein - rice
  misc_feature (163)..(328): Homolog of NCBI NO: 34394517 NR Description: r40g2 protein [Oryza sativa (japonica
  misc_feature (163)..(328): Homolog of NCBI NO: 7489572 NR Description: r40g2 protein - rice (fragment)
  misc_feature (172)..(328): Homolog of NCBI NO: 34902150 NR Description: Putative r40c1 protein - rice
  misc_feature (172)..(328): Homolog of NCBI NO: 7489571 NR Description: r40c1 protein - rice
  misc_feature (157)..(328): Homolog of NCBI NO: 7489573 NR Description: r40g3 protein - rice
  misc_feature (89)..(328): Homolog of NCBI NO: 34894060 NR Description: putative r40c1 protein [Oryza sativa (japonica
  misc_feature (24)..(328): Homolog of NCBI NO: 25408635 NR Description: hypothetical protein At2g39050 [imported] -
  misc_feature (24)..(328): Homolog of NCBI NO: 18404934 NR Description: lectin repeat protein family [Arabidopsis
PFLFPQLNSYSKTQSQTMSFPFNHSHATHTHHRRDDDDDERPTVYPPPGNSFSNPPPPFYGVPQPPPPQPETHVFHSAHVTPGHVSHDFNNYSAPPPPPPSHHHHDRHHDSFTHAYPPAPAAADYPAHGGSSTTVHHVAHESHHHTPHSAFSSHNNAPPTTVHHVSHQVNTGGLSTKPTVRVFTKANPNFSLTIRRGQVILAPSDPTNEYQHWYKDEKYSTRVKDEEGCPAFSLINKATGEALKHSIGATHPVRLIPYKPDYLDESILWTESRDLGDGHRAIRMVNNVHLNVDAFHGDKNSGGVRDGTTIVLWDWNKGDNQRWKILPY

SEQ ID NO: 53264 - protein, 311 aa, Glycine max
  peptide (1)..(311): Ceres Seq. ID no. 14311231
  misc_feature (263)..(311): Pfam Name: QXW lectin repeat Pfam Description: QXW lectin repeat
  misc_feature (150)..(311): Homolog of NCBI NO: 34902150 NR Description: Putative r40c1 protein - rice
  misc_feature (150)..(311): Homolog of NCBI NO: 7489571 NR Description: r40c1 protein - rice
  misc_feature (146)..(311): Homolog of NCBI NO: 34394517 NR Description: r40g2 protein [Oryza sativa (japonica
  misc_feature (146)..(311): Homolog of NCBI NO: 7489572 NR Description: r40g2 protein - rice (fragment)
  misc_feature (155)..(311): Homolog of NCBI NO: 34902150 NR Description: Putative r40c1 protein - rice
  misc_feature (155)..(311): Homolog of NCBI NO: 7489571 NR Description: r40c1 protein - rice
  misc_feature (140)..(311): Homolog of NCBI NO: 7489573 NR Description: r40g3 protein - rice
  misc_feature (72)..(311): Homolog of NCBI NO: 34894060 NR Description: putative r40c1 protein [Oryza sativa (japonica
  misc_feature (7)..(311): Homolog of NCBI NO: 25408635 NR Description: hypothetical protein At2g39050 [imported] -
  misc_feature (7)..(311): Homolog of NCBI NO: 18404934 NR Description: lectin repeat protein family [Arabidopsis
MSFPFNHSHATHTHHRRDDDDDERPTVYPPPGNSFSNPPPPFYGVPQPPPPQPETHVFHSAHVTPGHVSHDFNNYSAPPPPPPSHHHHDRHHDSFTHAYPPAPAAADYPAHGGSSTTVHHVAHESHHHTPHSAFSSHNNAPPTTVHHVSHQVNTGGLSTKPTVRVFTKANPNFSLTIRRGQVILAPSDPTNEYQHWYKDEKYSTRVKDEEGCPAFSLINKATGEALKHSIGATHPVRLIPYKPDYLDESILWTESRDLGDGHRAIRMVNNVHLNVDAFHGDKNSGGVRDGTTIVLWDWNKGDNQRWKILPY

SEQ ID NO: 53265 - DNA, 1195 bp, Glycine max
  misc_feature (1)..(1195): Ceres Seq. ID no. 14304689
aaagtaaaccatgaattctctatcactcttcaccttcctctgcgcaatttgtgcgcactccgtcgccgtcacctccgcggcatatccttccatccccggcacggaaaccggagagtgctccctccgcggcgtcggcgtcggcgacggtgttctggtccctccgcggcgagaagtgtacgaggaggggcgaatcttcgacatcacccacaggtatgtccccgagatgccggtgtgggactcgacggaggggctcgggcagcacttcctgtggctcgaaaagagcatgaagaatggctcgcgcgctaacaactccaacatgaagctcggtgttcacaccggcacccatgtcgacgcgcccggtcacttttacgacaattactacgacgccggcttcgatgttgactcactcgacctaacactcctcaatggccttgcacttttggttgatgttccacgggataaaaacattactgctgaggttatgaagtccttgaatatccctagaggtgtaagccgcgtgcttttcagaactttaaacactgacaggcaactcatgtttaagaaagaatttgacacaagctatgtgggattcaaggaggatggtgcaaaatggctggcagagaacaccgacatcaaacttgtaggagtcgattacttatctgttgctgcttatgatcactccattccatctcatcttgttttcctggaaagcaaggaaatcattcttgtggaaggcctaaagcttgatgatgtcccagcaggaatatattcactgaattgcttgcctcttaggttggttcactctgaggcatcaccaattcgatgcattctgatcaaatgatcaaatgatggggtcaaacctggttttcaattgcacggatgaacctgccacaagaagcaacgtagccacgaatacaattagtggtgtccataagaagcagtttgatgcaaattgcaagctaagctgatagtagtatgttgaattactcttagtttacgtccttgggttggaaagtactgaattattgtgattaaacttcagttgcggactagggggtccacctgtattaacttatgcttttaatattttcctaggcaagtacttgtgcaattctgaagacgcatgcttgtacgtctcaataattatatctatttctctttgaaaaataatgaaatactactaataatctcgggc

SEQ ID NO: 53266 - protein, 276 aa, Glycine max
  peptide (1)..(276): Ceres Seq. ID no. 14304690
  misc_feature (61)..(262): Pfam Name: Putative cyclase Pfam Description: Putative cyclase
  misc_feature (61)..(274): Homolog of NCBI NO: 23056289 NR Description: hypothetical protein [Geobacter metallireducens]
  misc_feature (60)..(274): Homolog of NCBI NO: 39998438 NR Description: cyclase, putative [Geobacter sulfurreducens PCA]
  misc_feature (61)..(276): Homolog of NCBI NO: 16330650 NR Description: hypothetical protein [Synechocystis sp. PCC 6803]
  misc_feature (60)..(276): Homolog of NCBI NO: 23016903 NR Description: hypothetical protein [Magnetospirillum
  misc_feature (6)..(154): Homolog of NCBI NO: 7486023 NR Description: hypothetical protein F23E12.220 - Arabidopsis
  misc_feature (50)..(239): Homolog of NCBI NO: 7486287 NR Description: hypothetical protein F28A23.60 - Arabidopsis
  misc_feature (6)..(276): Homolog of NCBI NO: 15219416 NR Description: hypothetical protein [Arabidopsis thaliana]
  misc_feature (50)..(276): Homolog of NCBI NO: 18418393 NR Description: expressed protein [Arabidopsis thaliana]
  misc_feature (4)..(276): Homolog of NCBI NO: 35215089 NR Description: hypothetical protein [Oryza sativa (japonica
  misc_feature (6)..(275): Homolog of NCBI NO: 18418598 NR Description: expressed protein [Arabidopsis thaliana]
MNSLSLFTFLCAICAHSVAVTSAAYPSIPGTETGECSLRGVGVGDGVLVPPRREVYEEGRIFDITHRYVPEMPVWDSTEGLGQHFLWLEKSMKNGSRANNSNMKLGVHTGTHVDAPGHFYDNYYDAGFDVDSLDLTLLNGLALLVDVPRDKNITAEVMKSLNIPRGVSRVLFRTLNTDRQLMFKKEFDTSYVGFKEDGAKWLAENTDIKLVGVDYLSVAAYDHSIPSHLVFLESKEIILVEGLKLDDVPAGIYSLNCLPLRLVHSEASPIRCILIK

SEQ ID NO: 53267 - protein, 205 aa, Glycine max
  peptide (1)..(205): Ceres Seq. ID no. 14304691
  misc_feature (1)..(191): Pfam Name: Putative cyclase Pfam Description: Putative cyclase
  misc_feature (1)..(203): Homolog of NCBI NO: 23056289 NR Description: hypothetical protein [Geobacter metallireducens]
  misc_feature (1)..(203): Homolog of NCBI NO: 39998438 NR Description: cyclase, putative [Geobacter sulfurreducens PCA]
  misc_feature (1)..(205): Homolog of NCBI NO: 16330650 NR Description: hypothetical protein [Synechocystis sp. PCC 6803]
  misc_feature (1)..(205): Homolog of NCBI NO: 23016903 NR Description: hypothetical protein [Magnetospirillum
  misc_feature (1)..(83): Homolog of NCBI NO: 7486023 NR Description: hypothetical protein F23E12.220 - Arabidopsis
  misc_feature (1)..(168): Homolog of NCBI NO: 7486287 NR Description: hypothetical protein F28A23.60 - Arabidopsis
  misc_feature (1)..(205): Homolog of NCBI NO: 15219416 NR Description: hypothetical protein [Arabidopsis thaliana]
  misc_feature (1)..(205): Homolog of NCBI NO: 18418393 NR Description: expressed protein [Arabidopsis thaliana]
  misc_feature (1)..(205): Homolog of NCBI NO: 35215089 NR Description: hypothetical protein [Oryza sativa (japonica
  misc_feature (1)..(204): Homolog of NCBI NO: 18418598 NR Description: expressed protein [Arabidopsis thaliana]
MPVWDSTEGLGQHFLWLEKSMKNGSRANNSNMKLGVHTGTHVDAPGHFYDNYYDAGFDVDSLDLTLLNGLALLVDVPRDKNITAEVMKSLNIPRGVSRVLFRTLNTDRQLMFKKEFDTSYVGFKEDGAKWLAENTDIKLVGVDYLSVAAYDHSIPSHLVFLESKEIILVEGLKLDDVPAGIYSLNCLPLRLVHSEASPIRCILIK

SEQ ID NO: 53268 - protein, 185 aa, Glycine max
  peptide (1)..(185): Ceres Seq. ID no. 14304692
  misc_feature (1)..(171): Pfam Name: Putative cyclase Pfam Description: Putative cyclase
  misc_feature (1)..(183): Homolog of NCBI NO: 23056289 NR Description: hypothetical protein [Geobacter metallireducens]
  misc_feature (1)..(183): Homolog of NCBI NO: 39998438 NR Description: cyclase, putative [Geobacter sulfurreducens PCA]
  misc_feature (1)..(185): Homolog of NCBI NO: 16330650 NR Description: hypothetical protein [Synechocystis sp. PCC 6803]
  misc_feature (1)..(185): Homolog of NCBI NO: 23016903 NR Description: hypothetical protein [Magnetospirillum
  misc_feature (1)..(63): Homolog of NCBI NO: 7486023 NR Description: hypothetical protein F23E12.220 - Arabidopsis
  misc_feature (1)..(148): Homolog of NCBI NO: 7486287 NR Description: hypothetical protein F28A23.60 - Arabidopsis
  misc_feature (1)..(185): Homolog of NCBI NO: 15219416 NR Description: hypothetical protein [Arabidopsis thaliana]
  misc_feature (1)..(185): Homolog of NCBI NO: 18418393 NR Description: expressed protein [Arabidopsis thaliana]
  misc_feature (1)..(185): Homolog of NCBI NO: 35215089 NR Description: hypothetical protein [Oryza sativa (japonica
  misc_feature (1)..(184): Homolog of NCBI NO: 18418598 NR Description: expressed protein [Arabidopsis thaliana]
MKNGSRANNSNMKLGVHTGTHVDAPGHFYDNYYDAGFDVDSLDLTLLNGLALLVDVPRDKNITAEVMKSLNIPRGVSRVLFRTLNTDRQLMFKKEFDTSYVGFKEDGAKWLAENTDIKLVGVDYLSVAAYDHSIPSHLVFLESKEIILVEGLKLDDVPAGIYSLNCLPLRLVHSEASPIRCILIK

SEQ ID NO: 53269 - DNA, 561 bp, Glycine max
  misc_feature (1)..(561): Ceres Seq. ID no. 13580958
ttatttttttcacatgagtttggtaattagccttcttcagtctccgttatttttgttttataaacctgctgtcttaggtaagcttagctactggtttcttgtttcttggtggtggaatgagaacattttcaacaaacaaccattccattgctgctttgctaattactctatatccacgcttgccgactggtccaaatgataacagatgccaccttcaggcatttcgccatctctatgtccttgcaacagaggcgcgatggattcagacagttgatgttgacacgggtctgcctgtttatgctcctcttgaggtcacagtcagagaaactgagcattatgcagaatccagcttttgcgaggtcaccccttgccttctgccagaacgatcaattttgaaaagaatacgtgtttgtgggcctcgctactggcctcaagtaatagactttaccccagaagataaaccttggtggaattttggagacaagaataatccatttaattctggtattcttttcatcaaaaagaaaggttggagcttgttcatatgttgatgatcccatt

SEQ ID NO: 53270 - protein, 144 aa, Glycine max
  peptide (1)..(144): Ceres Seq. ID no. 13580959
  misc_feature (1)..(109): Homolog of NCBI NO: 19111950 NR Description: cut4 [Schizosaccharomyces pombe]
  misc_feature (1)..(105): Homolog of NCBI NO: 24642175 NR Description: CG9198-PA [Drosophila melanogaster]
  misc_feature (1)..(105): Homolog of NCBI NO: 24642177 NR Description: CG9198-PB [Drosophila melanogaster]
  misc_feature (1)..(124): Homolog of NCBI NO: 40744024 NR Description: BIME_EMENI NEGATIVE REGULATOR OF MITOSIS
  misc_feature (1)..(124): Homolog of NCBI NO: 114989 NR Description: NEGATIVE REGULATOR OF MITOSIS
  misc_feature (1)..(141): Homolog of NCBI NO: 34859181 NR Description: similar to tsg24 [Rattus norvegicus]
  misc_feature (1)..(141): Homolog of NCBI NO: 6678834 NR Description: meiotic check point regulator [Mus musculus]
  misc_feature (1)..(141): Homolog of NCBI NO: 12056971 NR Description: anaphase-promoting complex 1 (meiotic checkpoint
  misc_feature (1)..(141): Homolog of NCBI NO: 10435855 NR Description: unnamed protein product [Homo sapiens]
  misc_feature (1)..(109): Homolog of NCBI NO: 15239171 NR Description: E3 ubiquitin ligase APC1, putative [Arabidopsis
MRTFSTNNHSIAALLITLYPRLPTGPNDNRCHLQAFRHLYVLATEARWIQTVDVDTGLPVYAPLEVTVRETEHYAESSFCEVTPCLLPERSILKRIRVCGPRYWPQVIDFTPEDKPWWNFGDKNNPFNSGILFIKKKGWSLFIC

SEQ ID NO: 53271 - DNA, 1439 bp, Glycine max
  misc_feature (1)..(1439): Ceres Seq. ID no. 15169350
gagaactagattcagattcagattcagatgtcctgaagcgccctcacacatggccacgacaacaaggtcaccgaatcgttcctccgaggacgccgccgatcccacgccgttcctcggcacttcttccgacgaatccacctccggccgccgcctcctccgccgcccgagtctccgcgaggctgcgcgcttcctgcgccaggccagcggccgccgcctcatgcgcgagccgtccatggtggtgcgggaggcggcggcggagcagctcgaggagaggcagagcgattgggcctattccaagcccgtcgtcgtcttggacattctctggaacttcgccttcgtcgcggccgccgcaaccgtcttcattctcagccgcaacgagaatcccaacatgcctctcaggctgtggattgtaggctacgctctgcagtgcgttcttcacgtcgcgtgcgtctgcgtcgagtaccagcgccgcctacgccgccgcgaacagtccaacgccgccgctatcgcgggtggcggcagcggagatttgggtccgccttcgatggacggctctggacactacgtgtcgttggcgcagttcgacgacgatggtataagtatggcaaagcatttggaatcagccaacacaatgttttcgtttatttggtgggttgttggattctattgggtgtcagctgatagtgaatctttggtccgagattctcccctgctctactggttatgtatagccttcctgggttttgatgttttctttgtcgttttctgtatggcactagcatgcatcgttggtattgctgtttgctgttgtcttccatgtatcattgcactcctgtatgcagttgcagaccaggaaggggcatcaaaagaagacattgagcagttgtcaaaattcaagttccaaagaactgaaactaatgagaaacttgctgggaatacacaaggagctgctggaggaataatgattgaatgcgatgctgattctcccattgaacatgttctttctgacgaggatgcggaatgttgcatctgcctttctgcttatgatgacggggttgaacttagacaacttccttgtggccaccattttcactgtgcctgtgtggacaaatggctgcatatcaatgctacatgccccctctgcaagtacaacatcttgaaaagtaccagtcatgctcaagacgaagtgtagtcagaatagctcctagcagccatgttggggaaattgcatctcttttggtttacagtataataggcacaacttgttaatataattcaatgcaggcctttattgtagttgctactgctgcatatcgtttatctcatagtgatagttgttttgattattcttcgttatggtggcttcttaatggttgtgtacatctgctcattgtataccgtaaataattatcttgaggaaagttggttgacgttttttt

SEQ ID NO: 53272 - protein, 396 aa, Glycine max
  peptide (1)..(396): Ceres Seq. ID no. 15169351
  misc_feature (341)..(381): Pfam Name: Zinc finger, C3HC4 type (RING finger) Pfam Description: Zinc finger, C3HC4 type (RING finger)
  misc_feature (241)..(396): Homolog of NCBI NO: 15222059 NR Description: zinc finger (C3HC4-type RING finger) protein
  misc_feature (23)..(221): Homolog of NCBI NO: 15222059 NR Description: zinc finger (C3HC4-type RING finger) protein
  misc_feature (73)..(396): Homolog of NCBI NO: 38344371 NR Description: OSJNBb0032E06.5 [Oryza sativa (japonica
  misc_feature (340)..(391): Homolog of NCBI NO: 7487667 NR Description: hypothetical protein T5C23.110 - Arabidopsis
  misc_feature (26)..(339): Homolog of NCBI NO: 7487667 NR Description: hypothetical protein T5C23.110 - Arabidopsis
  misc_feature (27)..(389): Homolog of NCBI NO: 16604388 NR Description: At1g63170/F16M19_7 [Arabidopsis thaliana]
  misc_feature (15)..(396): Homolog of NCBI NO: 9502381 NR Description: T12C24.29 [Arabidopsis thaliana]
  misc_feature (27)..(395): Homolog of NCBI NO: 21554228 NR Description: unknown [Arabidopsis thaliana]
  misc_feature (27)..(395): Homolog of NCBI NO: 18407748 NR Description: zinc finger (C3HC4-type RING finger) protein
  misc_feature (26)..(391): Homolog of NCBI NO: 18413629 NR Description: zinc finger (C3HC4-type RING finger) protein
RTRFRFRFRCPEAPSHMATTTRSPNRSSEDAADPTPFLGTSSDESTSGRRLLRRPSLREAARFLRQASGRRLMREPSMVVREAAAEQLEERQSDWAYSKPVVVLDILWNFAFVAAAATVFILSRNENPNMPLRLWIVGYALQCVLHVACVCVEYQRRLRRREQSNAAAIAGGGSGDLGPPSMDGSGHYVSLAQFDDDGISMAKHLESANTMFSFIWWVVGFYWVSADSESLVRDSPLLYWLCIAFLGFDVFFVVFCMALACIVGIAVCCCLPCIIALLYAVADQEGASKEDIEQLSKFKFQRTETNEKLAGNTQGAAGGIMIECDADSPIEHVLSDEDAECCICLSAYDDGVELRQLPCGHHFHCACVDKWLHINATCPLCKYNILKSTSHAQDEV

SEQ ID NO: 53273 - protein, 380 aa, Glycine max
  peptide (1)..(380): Ceres Seq. ID no. 15169352
  misc_feature (325)..(365): Pfam Name: Zinc finger, C3HC4 type (RING finger) Pfam Description: Zinc finger, C3HC4 type (RING finger)
  misc_feature (225)..(380): Homolog of NCBI NO: 15222059 NR Description: zinc finger (C3HC4-type RING finger) protein
  misc_feature (7)..(205): Homolog of NCBI NO: 15222059 NR Description: zinc finger (C3HC4-type RING finger) protein
  misc_feature (57)..(380): Homolog of NCBI NO: 38344371 NR Description: OSJNBb0032E06.5 [Oryza sativa (japonica
  misc_feature (324)..(375): Homolog of NCBI NO: 7487667 NR Description: hypothetical protein T5C23.110 - Arabidopsis
  misc_feature (10)..(323): Homolog of NCBI NO: 7487667 NR Description: hypothetical protein T5C23.110 - Arabidopsis
  misc_feature (11)..(373): Homolog of NCBI NO: 16604388 NR Description: At1g63170/F16M19_7 [Arabidopsis thaliana]
  misc_feature (1)..(380): Homolog of NCBI NO: 9502381 NR Description: T12C24.29 [Arabidopsis thaliana]
  misc_feature (11)..(379): Homolog of NCBI NO: 21554228 NR Description: unknown [Arabidopsis thaliana]
  misc_feature (11)..(379): Homolog of NCBI NO: 18407748 NR Description: zinc finger (C3HC4-type RING finger) protein
  misc_feature (10)..(375): Homolog of NCBI NO: 18413629 NR Description: zinc finger (C3HC4-type RING finger) protein
MATTTRSPNRSSEDAADPTPFLGTSSDESTSGRRLLRRPSLREAARFLRQASGRRLMREPSMVVREAAAEQLEERQSDWAYSKPVVVLDILWNFAFVAAAATVFILSRNENPNMPLRLWIVGYALQCVLHVACVCVEYQRRLRRREQSNAAAIAGGGSGDLGPPSMDGSGHYVSLAQFDDDGISMAKHLESANTMFSFIWWVVGFYWVSADSESLVRDSPLLYWLCIAFLGFDVFFVVFCMALACIVGIAVCCCLPCIIALLYAVADQEGASKEDIEQLSKFKFQRTETNEKLAGNTQGAAGGIMIECDADSPIEHVLSDEDAECCICLSAYDDGVELRQLPCGHHFHCACVDKWLHINATCPLCKYNILKSTSHAQDEV

SEQ ID NO: 53274 - protein, 324 aa, Glycine max
  peptide (1)..(324): Ceres Seq. ID no. 15169353
  misc_feature (269)..(309): Pfam Name: Zinc finger, C3HC4 type (RING finger) Pfam Description: Zinc finger, C3HC4 type (RING finger)
  misc_feature (169)..(324): Homolog of NCBI NO: 15222059 NR Description: zinc finger (C3HC4-type RING finger) protein
  misc_feature (1)..(149): Homolog of NCBI NO: 15222059 NR Description: zinc finger (C3HC4-type RING finger) protein
  misc_feature (1)..(324): Homolog of NCBI NO: 38344371 NR Description: OSJNBb0032E06.5 [Oryza sativa (japonica
  misc_feature (268)..(319): Homolog of NCBI NO: 7487667 NR Description: hypothetical protein T5C23.110 - Arabidopsis
  misc_feature (1)..(267): Homolog of NCBI NO: 7487667 NR Description: hypothetical protein T5C23.110 - Arabidopsis
  misc_feature (1)..(317): Homolog of NCBI NO: 16604388 NR Description: At1g63170/F16M19_7 [Arabidopsis thaliana]
  misc_feature (1)..(324): Homolog of NCBI NO: 9502381 NR Description: T12C24.29 [Arabidopsis thaliana]
  misc_feature (1)..(323): Homolog of NCBI NO: 21554228 NR Description: unknown [Arabidopsis thaliana]
  misc_feature (1)..(323): Homolog of NCBI NO: 18407748 NR Description: zinc finger (C3HC4-type RING finger) protein
  misc_feature (1)..(319): Homolog of NCBI NO: 18413629 NR Description: zinc finger (C3HC4-type RING finger) protein
MREPSMVVREAAAEQLEERQSDWAYSKPVVVLDILWNFAFVAAAATVFILSRNENPNMPLRLWIVGYALQCVLHVACVCVEYQRRLRRREQSNAAAIAGGGSGDLGPPSMDGSGHYVSLAQFDDDGISMAKHLESANTMFSFIWWVVGFYWVSADSESLVRDSPLLYWLCIAFLGFDVFFVVFCMALACIVGIAVCCCLPCIIALLYAVADQEGASKEDIEQLSKFKFQRTETNEKLAGNTQGAAGGIMIECDADSPIEHVLSDEDAECCICLSAYDDGVELRQLPCGHHFHCACVDKWLHINATCPLCKYNILKSTSHAQDEV

SEQ ID NO: 53275 - DNA, 1213 bp, Glycine max
  misc_feature (1)..(1213): Ceres Seq. ID no. 14306765
gatctaaactaaaccactctctcttctcttcattctccctcttaattcttttctcttttctttctttcacacaaactcctcttattatgatgggtcttgatcaagatgctagcagcaactctggccttcatcttattctagggttagctttgactgccaccaccactactactccatcactaccatccatttccaacaagcttgatcatgttgatcatcatcaccatcttataactcttagaccaacaacaaagtcaccctataattcctctgaggctgaaccatcattaacgttgggcttgtcccgtgagagttacctcaaagtacccaaaaacatcataggacaaaacagcaacaacaaagtctcgtcttgtgatgaccctcttgatcacttgtccacacagactaattcacctcatcacagtgctgtttcctccttctccagtggcagggtcaagagggagagggatctcagttgcgaagaagttgtggatgcaacagagattgatcagagggaccatagctgtgaaggaatagtaagagccactgacgaagacgaagacggcaccgccgccagaaagaaacttaggcttagtaaagaacaatctgctttgctagaagaaagcttcaaacaacatagcaccctcaatcctaaacagaagcaagctttggcgaagcagttgaatcttaggccacgacaagttgaggtgtggttccagaacaggagagccagaacaaagctgaagcagacagaggtggactgcgagttcctaaagaaatgttgtgagacattaacagacgaaaacagacggttacagaaggagcttcaagagcttaaagcactgaaactggctcagcctctgtacatgcctatgcctgcggcaacactcaccatgtgcccctcttgtgagaggctcggcggcggcatcaacggtggcggcggcggttcccctaagacaccattctccatggctcctaagcctcacttcttcaaccccttcgccaacccttctgcagcatgttgattgattgttattataattaggcttttaattagttttcattaaaaaaaaaaaaaacagcaaaaaccaaagaagagttgccccacaacctttgtatttttttggttgagggatacgtcttatgaactacatagctagtgaaaaaaaggttaagggtgtaattaattaactaatatactgtagaaatttgc

SEQ ID NO: 53276 - protein, 340 aa, Glycine max
  peptide (1)..(340): Ceres Seq. ID no. 14306766
  misc_feature (193)..(247): Pfam Name: Homeobox domain Pfam Description: Homeobox domain
  misc_feature (151)..(340): Homolog of NCBI NO: 37530370 NR Description: putative homeobox protein HAT22
  misc_feature (136)..(328): Homolog of NCBI NO: 25487873 NR Description: homeobox-leucine zipper protein
  misc_feature (145)..(340): Homolog of NCBI NO: 3868833 NR Description: CRHB3 [Ceratopteris richardii]
  misc_feature (92)..(340): Homolog of NCBI NO: 7489329 NR Description: homeobox protein - common sunflower
  misc_feature (141)..(340): Homolog of NCBI NO: 3868847 NR Description: CRHB10 [Ceratopteris richardii]
  misc_feature (39)..(339): Homolog of NCBI NO: 7446246 NR Description: homeobox leucine zipper protein Hb-2,
  misc_feature (129)..(340): Homolog of NCBI NO: 25386244 NR Description: homeobox protein HAT9 [imported] - Arabidopsis
  misc_feature (129)..(340): Homolog of NCBI NO: 25386242 NR Description: homeobox protein HAT9 [imported] - Arabidopsis
  misc_feature (129)..(340): Homolog of NCBI NO: 15227754 NR Description: homeobox-leucine zipper protein HAT9 (HD-Zip
  misc_feature (79)..(340): Homolog of NCBI NO: 15235712 NR Description: Homeobox-leucine zipper protein HAT22 (HD-ZIP
SKLNHSLFSSFSLLILFSFLSFTQTPLIMMGLDQDASSNSGLHLILGLALTATTTTTPSLPSISNKLDHVDHHHHLITLRPTTKSPYNSSEAEPSLTLGLSRESYLKVPKNIIGQNSNNKVSSCDDPLDHLSTQTNSPHHSAVSSFSSGRVKRERDLSCEEVVDATEIDQRDHSCEGIVRATDEDEDGTAARKKLRLSKEQSALLEESFKQHSTLNPKQKQALAKQLNLRPRQVEVWFQNRRARTKLKQTEVDCEFLKKCCETLTDENRRLQKELQELKALKLAQPLYMPMPAATLTMCPSCERLGGGINGGGGGSPKTPFSMAPKPHFFNPFANPSAAC

SEQ ID NO: 53277 - protein, 312 aa, Glycine max
  peptide (1)..(312): Ceres Seq. ID no. 14306767
  misc_feature (165)..(219): Pfam Name: Homeobox domain Pfam Description: Homeobox domain
  misc_feature (123)..(312): Homolog of NCBI NO: 37530370 NR Description: putative homeobox protein HAT22
  misc_feature (108)..(300): Homolog of NCBI NO: 25487873 NR Description: homeobox-leucine zipper protein
  misc_feature (117)..(312): Homolog of NCBI NO: 3868833 NR Description: CRHB3 [Ceratopteris richardii]
  misc_feature (64)..(312): Homolog of NCBI NO: 7489329 NR Description: homeobox protein - common sunflower
  misc_feature (113)..(312): Homolog of NCBI NO: 3868847 NR Description: CRHB10 [Ceratopteris richardii]
  misc_feature (11)..(311): Homolog of NCBI NO: 7446246 NR Description: homeobox leucine zipper protein Hb-2,
  misc_feature (101)..(312): Homolog of NCBI NO: 25386244 NR Description: homeobox protein HAT9 [imported] - Arabidopsis
  misc_feature (101)..(312): Homolog of NCBI NO: 25386242 NR Description: homeobox protein HAT9 [imported] - Arabidopsis
  misc_feature (101)..(312): Homolog of NCBI NO: 15227754 NR Description: homeobox-leucine zipper protein HAT9 (HD-Zip
  misc_feature (51)..(312): Homolog of NCBI NO: 15235712 NR Description: Homeobox-leucine zipper protein HAT22 (HD-ZIP
MMGLDQDASSNSGLHLILGLALTATTTTTPSLPSISNKLDHVDHHHHLITLRPTTKSPYNSSEAEPSLTLGLSRESYLKVPKNIIGQNSNNKVSSCDDPLDHLSTQTNSPHHSAVSSFSSGRVKRERDLSCEEVVDATEIDQRDHSCEGIVRATDEDEDGTAARKKLRLSKEQSALLEESFKQHSTLNPKQKQALAKQLNLRPRQVEVWFQNRRARTKLKQTEVDCEFLKKCCETLTDENRRLQKELQELKALKLAQPLYMPMPAATLTMCPSCERLGGGINGGGGGSPKTPFSMAPKPHFFNPFANPSAAC

SEQ ID NO: 53278 - protein, 311 aa, Glycine max
  peptide (1)..(311): Ceres Seq. ID no. 14306768
  misc_feature (164)..(218): Pfam Name: Homeobox domain Pfam Description: Homeobox domain
  misc_feature (122)..(311): Homolog of NCBI NO: 37530370 NR Description: putative homeobox protein HAT22
  misc_feature (107)..(299): Homolog of NCBI NO: 25487873 NR Description: homeobox-leucine zipper protein
  misc_feature (116)..(311): Homolog of NCBI NO: 3868833 NR Description: CRHB3 [Ceratopteris richardii]
  misc_feature (63)..(311): Homolog of NCBI NO: 7489329 NR Description: homeobox protein - common sunflower
  misc_feature (112)..(311): Homolog of NCBI NO: 3868847 NR Description: CRHB10 [Ceratopteris richardii]
  misc_feature (10)..(310): Homolog of NCBI NO: 7446246 NR Description: homeobox leucine zipper protein Hb-2,
  misc_feature (100)..(311): Homolog of NCBI NO: 25386244 NR Description: homeobox protein HAT9 [imported] - Arabidopsis
  misc_feature (100)..(311): Homolog of NCBI NO: 25386242 NR Description: homeobox protein HAT9 [imported] - Arabidopsis
  misc_feature (100)..(311): Homolog of NCBI NO: 15227754 NR Description: homeobox-leucine zipper protein HAT9 (HD-Zip
  misc_feature (50)..(311): Homolog of NCBI NO: 15235712 NR Description: Homeobox-leucine zipper protein HAT22 (HD-ZIP
MGLDQDASSNSGLHLILGLALTATTTTTPSLPSISNKLDHVDHHHHLITLRPTTKSPYNSSEAEPSLTLGLSRESYLKVPKNIIGQNSNNKVSSCDDPLDHLSTQTNSPHHSAVSSFSSGRVKRERDLSCEEVVDATEIDQRDHSCEGIVRATDEDEDGTAARKKLRLSKEQSALLEESFKQHSTLNPKQKQALAKQLNLRPRQVEVWFQNRRARTKLKQTEVDCEFLKKCCETLTDENRRLQKELQELKALKLAQPLYMPMPAATLTMCPSCERLGGGINGGGGGSPKTPFSMAPKPHFFNPFANPSAAC

SEQ ID NO: 53279 - DNA, 1562 bp, Glycine max
  misc_feature (1)..(1562): Ceres Seq. ID no. 15174752
aaaacccacaaacacttgagtcagacaaaaagatggaaacctctaataacaaccatgatgctcctcctccacctctacttaaagacctgaaggtgaccatccacaatgcctccatgatttttccatccaaagagattgagagaaagtcccttttcttgtcaaacattgacaaggtcctcaactttgatgtggaaacggttcacttctttggtgcccacaaagattttcctcctcatgttgtgaatgagaggctcaagaatgccctagaggatgcccttgtggtttatgacttcttgggtggaagattgaagctcaactatgacaccaaaagattggagatggattgtaatccagagggagctggattcgtggtggcttccagcgagtacaatttggatcagataggggacttggattatccaaatccagcttttgcacaattggtacatcagaataaggattttcttaaagatggtgatgttccactctgtgttgcccaggtgacatccttcaagtgtggtggttttgcaattggcatatctactagccacaccacctttgatggcctcagcttcaaaaccttcctagacaacattgcttcaatagccgctaagaagcccttggttgtcacgccctgtcatgacaggcacctcctagccgcccgatccccaccacgtgtcaccttcccacaccctgagatgctcaagctaagtgaccagctcccaacatgccccgagtccaacatctttgaggcctccaccgaacaacttgatttcaaggtcttcaaactaacattaaacgacatcacaaaattgaaggaagaggctaggaattcttcaattagtggtggcctaagtactaaatgtgtcactggctttaacgttatcactgcctacatatggagatgcaaggcactttcgtgctacaatgatgagaaccctaataggtcatcaactatactatatgctgtagatatacgttcaagattgaaccctccattgcctaaatcatacgcgggtaacgcagtgttaactgcttatgccacggcaaagtgtaaggagctagaagaatggccttttatgaagctagttgaaatggtgcgtgagggagcaactaggatgacaaatgagtatgcaagatctatcatagattggggagagataaacaatgggtttcccaatggggaggttttggtgtcttcatggtggagattagggtttgaggaagtggagtatccgtgggggaagccaaagtattgttgcccagtggtgtatcataagaaggatattattttgttgtttcctccggttggtggaggtgaaggggtgagtattattgtggctcttcctcctaaggaaatggaaaaattccatgggctcttcaacaagttcttgacttcacattgagggaaatgatgggtctttcttcctcctcctatggaaatggaaagattccatgcatgcttaagttcatgacttgagaattatgtctctccctctattgatatccttattaatatgacatctttagcttttcgctagttgttatgtaaaaaaaaaaag

SEQ ID NO: 53280 - protein, 467 aa, Glycine max
  peptide (1)..(467): Ceres Seq. ID no. 15174753
  misc_feature (29)..(460): Pfam Name: Transferase family Pfam Description: Transferase family
  misc_feature (24)..(467): Homolog of NCBI NO: 15218793 NR Description: transferase family [Arabidopsis thaliana]
  misc_feature (29)..(464): Homolog of NCBI NO: 27475616 NR Description: hydroxycinnamoyl transferase [Nicotiana tabacum]
  misc_feature (29)..(459): Homolog of NCBI NO: 38345030 NR Description: OSJNBa0029H02.14 [Oryza sativa (japonica
  misc_feature (31)..(459): Homolog of NCBI NO: 34222064 NR Description: At3g48720 [Arabidopsis thaliana]
  misc_feature (31)..(459): Homolog of NCBI NO: 15229017 NR Description: transferase family [Arabidopsis thaliana]
  misc_feature (37)..(464): Homolog of NCBI NO: 20161743 NR Description: N-hydroxycinnamoyl/benzoyltransferase-like
  misc_feature (15)..(460): Homolog of NCBI NO: 30693725 NR Description: transferase family [Arabidopsis thaliana]
  misc_feature (15)..(460): Homolog of NCBI NO: 30693723 NR Description: transferase family [Arabidopsis thaliana]
  misc_feature (177)..(464): Homolog of NCBI NO: 18408287 NR Description: anthranilate
  misc_feature (16)..(464): Homolog of NCBI NO: 7487802 NR Description: hypothetical protein T8F5.23 - Arabidopsis
NPQTLESDKKMETSNNNHDAPPPPLLKDLKVTIHNASMIFPSKEIERKSLFLSNIDKVLNFDVETVHFFGAHKDFPPHVVNERLKNALEDALVVYDFLGGRLKLNYDTKRLEMDCNPEGAGFVVASSEYNLDQIGDLDYPNPAFAQLVHQNKDFLKDGDVPLCVAQVTSFKCGGFAIGISTSHTTFDGLSFKTFLDNIASIAAKKPLVVTPCHDRHLLAARSPPRVTFPHPEMLKLSDQLPTCPESNIFEASTEQLDFKVFKLTLNDITKLKEEARNSSISGGLSTKCVTGFNVITAYIWRCKALSCYNDENPNRSSTILYAVDIRSRLNPPLPKSYAGNAVLTAYATAKCKELEEWPFMKLVEMVREGATRMTNEYARSIIDWGEINNGFPNGEVLVSSWWRLGFEEVEYPWGKPKYCCPVVYHKKDIILLFPPVGGGEGVSIIVALPPKEMEKFHGLFNKFLTSH

SEQ ID NO: 53281 - protein, 457 aa, Glycine max
  peptide (1)..(457): Ceres Seq. ID no. 15174754
  misc_feature (19)..(450): Pfam Name: Transferase family Pfam Description: Transferase family
  misc_feature (14)..(457): Homolog of NCBI NO: 15218793 NR Description: transferase family [Arabidopsis thaliana]
  misc_feature (19)..(454): Homolog of NCBI NO: 27475616 NR Description: hydroxycinnamoyl transferase [Nicotiana tabacum]
  misc_feature (19)..(449): Homolog of NCBI NO: 38345030 NR Description: OSJNBa0029H02.14 [Oryza sativa (japonica
  misc_feature (21)..(449): Homolog of NCBI NO: 34222064 NR Description: At3g48720 [Arabidopsis thaliana]
  misc_feature (21)..(449): Homolog of NCBI NO: 15229017 NR Description: transferase family [Arabidopsis thaliana]
  misc_feature (27)..(454): Homolog of NCBI NO: 20161743 NR Description: N-hydroxycinnamoyl/benzoyltransferase-like
  misc_feature (5)..(450): Homolog of NCBI NO: 30693725 NR Description: transferase family [Arabidopsis thaliana]
  misc_feature (5)..(450): Homolog of NCBI NO: 30693723 NR Description: transferase family [Arabidopsis thaliana]
  misc_feature (167)..(454): Homolog of NCBI NO: 18408287 NR Description: anthranilate
  misc_feature (6)..(454): Homolog of NCBI NO: 7487802 NR Description: hypothetical protein T8F5.23 - Arabidopsis
METSNNNHDAPPPPLLKDLKVTIHNASMIFPSKEIERKSLFLSNIDKVLNFDVETVHFFGAHKDFPPHVVNERLKNALEDALVVYDFLGGRLKLNYDTKRLEMDCNPEGAGFVVASSEYNLDQIGDLDYPNPAFAQLVHQNKDFLKDGDVPLCVAQVTSFKCGGFAIGISTSHTTFDGLSFKTFLDNIASIAAKKPLVVTPCHDRHLLAARSPPRVTFPHPEMLKLSDQLPTCPESNIFEASTEQLDFKVFKLTLNDITKLKEEARNSSISGGLSTKCVTGFNVITAYIWRCKALSCYNDENPNRSSTILYAVDIRSRLNPPLPKSYAGNAVLTAYATAKCKELEEWPFMKLVEMVREGATRMTNEYARSIIDWGEINNGFPNGEVLVSSWWRLGFEEVEYPWGKPKYCCPVVYHKKDIILLFPPVGGGEGVSIIVALPPKEMEKFHGLFNKFLTSH

SEQ ID NO: 53282 - protein, 430 aa, Glycine max
  peptide (1)..(430): Ceres Seq. ID no. 15174755
  misc_feature (1)..(423): Pfam Name: Transferase family Pfam Description: Transferase family
  misc_feature (1)..(430): Homolog of NCBI NO: 15218793 NR Description: transferase family [Arabidopsis thaliana]
  misc_feature (1)..(427): Homolog of NCBI NO: 27475616 NR Description: hydroxycinnamoyl transferase [Nicotiana tabacum]
  misc_feature (1)..(422): Homolog of NCBI NO: 38345030 NR Description: OSJNBa0029H02.14 [Oryza sativa (japonica
  misc_feature (1)..(422): Homolog of NCBI NO: 34222064 NR Description: At3g48720 [Arabidopsis thaliana]
  misc_feature (1)..(422): Homolog of NCBI NO: 15229017 NR Description: transferase family [Arabidopsis thaliana]
  misc_feature (1)..(427): Homolog of NCBI NO: 20161743 NR Description: N-hydroxycinnamoyl/benzoyltransferase-like
  misc_feature (1)..(423): Homolog of NCBI NO: 30693725 NR Description: transferase family [Arabidopsis thaliana]
  misc_feature (1)..(423): Homolog of NCBI NO: 30693723 NR Description: transferase family [Arabidopsis thaliana]
  misc_feature (140)..(427): Homolog of NCBI NO: 18408287 NR Description: anthranilate
  misc_feature (1)..(427): Homolog of NCBI NO: 7487802 NR Description: hypothetical protein T8F5.23 - Arabidopsis
MIFPSKEIERKSLFLSNIDKVLNFDVETVHFFGAHKDFPPHVVNERLKNALEDALVVYDFLGGRLKLNYDTKRLEMDCNPEGAGFVVASSEYNLDQIGDLDYPNPAFAQLVHQNKDFLKDGDVPLCVAQVTSFKCGGFAIGISTSHTTFDGLSFKTFLDNIASIAAKKPLVVTPCHDRHLLAARSPPRVTFPHPEMLKLSDQLPTCPESNIFEASTEQLDFKVFKLTLNDITKLKEEARNSSISGGLSTKCVTGFNVITAYIWRCKALSCYNDENPNRSSTILYAVDIRSRLNPPLPKSYAGNAVLTAYATAKCKELEEWPFMKLVEMVREGATRMTNEYARSIIDWGEINNGFPNGEVLVSSWWRLGFEEVEYPWGKPKYCCPVVYHKKDIILLFPPVGGGEGVSIIVALPPKEMEKFHGLFNKFLTSH

SEQ ID NO: 53283 - DNA, 1245 bp, Glycine max
  misc_feature (1)..(1245): Ceres Seq. ID no. 14304608
aatctttcttcccagtttttctccaaccttctcaaagatgacgcaacgcacccatcttcttcacactcactatcacaaccaaacgattctttggaaggagtgccaccctatcccttatacaagcgcttttcttcagctctgttgaagtgtatggattctgaaacattttgtaggacaggcgccaatttagccatgaccgatgaatttgaagattcttccatgcagcagaagcgtaatgagtggcacagattgattgtggagaaggggtttgaaatagagaatattttgaagagtgtttcctttgaattccatgtccaagagcctttcttttcacagctaaatgatggcctaaaaacaattgaagggaggtgtgccactgggaaatacaataggatcaaatcaggaaatctaattctctttaataagtcggtggtgtttgaagttcagggagtaagacggtatcctacattctttgccatgttggaggcagaaagccttggaaaagttcttcctggagttgaaagtagtgaagaaggtgtaaaagtctaccagagattttgcacagaggagaaggaacaagcaaatggtgtcctttgcaatcgttgtttcaaaattcacccctcaaccatacgattctttggctagattattctgtgaattgagctatgagggtgttcaaagccttctaggtctcatgcataccacagggacaattcctaatgcacttcctccaccaatatcaactctattagcatcatttaattttccatgcaatccaaatgaaaatggcttgactgatggagctcgtgcattggccaagcatgcttgtaggagtagcagtggttattggggttctctgaatggaaatgttgtctttgaaataagggttgctaatggatatggtgcacgctggacagaagatggaagtaagtttattggatttttagaaccctacatgcaagatgggcactcaaagcgatggaagcactagttctgctggccagaccacgacaactacagctaaaaatgtcactagttttccttttatcttgtgatggaactatgtttatggcacagtatttgtttttctctctctttatttcagctaaggactttagctaactatctagtctaatgtctcagagtaatctacttaagtagacttctgtatacagatgatggattcagtataagtattacttgtttcatcctgtacttttaagaaagaagtatccgtttagctcg

SEQ ID NO: 53284 - protein, 214 aa, Glycine max
  peptide (1)..(214): Ceres Seq. ID no. 14304609
  misc_feature (101)..(205): Homolog of NCBI NO: 18976842 NR Description: hypothetical protein PF0470 [Pyrococcus furiosus
  misc_feature (99)..(198): Homolog of NCBI NO: 18976827 NR Description: hypothetical protein PF0455 [Pyrococcus furiosus
  misc_feature (105)..(198): Homolog of NCBI NO: 20093930 NR Description: Archaea-specific enzyme related to ProFAR
  misc_feature (99)..(198): Homolog of NCBI NO: 14521811 NR Description: hypothetical protein [Pyrococcus abyssi]
  misc_feature (99)..(198): Homolog of NCBI NO: 14590265 NR Description: hypothetical protein PH0355 [Pyrococcus
  misc_feature (85)..(198): Homolog of NCBI NO: 30689388 NR Description: expressed protein [Arabidopsis thaliana]
  misc_feature (9)..(121): Homolog of NCBI NO: 25408874 NR Description: hypothetical protein At2g43470 [imported] -
  misc_feature (59)..(204): Homolog of NCBI NO: 21536491 NR Description: unknown [Arabidopsis thaliana]
  misc_feature (59)..(204): Homolog of NCBI NO: 18396513 NR Description: expressed protein [Arabidopsis thaliana]
  misc_feature (9)..(121): Homolog of NCBI NO: 30689388 NR Description: expressed protein [Arabidopsis thaliana]
NLSSQFFSNLLKDDATHPSSSHSLSQPNDSLEGVPPYPLYKRFSSALLKCMDSETFCRTGANLAMTDEFEDSSMQQKRNEWHRLIVEKGFEIENILKSVSFEFHVQEPFFSQLNDGLKTIEGRCATGKYNRIKSGNLILFNKSVVFEVQGVRRYPTFFAMLEAESLGKVLPGVESSEEGVKVYQRFCTEEKEQANGVLCNRCFKIHPSTIRFFG

SEQ ID NO: 53285 - protein, 164 aa, Glycine max
  peptide (1)..(164): Ceres Seq. ID no. 14304610
  misc_feature (51)..(155): Homolog of NCBI NO: 18976842 NR Description: hypothetical protein PF0470 [Pyrococcus furiosus
  misc_feature (49)..(148): Homolog of NCBI NO: 18976827 NR Description: hypothetical protein PF0455 [Pyrococcus furiosus
  misc_feature (55)..(148): Homolog of NCBI NO: 20093930 NR Description: Archaea-specific enzyme related to ProFAR
  misc_feature (49)..(148): Homolog of NCBI NO: 14521811 NR Description: hypothetical protein [Pyrococcus abyssi]
  misc_feature (49)..(148): Homolog of NCBI NO: 14590265 NR Description: hypothetical protein PH0355 [Pyrococcus
  misc_feature (35)..(148): Homolog of NCBI NO: 30689388 NR Description: expressed protein [Arabidopsis thaliana]
  misc_feature (1)..(71): Homolog of NCBI NO: 25408874 NR Description: hypothetical protein At2g43470 [imported] -
  misc_feature (9)..(154): Homolog of NCBI NO: 21536491 NR Description: unknown [Arabidopsis thaliana]
  misc_feature (9)..(154): Homolog of NCBI NO: 18396513 NR Description: expressed protein [Arabidopsis thaliana]
  misc_feature (1)..(71): Homolog of NCBI NO: 30689388 NR Description: expressed protein [Arabidopsis thaliana]
MDSETFCRTGANLAMTDEFEDSSMQQKRNEWHRLIVEKGFEIENILKSVSFEFHVQEPFFSQLNDGLKTIEGRCATGKYNRIKSGNLILFNKSVVFEVQGVRRYPTFFAMLEAESLGKVLPGVESSEEGVKVYQRFCTEEKEQANGVLCNRCFKIHPSTIRFFG

SEQ ID NO: 53286 - protein, 150 aa, Glycine max
  peptide (1)..(150): Ceres Seq. ID no. 14304611
  misc_feature (37)..(141): Homolog of NCBI NO: 18976842 NR Description: hypothetical protein PF0470 [Pyrococcus furiosus
  misc_feature (35)..(134): Homolog of NCBI NO: 18976827 NR Description: hypothetical protein PF0455 [Pyrococcus furiosus
  misc_feature (41)..(134): Homolog of NCBI NO: 20093930 NR Description: Archaea-specific enzyme related to ProFAR
  misc_feature (35)..(134): Homolog of NCBI NO: 14521811 NR Description: hypothetical protein [Pyrococcus abyssi]
  misc_feature (35)..(134): Homolog of NCBI NO: 14590265 NR Description: hypothetical protein PH0355 [Pyrococcus
  misc_feature (21)..(134): Homolog of NCBI NO: 30689388 NR Description: expressed protein [Arabidopsis thaliana]
  misc_feature (1)..(57): Homolog of NCBI NO: 25408874 NR Description: hypothetical protein At2g43470 [imported] -
  misc_feature (1)..(140): Homolog of NCBI NO: 21536491 NR Description: unknown [Arabidopsis thaliana]
  misc_feature (1)..(140): Homolog of NCBI NO: 18396513 NR Description: expressed protein [Arabidopsis thaliana]
  misc_feature (1)..(57): Homolog of NCBI NO: 30689388 NR Description: expressed protein [Arabidopsis thaliana]
MTDEFEDSSMQQKRNEWHRLIVEKGFEIENILKSVSFEFHVQEPFFSQLNDGLKTIEGRCATGKYNRIKSGNLILFNKSVVFEVQGVRRYPTFFAMLEAESLGKVLPGVESSEEGVKVYQRFCTEEKEQANGVLCNRCFKIHPSTIRFFG

SEQ ID NO: 53287 - DNA, 1530 bp, Glycine max
  misc_feature (1)..(1530): Ceres Seq. ID no. 12563809
aaaagtcaccgattacgttctctaaaattcactcccaaaaaactctatttgattccaccgaaaccctaaccccctttcgacgaacgaagggcaatcagttgctcgctccttggatccattcttgaaattctcgttatcgctcttcgaactcaagctctctcgctcacgatttctgcttctgcaccaatttctgcggtttctcaagatttagaggttctaagtggttcatttctttgaagcatgccggggttaacgtgcaacgcttgcaacaccgaattcaaagatgatacagagcaaaagctccattacaaatccgagtggcatcgatacaatctcaagcgcaaggtggctggggttcctggggtgaccgaggcgttatttctggctagacaatctgtgcttgctcaagagaaaaataaactgggtgaaacccccatgctctacagctgtggtctttgtggaaaggattataaaagttctaaggctcatgctgagcaccttaaatcacgtggtcatatgatgcaggcctctgaaggaactagtcacgcagatgagaaggcaatagttaagcctcttccacaacgtgttgtgaataggcctcctcctaggagagaggtagataactctgaaaatgaggaaagtgaagatgaatgggaggaggttgatcctgaagaggatttggttgatggtgctgcaaagtccttgactgatttgaatgtgaatgagcatggtgaaaatgttgatatggaggtagatgatgattttgaggagttagacccctcttgttgctttatgtgtgatcaagagcacaaatcaatagaaaactgcatggttcacatgcacaagcatcatggattcttcattcctgatgttgagtatttgaaggatccaaaaggcctcctcacctatcttggccttaaggtcaaaagggactacatgtgtctgtactgcaatgatcgatgttatccattcagcagcttggaagcagtcaggaaacatatggaggcaaaaagtcactgtaaagtgcattatggtgatggtgatgatgacgaggaggtagaattagatgagttctatgattatagcagcagttatgtggatgatcaaggcaagcagcttgttgcgtcttgtgatgcatctaacaatgtagaacttgttggtgggtctgagctcataatcaccacgaaatctggtgaaagatcatcaaccaaaacactaggttcccgtgaatttttgcgttattatcgtcaaaaacctcggccatcactagcaaatatggctatcactgctgcgttggcttcaaggtacaggagcatgggcttgaccactatccaatcaagggagaagattgtgaggatgaaagtgctgaaggaaatgaataggtcaggtgtggacaatatgcgtactaagatggcgatgaagagtaatgtcatcaggaacctgccaaagaatgtaccatattagtcctcactggtaatagttttacatgagtggtgctgtgtattaattttttctatgaaataatttttc

SEQ ID NO: 53288 - protein, 407 aa, Glycine max
  peptide (1)..(407): Ceres Seq. ID no. 12563810
  misc_feature (232)..(259): Pfam Name: Zinc finger, C2H2 type Pfam Description: Zinc finger, C2H2 type
  misc_feature (1)..(399): Homolog of NCBI NO: 18859899 NR Description: CG6769-PA [Drosophila melanogaster]
  misc_feature (1)..(92): Homolog of NCBI NO: 21362307 NR Description: hypothetical protein D15Ertd806e [Mus musculus]
  misc_feature (125)..(397): Homolog of NCBI NO: 21362307 NR Description: hypothetical protein D15Ertd806e [Mus musculus]
  misc_feature (5)..(105): Homolog of NCBI NO: 33286946 NR Description: Unknown (protein for IMAGE:6795513) [Danio rerio]
  misc_feature (98)..(390): Homolog of NCBI NO: 33286946 NR Description: Unknown (protein for IMAGE:6795513) [Danio rerio]
  misc_feature (164)..(329): Homolog of NCBI NO: 28207607 NR Description: putative C2H2-type zinc finger protein
  misc_feature (1)..(356): Homolog of NCBI NO: 7486672 NR Description: hypothetical protein F8F16.240 - Arabidopsis
  misc_feature (1)..(407): Homolog of NCBI NO: 15224153 NR Description: putative C2H2-type zinc finger protein
  misc_feature (1)..(407): Homolog of NCBI NO: 13878013 NR Description: putative zinc finger protein [Arabidopsis
  misc_feature (1)..(407): Homolog of NCBI NO: 18417803 NR Description: putative zinc finger protein
MPGLTCNACNTEFKDDTEQKLHYKSEWHRYNLKRKVAGVPGVTEALFLARQSVLAQEKNKLGETPMLYSCGLCGKDYKSSKAHAEHLKSRGHMMQASEGTSHADEKAIVKPLPQRVVNRPPPRREVDNSENEESEDEWEEVDPEEDLVDGAAKSLTDLNVNEHGENVDMEVDDDFEELDPSCCFMCDQEHKSIENCMVHMHKHHGFFIPDVEYLKDPKGLLTYLGLKVKRDYMCLYCNDRCYPFSSLEAVRKHMEAKSHCKVHYGDGDDDEEVELDEFYDYSSSYVDDQGKQLVASCDASNNVELVGGSELIITTKSGERSSTKTLGSREFLRYYRQKPRPSLANMAITAALASRYRSMGLTTIQSREKIVRMKVLKEMNRSGVDNMRTKMAMKSNVIRNLPKNVPY

SEQ ID NO: 53289 - protein, 342 aa, Glycine max
  peptide (1)..(342): Ceres Seq. ID no. 12563811
  misc_feature (167)..(194): Pfam Name: Zinc finger, C2H2 type Pfam Description: Zinc finger, C2H2 type
  misc_feature (1)..(334): Homolog of NCBI NO: 18859899 NR Description: CG6769-PA [Drosophila melanogaster]
  misc_feature (1)..(27): Homolog of NCBI NO: 21362307 NR Description: hypothetical protein D15Ertd806e [Mus musculus]
  misc_feature (60)..(332): Homolog of NCBI NO: 21362307 NR Description: hypothetical protein D15Ertd806e [Mus musculus]
  misc_feature (1)..(40): Homolog of NCBI NO: 33286946 NR Description: Unknown (protein for IMAGE:6795513) [Danio rerio]
  misc_feature (33)..(325): Homolog of NCBI NO: 33286946 NR Description: Unknown (protein for IMAGE:6795513) [Danio rerio]
  misc_feature (99)..(264): Homolog of NCBI NO: 28207607 NR Description: putative C2H2-type zinc finger protein
  misc_feature (1)..(291): Homolog of NCBI NO: 7486672 NR Description: hypothetical protein F8F16.240 - Arabidopsis
  misc_feature (1)..(342): Homolog of NCBI NO: 15224153 NR Description: putative C2H2-type zinc finger protein
  misc_feature (1)..(342): Homolog of NCBI NO: 13878013 NR Description: putative zinc finger protein [Arabidopsis
  misc_feature (1)..(342): Homolog of NCBI NO: 18417803 NR Description: putative zinc finger protein
MLYSCGLCGKDYKSSKAHAEHLKSRGHMMQASEGTSHADEKAIVKPLPQRVVNRPPPRREVDNSENEESEDEWEEVDPEEDLVDGAAKSLTDLNVNEHGENVDMEVDDDFEELDPSCCFMCDQEHKSIENCMVHMHKHHGFFIPDVEYLKDPKGLLTYLGLKVKRDYMCLYCNDRCYPFSSLEAVRKHMEAKSHCKVHYGDGDDDEEVELDEFYDYSSSYVDDQGKQLVASCDASNNVELVGGSELIITTKSGERSSTKTLGSREFLRYYRQKPRPSLANMAITAALASRYRSMGLTTIQSREKIVRMKVLKEMNRSGVDNMRTKMAMKSNVIRNLPKNVPY

SEQ ID NO: 53290 - protein, 315 aa, Glycine max
  peptide (1)..(315): Ceres Seq. ID no. 12563812
  misc_feature (140)..(167): Pfam Name: Zinc finger, C2H2 type Pfam Description: Zinc finger, C2H2 type
  misc_feature (1)..(192): Homolog of NCBI NO: 34874602 NR Description: similar to putative Zn-finger protein C47S
  misc_feature (1)..(307): Homolog of NCBI NO: 18859899 NR Description: CG6769-PA [Drosophila melanogaster]
  misc_feature (33)..(305): Homolog of NCBI NO: 21362307 NR Description: hypothetical protein D15Ertd806e [Mus musculus]
  misc_feature (1)..(13): Homolog of NCBI NO: 33286946 NR Description: Unknown (protein for IMAGE:6795513) [Danio rerio]
  misc_feature (6)..(298): Homolog of NCBI NO: 33286946 NR Description: Unknown (protein for IMAGE:6795513) [Danio rerio]
  misc_feature (72)..(237): Homolog of NCBI NO: 28207607 NR Description: putative C2H2-type zinc finger protein
  misc_feature (1)..(264): Homolog of NCBI NO: 7486672 NR Description: hypothetical protein F8F16.240 - Arabidopsis
  misc_feature (1)..(315): Homolog of NCBI NO: 15224153 NR Description: putative C2H2-type zinc finger protein
  misc_feature (1)..(315): Homolog of NCBI NO: 13878013 NR Description: putative zinc finger protein [Arabidopsis
  misc_feature (1)..(315): Homolog of NCBI NO: 18417803 NR Description: putative zinc finger protein
MMQASEGTSHADEKAIVKPLPQRVVNRPPPRREVDNSENEESEDEWEEVDPEEDLVDGAAKSLTDLNVNEHGENVDMEVDDDFEELDPSCCFMCDQEHKSIENCMVHMHKHHGFFIPDVEYLKDPKGLLTYLGLKVKRDYMCLYCNDRCYPFSSLEAVRKHMEAKSHCKVHYGDGDDDEEVELDEFYDYSSSYVDDQGKQLVASCDASNNVELVGGSELIITTKSGERSSTKTLGSREFLRYYRQKPRPSLANMAITAALASRYRSMGLTTIQSREKIVRMKVLKEMNRSGVDNMRTKMAMKSNVIRNLPKNVPY

SEQ ID NO: 53291 - DNA, 1360 bp, Glycine max
  misc_feature (1)..(1360): Ceres Seq. ID no. 15170203
gccacaccataattttcacactcactacacctcaccaaataatgaaccatggaataccaataccacccatcatcttatggcgtctcttcctcttctcactctagccaccatcaacaagggtcaacaacaccgaaatccctctcttcacaacgcagcctcgtctcagttccctccctcaaccaccaccaccacctccacaccccgaattccaccgtctaccaccactgcctcacaaccctcaagggtcacacctcctcctacatctcctccttaaccctctccggcaaattcctctacaccggctcctccgaccgcgaaatccgctcctggaaccgcatcccagaaaactcatcaaacaacaatgacaatagcaacaccgtactcacgggaaacggtgctgttaagtcgttagtaattcagtcaaacaaacttttcagcgcgcatcaagaccacaaaatccgtgtctggaaaataagcactaacaacaacaacgataacgatcatgaccagaaatacacacacgtggccacactccccaccctcggcgaccgcgcctcgaaaatcttgatccccaagaaccaggtacaaatccgaaggcacaagaaatgcacctgggttcaccacgtggacaccgtctcggctttggccctgtccagagacggaaccttgctgtactcagtctcttgggacagaacactcaaaatctggaaaacgaaagacttcacgtgcctggagtccctcgccaacgcgcacgacgacgccatcaacgctgtcgcagtctcctacgatgggcgcgtctacaccggatcagcggacaagaaaatcaaggtgtggaagaaattcgcaggagaaaagaaacacactttaatagaaaccttggagaagcacaactctggggttaatgctttggctctaagcagcgacgagaatgttgtatattctggtgcatgcgatagggctattttggtttgggagaagaaagagggtgatgatgggaaaatgggggtggtgggtgctttaaggggacacaccaagtccattttgtgtttatctgttgtggcggatttggtgtgtagtggctctgcggatacaacgattaggatttggagaggttgtgttgattcgcatgaatactcttgtttagcggttttggaagggcacagggcttcgattaagtgcataagcgcagtggttgaccactgcaacaacaacaacaacaacacatcgcagtccgaagcattattatcttttctagtctatagtggcggtttggactgcgacattaaggtgtggcagattttacttccggctagctaaattataggacccatcataataataataataggttttttaaatt

SEQ ID NO: 53292 - protein, 422 aa, Glycine max
  peptide (1)..(422): Ceres Seq. ID no. 15170204
  misc_feature (184)..(221): Pfam Name: WD domain, G-beta repeat Pfam Description: WD domain, G-beta repeat
  misc_feature (23)..(417): Homolog of NCBI NO: 15229740 NR Description: transducin / WD-40 repeat protein family
  misc_feature (13)..(417): Homolog of NCBI NO: 15231088 NR Description: transducin / WD-40 repeat protein family
  misc_feature (71)..(422): Homolog of NCBI NO: 31126785 NR Description: putative WD repeat-protein
  misc_feature (71)..(417): Homolog of NCBI NO: 17979259 NR Description: At1g49450/F13F21_11 [Arabidopsis thaliana]
  misc_feature (71)..(422): Homolog of NCBI NO: 15230244 NR Description: transducin / WD-40 repeat protein family
  misc_feature (71)..(417): Homolog of NCBI NO: 15222143 NR Description: transducin / WD-40 repeat protein family
  misc_feature (71)..(417): Homolog of NCBI NO: 15225317 NR Description: transducin / WD-40 repeat protein family
  misc_feature (14)..(417): Homolog of NCBI NO: 18395507 NR Description: transducin / WD-40 repeat protein family
  misc_feature (41)..(421): Homolog of NCBI NO: 15240616 NR Description: transducin / WD-40 repeat protein family
  misc_feature (18)..(417): Homolog of NCBI NO: 15221675 NR Description: transducin / WD-40 repeat protein family
MEYQYHPSSYGVSSSSHSSHHQQGSTTPKSLSSQRSLVSVPSLNHHHHLHTPNSTVYHHCLTTLKGHTSSYISSLTLSGKFLYTGSSDREIRSWNRIPENSSNNNDNSNTVLTGNGAVKSLVIQSNKLFSAHQDHKIRVWKISTNNNNDNDHDQKYTHVATLPTLGDRASKILIPKNQVQIRRHKKCTWVHHVDTVSALALSRDGTLLYSVSWDRTLKIWKTKDFTCLESLANAHDDAINAVAVSYDGRVYTGSADKKIKVWKKFAGEKKHTLIETLEKHNSGVNALALSSDENVVYSGACDRAILVWEKKEGDDGKMGVVGALRGHTKSILCLSVVADLVCSGSADTTIRIWRGCVDSHEYSCLAVLEGHRASIKCISAVVDHCNNNNNNTSQSEALLSFLVYSGGLDCDIKVWQILLPAS

SEQ ID NO: 53293 - DNA, 1393 bp, Glycine max
  misc_feature (1)..(1393): Ceres Seq. ID no. 14304528
gattcaacaagagctagctccgcaagataaagaaaggtcttagaatacttgcaaacacacaaacacaaaacaccctttttccaagaacaagagcaagagcctcaacctcagagctgtgataacttgttccaatgagcatgttaggcctgagagacctagttctcatagctcaaaccccttcttcccttcaccaccaacaccaaggccaacccatttcagaaaaccagactcacactcacactccaaaccttcctttgccttcttcagcagcttctctcagtgttggctttggaattttccctctcctcactgccacaccatgtgtgccacagcctcatcaaaacaatgaggttcaagagtgtggtggtggtggtgccaatagtaacactaccaccaccaattattggaacctcaagatgtgccaagaagtgaataatcctccaaagaagggtgtgatcaacgtggctgatcatgatgatgagaagggtgtgatggagagtgaggaaaacggggtctatgggcctgactttagggtgtgccaagattgtggcaacagggctaagaaagattgcgtctttagaagatgcaggacttgctgcaagggacgtgggtatgattgtaacactcacgtgaagagcacgtggatcccctccgttcgccgccgcgagcgcgagatcacggtggcttccggtggcggtgttggcggcaatggtggttgtaagaggccaagagctgtggtggggtcatctcaaaatgccacttctcatagttccaactctaatgctacaactcctaagaccttagctactagctcttttcatcaagatgctagcttcaagcagtctttaccgggtcatgttcgtgcaccagcagtgttcaagtgccatagagtctctgccattgggaatggtgaagatgagtttgcatacttggcaacggtccagattagtgggcatgtgttcaaagggtttctctatgaccatggtgttgatgggaaaaccgcaaatgtagtcccttgtgtctcggaactgcagctgggaaacaattgcagtgggaagaacagagaatgttcctctgcaattgcaattggggttgcaaataacaatgcataccctgcttctgcgagttgaagattgctttagagatggaaagatttcaccacagagaacaaattgttttagaatcccatgttgcacctcaaattattgaaagaggtagagggctatgtacccacaaggccacgacgaggactggccaaatggtgatggatcagtttcgtgaacctcaaaagaagccagttcatttgcaattttgttttctgggaaaaatgaccatatatgctaaattggtctttaattgtgtaaatttatcttccaaaaatgtttatatctac

SEQ ID NO: 53294 - protein, 332 aa, Glycine max
  peptide (1)..(332): Ceres Seq. ID no. 14304529
  misc_feature (136)..(287): Pfam Name: Domain of unknown function (DUF702) Pfam Description: Domain of unknown function (DUF702)
  misc_feature (136)..(214): Homolog of NCBI NO: 15224110 NR Description: expressed protein [Arabidopsis thaliana]
  misc_feature (136)..(285): Homolog of NCBI NO: 15223669 NR Description: hypothetical protein [Arabidopsis thaliana]
  misc_feature (120)..(330): Homolog of NCBI NO: 15239350 NR Description: zinc finger protein SHI-related [Arabidopsis
  misc_feature (101)..(285): Homolog of NCBI NO: 15222285 NR Description: hypothetical protein [Arabidopsis thaliana]
  misc_feature (67)..(285): Homolog of NCBI NO: 15234365 NR Description: expressed protein [Arabidopsis thaliana]
  misc_feature (124)..(178): Homolog of NCBI NO: 15232522 NR Description: expressed protein [Arabidopsis thaliana]
  misc_feature (224)..(299): Homolog of NCBI NO: 15232522 NR Description: expressed protein [Arabidopsis thaliana]
  misc_feature (44)..(316): Homolog of NCBI NO: 18416839 NR Description: lateral root primordia (LRP1) [Arabidopsis
  misc_feature (44)..(310): Homolog of NCBI NO: 882341 NR Description: LRP1
  misc_feature (136)..(317): Homolog of NCBI NO: 34906658 NR Description: putative LRP(lateral root primordia) 1
MSMLGLRDLVLIAQTPSSLHHQHQGQPISENQTHTHTPNLPLPSSAASLSVGFGIFPLLTATPCVPQPHQNNEVQECGGGGANSNTTTTNYWNLKMCQEVNNPPKKGVINVADHDDEKGVMESEENGVYGPDFRVCQDCGNRAKKDCVFRRCRTCCKGRGYDCNTHVKSTWIPSVRRREREITVASGGGVGGNGGCKRPRAVVGSSQNATSHSSNSNATTPKTLATSSFHQDASFKQSLPGHVRAPAVFKCHRVSAIGNGEDEFAYLATVQISGHVFKGFLYDHGVDGKTANVVPCVSELQLGNNCSGKNRECSSAIAIGVANNNAYPASAS

SEQ ID NO: 53295 - protein, 330 aa, Glycine max
  peptide (1)..(330): Ceres Seq. ID no. 14304530
  misc_feature (134)..(285): Pfam Name: Domain of unknown function (DUF702) Pfam Description: Domain of unknown function (DUF702)
  misc_feature (134)..(212): Homolog of NCBI NO: 15224110 NR Description: expressed protein [Arabidopsis thaliana]
  misc_feature (134)..(283): Homolog of NCBI NO: 15223669 NR Description: hypothetical protein [Arabidopsis thaliana]
  misc_feature (118)..(328): Homolog of NCBI NO: 15239350 NR Description: zinc finger protein SHI-related [Arabidopsis
  misc_feature (99)..(283): Homolog of NCBI NO: 15222285 NR Description: hypothetical protein [Arabidopsis thaliana]
  misc_feature (65)..(283): Homolog of NCBI NO: 15234365 NR Description: expressed protein [Arabidopsis thaliana]
  misc_feature (122)..(176): Homolog of NCBI NO: 15232522 NR Description: expressed protein [Arabidopsis thaliana]
  misc_feature (222)..(297): Homolog of NCBI NO: 15232522 NR Description: expressed protein [Arabidopsis thaliana]
  misc_feature (42)..(314): Homolog of NCBI NO: 18416839 NR Description: lateral root primordia (LRP1) [Arabidopsis
  misc_feature (42)..(308): Homolog of NCBI NO: 882341 NR Description: LRP1
  misc_feature (134)..(315): Homolog of NCBI NO: 34906658 NR Description: putative LRP(lateral root primordia) 1
MLGLRDLVLIAQTPSSLHHQHQGQPISENQTHTHTPNLPLPSSAASLSVGFGIFPLLTATPCVPQPHQNNEVQECGGGGANSNTTTTNYWNLKMCQEVNNPPKKGVINVADHDDEKGVMESEENGVYGPDFRVCQDCGNRAKKDCVFRRCRTCCKGRGYDCNTHVKSTWIPSVRRREREITVASGGGVGGNGGCKRPRAVVGSSQNATSHSSNSNATTPKTLATSSFHQDASFKQSLPGHVRAPAVFKCHRVSAIGNGEDEFAYLATVQISGHVFKGFLYDHGVDGKTANVVPCVSELQLGNNCSGKNRECSSAIAIGVANNNAYPASAS

SEQ ID NO: 53296 - protein, 237 aa, Glycine max
  peptide (1)..(237): Ceres Seq. ID no. 14304531
  misc_feature (41)..(192): Pfam Name: Domain of unknown function (DUF702) Pfam Description: Domain of unknown function (DUF702)
  misc_feature (41)..(119): Homolog of NCBI NO: 15224110 NR Description: expressed protein [Arabidopsis thaliana]
  misc_feature (41)..(190): Homolog of NCBI NO: 15223669 NR Description: hypothetical protein [Arabidopsis thaliana]
  misc_feature (25)..(235): Homolog of NCBI NO: 15239350 NR Description: zinc finger protein SHI-related [Arabidopsis
  misc_feature (6)..(190): Homolog of NCBI NO: 15222285 NR Description: hypothetical protein [Arabidopsis thaliana]
  misc_feature (1)..(190): Homolog of NCBI NO: 15234365 NR Description: expressed protein [Arabidopsis thaliana]
  misc_feature (29)..(83): Homolog of NCBI NO: 15232522 NR Description: expressed protein [Arabidopsis thaliana]
  misc_feature (129)..(204): Homolog of NCBI NO: 15232522 NR Description: expressed protein [Arabidopsis thaliana]
  misc_feature (1)..(221): Homolog of NCBI NO: 18416839 NR Description: lateral root primordia (LRP1) [Arabidopsis
  misc_feature (1)..(215): Homolog of NCBI NO: 882341 NR Description: LRP1
  misc_feature (41)..(222): Homolog of NCBI NO: 34906658 NR Description: putative LRP(lateral root primordia) 1
MCQEVNNPPKKGVINVADHDDEKGVMESEENGVYGPDFRVCQDCGNRAKKDCVFRRCRTCCKGRGYDCNTHVKSTWIPSVRRREREITVASGGGVGGNGGCKRPRAVVGSSQNATSHSSNSNATTPKTLATSSFHQDASFKQSLPGHVRAPAVFKCHRVSAIGNGEDEFAYLATVQISGHVFKGFLYDHGVDGKTANVVPCVSELQLGNNCSGKNRECSSAIAIGVANNNAYPASAS

SEQ ID NO: 53297 - DNA, 1448 bp, Glycine max
  misc_feature (1)..(1448): Ceres Seq. ID no. 14304565
tatatatatatattaaaatctcagatatataattatatgacttaaatttaattttttcactctcaatcagatatcctgctgttatatgatatctcatataatatatatttgtgtgtcaacttaacccttactacaagatttaaatgcgtaggagttttttcaagcatcgggaccatcattctactctttggtttgtggcggttgcgtaaagttgtaaggaaaaagatagcaaagaaacgcaaagaaaagttcttcaaacaaaatggaggattgttgttagaacaaagactatctactggtgaagttaatgttgacaaaactaaactctttagcttaaaggaattagggaaggccactgatcactttaatataaacagaatacttggaaaaggaggtcaaggtacagtttacaaaggtatgttagtagatggaaaaattgttgcagtgaaaaaatttaaggtcaacggaaatgttgaagaattcatcaacgaatttgtcattctttcacaaattaaccacagaaatgtggttaagttgttgggatgttgtttggagactgaaatccctttgcttgtttatgaattcattcccaatggtaacctttatgaatatttacatggacaaaatgatgagttaccaatgacatgggatatgcgtttgagaattgccactgaagtggctggagctctattttacttgcactcagctgcttctcaacccatttatcatagagatgtgaagtcaacaaatatattattggatgagaagtataaggcaaaagtagcagactttggggcatcaagaatggtttccattgaagccactcacctcactactgcagttcaaggaacttttggatacttagatcctgaatattttcatacaagtcaattgacagagaagagtgatgtctacagctttggagtggttcttgttgaacttttaacaggacaaaaaccaatatcctcagtgaacgaacaaggacttcaaagtttagcttcatattttcttctttgtatggaggaaaatcgtttttttgatattgttgatgcaagagtcatgcaggaagtggagaaagaacacataattgtagttgccaatcttgcaagaagatgcttacagttgaatgggagaaagcgaccaactatgaaagaagtcacattagaattggaaagtatccaaaaactggaaaaccagtgtaatgcacaagagcaacaagaagaacttgagcttgctggaaatgaagatagccaattttgggctgcgtattctacaacttcgactgcagggcaaacttcagacagcaaaacatcaaccttggagattatgcctattcttatcaaataattgttgaattctcttaacttgttttgttgtgtgtaaaattaaaaataaaaataaaaacatatggacgaatttaacgttcaaaagcataattatggtatgat

SEQ ID NO: 53298 - protein, 309 aa, Glycine max
  peptide (1)..(309): Ceres Seq. ID no. 14304566
  misc_feature (1)..(306): Homolog of NCBI NO: 25287658 NR Description: hypothetical protein T24D18.21 - Arabidopsis
  misc_feature (1)..(271): Homolog of NCBI NO: 15219132 NR Description: WAK-like kinase (WLK) [Arabidopsis thaliana]
  misc_feature (1)..(279): Homolog of NCBI NO: 15222427 NR Description: WAK-like kinase (WLK) [Arabidopsis thaliana]
  misc_feature (1)..(307): Homolog of NCBI NO: 30699443 NR Description: WAK-like kinase (WLK) [Arabidopsis thaliana]
  misc_feature (1)..(307): Homolog of NCBI NO: 15219445 NR Description: WAK-like kinase (WLK) [Arabidopsis thaliana]
  misc_feature (1)..(300): Homolog of NCBI NO: 25405037 NR Description: protein F20B17.10 [imported] - Arabidopsis
  misc_feature (1)..(306): Homolog of NCBI NO: 15219447 NR Description: WAK-like kinase (WLK) [Arabidopsis thaliana]
  misc_feature (1)..(307): Homolog of NCBI NO: 25405037 NR Description: protein F20B17.10 [imported] - Arabidopsis
  misc_feature (1)..(279): Homolog of NCBI NO: 25287654 NR Description: protein F18O14.11 [imported] - Arabidopsis
  misc_feature (1)..(306): Homolog of NCBI NO: 15223546 NR Description: WAK-like kinase (WLK) [Arabidopsis thaliana]
MLVDGKIVAVKKFKVNGNVEEFINEFVILSQINHRNVVKLLGCCLETEIPLLVYEFIPNGNLYEYLHGQNDELPMTWDMRLRIATEVAGALFYLHSAASQPIYHRDVKSTNILLDEKYKAKVADFGASRMVSIEATHLTTAVQGTFGYLDPEYFHTSQLTEKSDVYSFGVVLVELLTGQKPISSVNEQGLQSLASYFLLCMEENRFFDIVDARVMQEVEKEHIIVVANLARRCLQLNGRKRPTMKEVTLELESIQKLENQCNAQEQQEELELAGNEDSQFWAAYSTTSTAGQTSDSKTSTLEIMPILIK

SEQ ID NO: 53299 - protein, 235 aa, Glycine max
  peptide (1)..(235): Ceres Seq. ID no. 14304567
  misc_feature (1)..(232): Homolog of NCBI NO: 25287658 NR Description: hypothetical protein T24D18.21 - Arabidopsis
  misc_feature (1)..(197): Homolog of NCBI NO: 15219132 NR Description: WAK-like kinase (WLK) [Arabidopsis thaliana]
  misc_feature (1)..(205): Homolog of NCBI NO: 15222427 NR Description: WAK-like kinase (WLK) [Arabidopsis thaliana]
  misc_feature (1)..(233): Homolog of NCBI NO: 30699443 NR Description: WAK-like kinase (WLK) [Arabidopsis thaliana]
  misc_feature (1)..(233): Homolog of NCBI NO: 15219445 NR Description: WAK-like kinase (WLK) [Arabidopsis thaliana]
  misc_feature (1)..(226): Homolog of NCBI NO: 25405037 NR Description: protein F20B17.10 [imported] - Arabidopsis
  misc_feature (1)..(232): Homolog of NCBI NO: 15219447 NR Description: WAK-like kinase (WLK) [Arabidopsis thaliana]
  misc_feature (1)..(233): Homolog of NCBI NO: 25405037 NR Description: protein F20B17.10 [imported] - Arabidopsis
  misc_feature (1)..(205): Homolog of NCBI NO: 25287654 NR Description: protein F18O14.11 [imported] - Arabidopsis
  misc_feature (1)..(232): Homolog of NCBI NO: 15223546 NR Description: WAK-like kinase (WLK) [Arabidopsis thaliana]
MTWDMRLRIATEVAGALFYLHSAASQPIYHRDVKSTNILLDEKYKAKVADFGASRMVSIEATHLTTAVQGTFGYLDPEYFHTSQLTEKSDVYSFGVVLVELLTGQKPISSVNEQGLQSLASYFLLCMEENRFFDIVDARVMQEVEKEHIIVVANLARRCLQLNGRKRPTMKEVTLELESIQKLENQCNAQEQQEELELAGNEDSQFWAAYSTTSTAGQTSDSKTSTLEIMPILIK

SEQ ID NO: 53300 - protein, 231 aa, Glycine max
  peptide (1)..(231): Ceres Seq. ID no. 14304568
  misc_feature (1)..(228): Homolog of NCBI NO: 25287658 NR Description: hypothetical protein T24D18.21 - Arabidopsis
  misc_feature (1)..(193): Homolog of NCBI NO: 15219132 NR Description: WAK-like kinase (WLK) [Arabidopsis thaliana]
  misc_feature (1)..(201): Homolog of NCBI NO: 15222427 NR Description: WAK-like kinase (WLK) [Arabidopsis thaliana]
  misc_feature (1)..(229): Homolog of NCBI NO: 30699443 NR Description: WAK-like kinase (WLK) [Arabidopsis thaliana]
  misc_feature (1)..(229): Homolog of NCBI NO: 15219445 NR Description: WAK-like kinase (WLK) [Arabidopsis thaliana]
  misc_feature (1)..(222): Homolog of NCBI NO: 25405037 NR Description: protein F20B17.10 [imported] - Arabidopsis
  misc_feature (1)..(228): Homolog of NCBI NO: 15219447 NR Description: WAK-like kinase (WLK) [Arabidopsis thaliana]
  misc_feature (1)..(229): Homolog of NCBI NO: 25405037 NR Description: protein F20B17.10 [imported] - Arabidopsis
  misc_feature (1)..(201): Homolog of NCBI NO: 25287654 NR Description: protein F18O14.11 [imported] - Arabidopsis
  misc_feature (1)..(228): Homolog of NCBI NO: 15223546 NR Description: WAK-like kinase (WLK) [Arabidopsis thaliana]
MRLRIATEVAGALFYLHSAASQPIYHRDVKSTNILLDEKYKAKVADFGASRMVSIEATHLTTAVQGTFGYLDPEYFHTSQLTEKSDVYSFGVVLVELLTGQKPISSVNEQGLQSLASYFLLCMEENRFFDIVDARVMQEVEKEHIIVVANLARRCLQLNGRKRPTMKEVTLELESIQKLENQCNAQEQQEELELAGNEDSQFWAAYSTTSTAGQTSDSKTSTLEIMPILIK

SEQ ID NO: 53301 - DNA, 1286 bp, Glycine max
  misc_feature (1)..(1286): Ceres Seq. ID no. 14304654
agaaaggcctaatccagctgagaaaaaaaatggatgtagagaaagccttccacatgactggaggagttggcaaaactagctatgccaagaattcctcactacagaagaaggaatctgataaagtgaagcacataatcatacaaacagttgaggagctttaccttgcaaccactccaaagagcataggcattgctgatttgggatgttcctctggaccaaacaccctatcaatcatcaaagacatctttcaggccatccaaggcacaagccaaaggatcatgcaccactccacagagttcagggtgtacttcaatgatcttccaacaaatgacttcaattcaatcttcaaggccctcccagagttccaaaagttgcttaggcaagacaggaaaaatgggttcccttccattttcatgggaggctaccctggctcattttatggaagactgttcccaaacagttacttgcactttgtccactcctccttcagtcttcactggctttcaagggttcctccatcactctatgatgagcacaaaaggccattgaacaaagggtgtgtttacatttgtgaatcaagccctgaagtggtgtctcaagcatactatcaacaattccaagaagatttttccttgttccttaggtcaaggtcagaagaactagtagtaggtggaagaatggtgctgatatttttggggagaaggggcccagaacatgttgacagaggcaactctttcttctgggagattctttcccgttcatttgctattctagtctcacagggagaagtagagcaagagaagtttgattcatatgatgtacatttctatgcaccatcaagggaagagatagaagaagaggtgagaaaagaagggtcattgaagttggagaggctagagatgtttgaaatggacaagagtcacaatgagcatggaagtgatgagagctatggcacacaggttgctgtggcagttagggccattcaagaatcaatgatctcacaccactttggagaagggatcttggaaagtttgtttcagaattttgcaaagttggtagatgaagaaatggctaaggaggatattagaccaatctcttttgttctggttctcagaaaaatatgatactatgattattattattattatacaaaaatattaattatatagtaatattaattattttggtttgcagtaattagacgtgtttaaattgcagccatttactgcccatcactgtaatcatcatgatcagtctaatgtaaagtgttggtgtttcggtttaag

SEQ ID NO: 53302 - protein, 373 aa, Glycine max
  peptide (1)..(373): Ceres Seq. ID no. 14304655
  misc_feature (46)..(372): Pfam Name: SAM dependent carboxyl methyltransferase Pfam Description: SAM dependent carboxyl methyltransferase
  misc_feature (14)..(372): Homolog of NCBI NO: 37904506 NR Description: methyl transferase [Arabidopsis lyrata subsp.
  misc_feature (10)..(372): Homolog of NCBI NO: 13366161 NR Description: S-adenosyl-L-methionine:salicylic acid carboxyl
  misc_feature (10)..(354): Homolog of NCBI NO: 15223601 NR Description: S-adenosyl-L-methionine:jasmonic acid carboxyl
  misc_feature (10)..(354): Homolog of NCBI NO: 13676829 NR Description: S-adenosyl-L-methionine:jasmonic acid carboxyl
  misc_feature (10)..(372): Homolog of NCBI NO: 34809619 NR Description: Chain X, Crystal Structure Of Salicylic Acid
  misc_feature (8)..(362): Homolog of NCBI NO: 23957318 NR Description: S-adenosyl-L-methionine:salicylic acid
  misc_feature (10)..(372): Homolog of NCBI NO: 13235641 NR Description: S-adenosyl-L-methionine:salicylic acid carboxyl
  misc_feature (10)..(373): Homolog of NCBI NO: 34911508 NR Description: putative S-adenosyl-L-methionine:salicylic acid
  misc_feature (10)..(373): Homolog of NCBI NO: 34911486 NR Description: putative S-adenosyl-L-methionine:salicylic acid
  misc_feature (9)..(372): Homolog of NCBI NO: 15234420 NR Description: S-adenosyl-L-methionine:carboxyl
KGLIQLRKKMDVEKAFHMTGGVGKTSYAKNSSLQKKESDKVKHIIIQTVEELYLATTPKSIGIADLGCSSGPNTLSIIKDIFQAIQGTSQRIMHHSTEFRVYFNDLPTNDFNSIFKALPEFQKLLRQDRKNGFPSIFMGGYPGSFYGRLFPNSYLHFVHSSFSLHWLSRVPPSLYDEHKRPLNKGCVYICESSPEVVSQAYYQQFQEDFSLFLRSRSEELVVGGRMVLIFLGRRGPEHVDRGNSFFWEILSRSFAILVSQGEVEQEKFDSYDVHFYAPSREEIEEEVRKEGSLKLERLEMFEMDKSHNEHGSDESYGTQVAVAVRAIQESMISHHFGEGILESLFQNFAKLVDEEMAKEDIRPISFVLVLRKI

SEQ ID NO: 53303 - protein, 364 aa, Glycine max
  peptide (1)..(364): Ceres Seq. ID no. 14304656
  misc_feature (37)..(363): Pfam Name: SAM dependent carboxyl methyltransferase Pfam Description: SAM dependent carboxyl methyltransferase
  misc_feature (5)..(363): Homolog of NCBI NO: 37904506 NR Description: methyl transferase [Arabidopsis lyrata subsp.
  misc_feature (1)..(363): Homolog of NCBI NO: 13366161 NR Description: S-adenosyl-L-methionine:salicylic acid carboxyl
  misc_feature (1)..(345): Homolog of NCBI NO: 15223601 NR Description: S-adenosyl-L-methionine:jasmonic acid carboxyl
  misc_feature (1)..(345): Homolog of NCBI NO: 13676829 NR Description: S-adenosyl-L-methionine:jasmonic acid carboxyl
  misc_feature (1)..(363): Homolog of NCBI NO: 34809619 NR Description: Chain X, Crystal Structure Of Salicylic Acid
  misc_feature (1)..(353): Homolog of NCBI NO: 23957318 NR Description: S-adenosyl-L-methionine:salicylic acid
  misc_feature (1)..(363): Homolog of NCBI NO: 13235641 NR Description: S-adenosyl-L-methionine:salicylic acid carboxyl
  misc_feature (1)..(364): Homolog of NCBI NO: 34911508 NR Description: putative S-adenosyl-L-methionine:salicylic acid
  misc_feature (1)..(364): Homolog of NCBI NO: 34911486 NR Description: putative S-adenosyl-L-methionine:salicylic acid
  misc_feature (1)..(363): Homolog of NCBI NO: 15234420 NR Description: S-adenosyl-L-methionine:carboxyl
MDVEKAFHMTGGVGKTSYAKNSSLQKKESDKVKHIIIQTVEELYLATTPKSIGIADLGCSSGPNTLSIIKDIFQAIQGTSQRIMHHSTEFRVYFNDLPTNDFNSIFKALPEFQKLLRQDRKNGFPSIFMGGYPGSFYGRLFPNSYLHFVHSSFSLHWLSRVPPSLYDEHKRPLNKGCVYICESSPEVVSQAYYQQFQEDFSLFLRSRSEELVVGGRMVLIFLGRRGPEHVDRGNSFFWEILSRSFAILVSQGEVEQEKFDSYDVHFYAPSREEIEEEVRKEGSLKLERLEMFEMDKSHNEHGSDESYGTQVAVAVRAIQESMISHHFGEGILESLFQNFAKLVDEEMAKEDIRPISFVLVLRKI

SEQ ID NO: 53304 - protein, 356 aa, Glycine max
  peptide (1)..(356): Ceres Seq. ID no. 14304657
  misc_feature (29)..(355): Pfam Name: SAM dependent carboxyl methyltransferase Pfam Description: SAM dependent carboxyl methyltransferase
  misc_feature (1)..(355): Homolog of NCBI NO: 37904506 NR Description: methyl transferase [Arabidopsis lyrata subsp.
  misc_feature (1)..(355): Homolog of NCBI NO: 13366161 NR Description: S-adenosyl-L-methionine:salicylic acid carboxyl
  misc_feature (1)..(337): Homolog of NCBI NO: 15223601 NR Description: S-adenosyl-L-methionine:jasmonic acid carboxyl
  misc_feature (1)..(337): Homolog of NCBI NO: 13676829 NR Description: S-adenosyl-L-methionine:jasmonic acid carboxyl
  misc_feature (1)..(355): Homolog of NCBI NO: 34809619 NR Description: Chain X, Crystal Structure Of Salicylic Acid
  misc_feature (1)..(345): Homolog of NCBI NO: 23957318 NR Description: S-adenosyl-L-methionine:salicylic acid
  misc_feature (1)..(355): Homolog of NCBI NO: 13235641 NR Description: S-adenosyl-L-methionine:salicylic acid carboxyl
  misc_feature (1)..(356): Homolog of NCBI NO: 34911508 NR Description: putative S-adenosyl-L-methionine:salicylic acid
  misc_feature (1)..(356): Homolog of NCBI NO: 34911486 NR Description: putative S-adenosyl-L-methionine:salicylic acid
  misc_feature (1)..(355): Homolog of NCBI NO: 15234420 NR Description: S-adenosyl-L-methionine:carboxyl
MTGGVGKTSYAKNSSLQKKESDKVKHIIIQTVEELYLATTPKSIGIADLGCSSGPNTLSIIKDIFQAIQGTSQRIMHHSTEFRVYFNDLPTNDFNSIFKALPEFQKLLRQDRKNGFPSIFMGGYPGSFYGRLFPNSYLHFVHSSFSLHWLSRVPPSLYDEHKRPLNKGCVYICESSPEVVSQAYYQQFQEDFSLFLRSRSEELVVGGRMVLIFLGRRGPEHVDRGNSFFWEILSRSFAILVSQGEVEQEKFDSYDVHFYAPSREEIEEEVRKEGSLKLERLEMFEMDKSHNEHGSDESYGTQVAVAVRAIQESMISHHFGEGILESLFQNFAKLVDEEMAKEDIRPISFVLVLRKI

SEQ ID NO: 53305 - DNA, 1422 bp, Glycine max
  misc_feature (1)..(1422): Ceres Seq. ID no. 13593889
ccccccccaatggctttagaaacaatgttgaagcttctttaaataacagtgaattacggaaagattcagccattctaataaatgagatgggggtcaatggagattgttatgatggtagaaacaaggaagttaacccagttcttggcgaaagctcagaatgggaaattcaatgggaggatcttgatattggtgagcgtattggtattggttcttatggtgaagtttatcgtgctgaatgcaatggcactgaagttgctgtaaagaagtttctggaccaagatttctctggtgatgcgctagctcagttcaaatctgaagttgagatcatgataaggctgcggcatcctaatgtcgtgctcttcatgggagctattactcgctccccacatttctctatcttgacagagtttcttccaagaggcagtttatataggctattgcatcgtcccaatcttcgacttgatgagaagaaacggttgcgcatggctctagatgtggctaagggaatgaattacttgcacacgagccatcctcccattgtccaccgagatttaaagtctccaaatcttcttgttgacaggcattgggttgttaaggtctgtgattttggtctgtcacgaatgaagcaccatacatatttgtcatccaaatcctgtgctggaacgcctgagtggatggcaccagaagtcttgagaaatgagccagccaatgagaagtgtgatgtgtatagttttggtgtgatcttgtgggagttgactaccacaagaattccctggcaaggtttgaacccaatgcaggttgttggagctgttggattccaaaataaacggcttgaaattccagaagatgtcaatccagtagtggcacaaataatacgtgattgctggcaaacggagccacacttgcggccatcattctcacaactgatgtctcgtctttaccgacttcaacatttgattgtcccaaaaacaagctcaacacattaaacgaagttgtctataacatagctattgtaataatacttaaagctgttccttggttcaaagaaccagaacagctaaagtttttcttttcttttctttttttcgtccatcttgacatatcaagatattgctgaactggtaagtgtcaggtacattctaagttgggactggacacaacccattcagaaaagagcagggtccctccccaatatctgcataagtgcagtggaggtttagttggagtaggtacaaatgaagaatccccagagggaagaaaggcaagaaacataaaggaaaaaaaaaaagtacaaaattattctttgtctgtagaggtcttatttggaattgtaacatgcgatctctcaggttctcatgcaaatgtaaaaaagaaaaagaacaaaaaaaaaacagaaaaaaagaacattatgtatttcccgtt

SEQ ID NO: 53306 - protein, 327 aa, Glycine max
  peptide (1)..(327): Ceres Seq. ID no. 13593890
  misc_feature (60)..(312): Pfam Name: Protein kinase domain Pfam Description: Protein kinase domain
  misc_feature (52)..(321): Homolog of NCBI NO: 18390931 NR Description: protein kinase -related [Arabidopsis thaliana]
  misc_feature (52)..(321): Homolog of NCBI NO: 7488198 NR Description: probable serine/threonine-specific protein kinase
  misc_feature (42)..(321): Homolog of NCBI NO: 15485672 NR Description: TCTR2 protein [Lycopersicon esculentum]
  misc_feature (39)..(321): Homolog of NCBI NO: 11127921 NR Description: EDR1 [Oryza sativa]
  misc_feature (40)..(327): Homolog of NCBI NO: 11127923 NR Description: EDR1 [Hordeum vulgare]
  misc_feature (24)..(321): Homolog of NCBI NO: 38603558 NR Description: enhanced disease resistance 1
  misc_feature (42)..(321): Homolog of NCBI NO: 7489058 NR Description: probable protein kinase TCTR2 - tomato
  misc_feature (30)..(297): Homolog of NCBI NO: 11358502 NR Description: MAP3K delta-1 protein kinase - Arabidopsis
  misc_feature (30)..(326): Homolog of NCBI NO: 25387032 NR Description: probable mitogen-activated protein kinase MAP3K
  misc_feature (30)..(326): Homolog of NCBI NO: 22326737 NR Description: MAP3K delta-1 protein kinase [Arabidopsis
PPNGFRNNVEASLNNSELRKDSAILINEMGVNGDCYDGRNKEVNPVLGESSEWEIQWEDLDIGERIGIGSYGEVYRAECNGTEVAVKKFLDQDFSGDALAQFKSEVEIMIRLRHPNVVLFMGAITRSPHFSILTEFLPRGSLYRLLHRPNLRLDEKKRLRMALDVAKGMNYLHTSHPPIVHRDLKSPNLLVDRHWVVKVCDFGLSRMKHHTYLSSKSCAGTPEWMAPEVLRNEPANEKCDVYSFGVILWELTTTRIPWQGLNPMQVVGAVGFQNKRLEIPEDVNPVVAQIIRDCWQTEPHLRPSFSQLMSRLYRLQHLIVPKTSSTH

SEQ ID NO: 53307 - protein, 299 aa, Glycine max
  peptide (1)..(299): Ceres Seq. ID no. 13593891
  misc_feature (32)..(284): Pfam Name: Protein kinase domain Pfam Description: Protein kinase domain
  misc_feature (24)..(293): Homolog of NCBI NO: 18390931 NR Description: protein kinase -related [Arabidopsis thaliana]
  misc_feature (24)..(293): Homolog of NCBI NO: 7488198 NR Description: probable serine/threonine-specific protein kinase
  misc_feature (14)..(293): Homolog of NCBI NO: 15485672 NR Description: TCTR2 protein [Lycopersicon esculentum]
  misc_feature (11)..(293): Homolog of NCBI NO: 11127921 NR Description: EDR1 [Oryza sativa]
  misc_feature (12)..(299): Homolog of NCBI NO: 11127923 NR Description: EDR1 [Hordeum vulgare]
  misc_feature (1)..(293): Homolog of NCBI NO: 38603558 NR Description: enhanced disease resistance 1
  misc_feature (14)..(293): Homolog of NCBI NO: 7489058 NR Description: probable protein kinase TCTR2 - tomato
  misc_feature (2)..(269): Homolog of NCBI NO: 11358502 NR Description: MAP3K delta-1 protein kinase - Arabidopsis
  misc_feature (2)..(298): Homolog of NCBI NO: 25387032 NR Description: probable mitogen-activated protein kinase MAP3K
  misc_feature (2)..(298): Homolog of NCBI NO: 22326737 NR Description: MAP3K delta-1 protein kinase [Arabidopsis
MGVNGDCYDGRNKEVNPVLGESSEWEIQWEDLDIGERIGIGSYGEVYRAECNGTEVAVKKFLDQDFSGDALAQFKSEVEIMIRLRHPNVVLFMGAITRSPHFSILTEFLPRGSLYRLLHRPNLRLDEKKRLRMALDVAKGMNYLHTSHPPIVHRDLKSPNLLVDRHWVVKVCDFGLSRMKHHTYLSSKSCAGTPEWMAPEVLRNEPANEKCDVYSFGVILWELTTTRIPWQGLNPMQVVGAVGFQNKRLEIPEDVNPVVAQIIRDCWQTEPHLRPSFSQLMSRLYRLQHLIVPKTSSTH

SEQ ID NO: 53308 - protein, 219 aa, Glycine max
  peptide (1)..(219): Ceres Seq. ID no. 13593892
  misc_feature (1)..(204): Pfam Name: Protein kinase domain Pfam Description: Protein kinase domain
  misc_feature (1)..(213): Homolog of NCBI NO: 18390931 NR Description: protein kinase -related [Arabidopsis thaliana]
  misc_feature (1)..(213): Homolog of NCBI NO: 7488198 NR Description: probable serine/threonine-specific protein kinase
  misc_feature (1)..(213): Homolog of NCBI NO: 15485672 NR Description: TCTR2 protein [Lycopersicon esculentum]
  misc_feature (1)..(213): Homolog of NCBI NO: 11127921 NR Description: EDR1 [Oryza sativa]
  misc_feature (1)..(219): Homolog of NCBI NO: 11127923 NR Description: EDR1 [Hordeum vulgare]
  misc_feature (1)..(213): Homolog of NCBI NO: 38603558 NR Description: enhanced disease resistance 1
  misc_feature (1)..(213): Homolog of NCBI NO: 7489058 NR Description: probable protein kinase TCTR2 - tomato
  misc_feature (1)..(189): Homolog of NCBI NO: 11358502 NR Description: MAP3K delta-1 protein kinase - Arabidopsis
  misc_feature (1)..(218): Homolog of NCBI NO: 25387032 NR Description: probable mitogen-activated protein kinase MAP3K
  misc_feature (1)..(218): Homolog of NCBI NO: 22326737 NR Description: MAP3K delta-1 protein kinase [Arabidopsis
MIRLRHPNVVLFMGAITRSPHFSILTEFLPRGSLYRLLHRPNLRLDEKKRLRMALDVAKGMNYLHTSHPPIVHRDLKSPNLLVDRHWVVKVCDFGLSRMKHHTYLSSKSCAGTPEWMAPEVLRNEPANEKCDVYSFGVILWELTTTRIPWQGLNPMQVVGAVGFQNKRLEIPEDVNPVVAQIIRDCWQTEPHLRPSFSQLMSRLYRLQHLIVPKTSSTH

SEQ ID NO: 53309 - DNA, 1168 bp, Glycine max
  misc_feature (1)..(1168): Ceres Seq. ID no. 12562983
aatcgaattgaatcgaagagtgaagaaagatgcttccctcatttctaagcctggtgtcagtgtacagcctctacctccgacgctgcttcacgggcgcggggctctcatcgcagacgcttagagtggacgacgaatccacgctccacttctgggccccgacaaacccaacggcccagaagccttccctggttctgatccacgggtttgggccggagtccatatggcagtggcgcaaacaggtccaattcttagcccctcacttcaacgtgtacgttccggacctaatattcttcggaggatcgagcaccaagtccagcgaaaggagcgaaacgtttcaggcagcgtcggtggggaagcttttggacaagttggaggttgagaagttccacgtggtggggacgagttatgggggcatggtggcttacaatttggccaagatgttgggtgaagacagggtgcaaaaagtggttattgctagctccggtgtgaacatgatcaagagcagcaacgtggcgttggtgcagagggcgcaactggagaagattgaggatctgatgctgcctcctacgccacaacacttgcgaatattgatgaagttctccatccacaagcctccccaactcttgcctgattttttactccgggacttcttggctaaattatacggagaaaataggaaggaaaaaatggagcttctgaaagggttaaccgtcggaagggatgatacttcaagaatttcacctcttcaacaagaggttctcatagtctggggagaagaagaccgaatatttccgctgaagttggcccacgaactaaaagagataatcagtaaaaaggcaagattggaattgataaaggaggcatcccatgtgcctcaaatggaaaagccaagagaattcaacaacattctcctaaatttcttacaggagcattcttgagtaattttttaaaagcattgttatatacattaggagcataatctgtctacatgtgaacgagaagtgctacaacaagcgaatacgaaaaccaaaactcgcatgctattgttagagtgacctctaatattttatatatttctgcaattatactattgttttaaattatacttgggaatcccccacaagttaactagtccataaagtagttataagacagatttttttgcgtc

SEQ ID NO: 53310 - protein, 302 aa, Glycine max
  peptide (1)..(302): Ceres Seq. ID no. 12562984
  misc_feature (78)..(295): Pfam Name: alpha/beta hydrolase fold Pfam Description: alpha/beta hydrolase fold
  misc_feature (49)..(298): Homolog of NCBI NO: 34896168 NR Description: contains ESTs
  misc_feature (17)..(298): Homolog of NCBI NO: 27436745 NR Description: Hypothetical protein [Oryza sativa (japonica
  misc_feature (1)..(207): Homolog of NCBI NO: 13374854 NR Description: putative protein [Arabidopsis thaliana]
  misc_feature (102)..(298): Homolog of NCBI NO: 26451507 NR Description: unknown protein [Arabidopsis thaliana]
  misc_feature (6)..(298): Homolog of NCBI NO: 27436746 NR Description: Unknown protein [Oryza sativa (japonica
  misc_feature (211)..(298): Homolog of NCBI NO: 24059850 NR Description: hydrolase-like protein [Oryza sativa (japonica
  misc_feature (2)..(211): Homolog of NCBI NO: 24059850 NR Description: hydrolase-like protein [Oryza sativa (japonica
  misc_feature (53)..(299): Homolog of NCBI NO: 21592805 NR Description: unknown [Arabidopsis thaliana]
  misc_feature (2)..(299): Homolog of NCBI NO: 30689631 NR Description: hydrolase, alpha/beta fold family [Arabidopsis
  misc_feature (1)..(298): Homolog of NCBI NO: 22326938 NR Description: similar to putative hydrolase; protein id:
MLPSFLSLVSVYSLYLRRCFTGAGLSSQTLRVDDESTLHFWAPTNPTAQKPSLVLIHGFGPESIWQWRKQVQFLAPHFNVYVPDLIFFGGSSTKSSERSETFQAASVGKLLDKLEVEKFHVVGTSYGGMVAYNLAKMLGEDRVQKVVIASSGVNMIKSSNVALVQRAQLEKIEDLMLPPTPQHLRILMKFSIHKPPQLLPDFLLRDFLAKLYGENRKEKMELLKGLTVGRDDTSRISPLQQEVLIVWGEEDRIFPLKLAHELKEIISKKARLELIKEASHVPQMEKPREFNNILLNFLQEHS

SEQ ID NO: 53311 - protein, 174 aa, Glycine max
  peptide (1)..(174): Ceres Seq. ID no. 12562985
  misc_feature (1)..(167): Pfam Name: alpha/beta hydrolase fold Pfam Description: alpha/beta hydrolase fold
  misc_feature (1)..(170): Homolog of NCBI NO: 34896168 NR Description: contains ESTs
  misc_feature (1)..(170): Homolog of NCBI NO: 27436745 NR Description: Hypothetical protein [Oryza sativa (japonica
  misc_feature (1)..(79): Homolog of NCBI NO: 13374854 NR Description: putative protein [Arabidopsis thaliana]
  misc_feature (1)..(170): Homolog of NCBI NO: 26451507 NR Description: unknown protein [Arabidopsis thaliana]
  misc_feature (1)..(170): Homolog of NCBI NO: 27436746 NR Description: Unknown protein [Oryza sativa (japonica
  misc_feature (83)..(170): Homolog of NCBI NO: 24059850 NR Description: hydrolase-like protein [Oryza sativa (japonica
  misc_feature (1)..(83): Homolog of NCBI NO: 24059850 NR Description: hydrolase-like protein [Oryza sativa (japonica
  misc_feature (1)..(171): Homolog of NCBI NO: 21592805 NR Description: unknown [Arabidopsis thaliana]
  misc_feature (1)..(171): Homolog of NCBI NO: 30689631 NR Description: hydrolase, alpha/beta fold family [Arabidopsis
  misc_feature (1)..(170): Homolog of NCBI NO: 22326938 NR Description: similar to putative hydrolase; protein id:
MVAYNLAKMLGEDRVQKVVIASSGVNMIKSSNVALVQRAQLEKIEDLMLPPTPQHLRILMKFSIHKPPQLLPDFLLRDFLAKLYGENRKEKMELLKGLTVGRDDTSRISPLQQEVLIVWGEEDRIFPLKLAHELKEIISKKARLELIKEASHVPQMEKPREFNNILLNFLQEHS

SEQ ID NO: 53312 - protein, 166 aa, Glycine max
  peptide (1)..(166): Ceres Seq. ID no. 12562986
  misc_feature (1)..(159): Pfam Name: alpha/beta hydrolase fold Pfam Description: alpha/beta hydrolase fold
  misc_feature (1)..(162): Homolog of NCBI NO: 34896168 NR Description: contains ESTs
  misc_feature (1)..(162): Homolog of NCBI NO: 27436745 NR Description: Hypothetical protein [Oryza sativa (japonica
  misc_feature (1)..(71): Homolog of NCBI NO: 13374854 NR Description: putative protein [Arabidopsis thaliana]
  misc_feature (1)..(162): Homolog of NCBI NO: 26451507 NR Description: unknown protein [Arabidopsis thaliana]
  misc_feature (1)..(162): Homolog of NCBI NO: 27436746 NR Description: Unknown protein [Oryza sativa (japonica
  misc_feature (75)..(162): Homolog of NCBI NO: 24059850 NR Description: hydrolase-like protein [Oryza sativa (japonica
  misc_feature (1)..(75): Homolog of NCBI NO: 24059850 NR Description: hydrolase-like protein [Oryza sativa (japonica
  misc_feature (1)..(163): Homolog of NCBI NO: 21592805 NR Description: unknown [Arabidopsis thaliana]
  misc_feature (1)..(163): Homolog of NCBI NO: 30689631 NR Description: hydrolase, alpha/beta fold family [Arabidopsis
  misc_feature (1)..(162): Homolog of NCBI NO: 22326938 NR Description: similar to putative hydrolase; protein id:
MLGEDRVQKVVIASSGVNMIKSSNVALVQRAQLEKIEDLMLPPTPQHLRILMKFSIHKPPQLLPDFLLRDFLAKLYGENRKEKMELLKGLTVGRDDTSRISPLQQEVLIVWGEEDRIFPLKLAHELKEIISKKARLELIKEASHVPQMEKPREFNNILLNFLQEHS

SEQ ID NO: 53313 - DNA, 1360 bp, Glycine max
  misc_feature (1)..(1360): Ceres Seq. ID no. 14304628
aagaaatatttggttatcaaactaggaaagagatcaaaatgaagctatttcaatgggtgcatcgaaaacttcggcagaatagtatagatcctttcaaggatttcacacttggaaatccctgtacttgccttacagtgcagccaacacttgacaatcaatattcccagtcaaagccaagcttcagctccacaaatcaacccagtttctcaaagccacaccatcaggaaaatcaaacatcttactctgggttggttgatagcagagaagataagtctcaagaagaaacacctgcaataatctctgagctctttgaaggttttctaacaattggaactcttggtgcagaaacagtcaccaatgaaccaggaacaccaacatttgctatgccttcagaaaacataacatcgagaagtgaagaggtgacaggaaatgaactgaagctcataagttacgagcttgagaaatttcttgagactgaaaaagaagaaagtttgtatgattcatcaggaagaaacagctatgttagcattatcacacttagtgaaaaggaaatagatggacccaaagctgaagattacagaaacaaagctgtatgtccactgcaaggatatttactggggtcctcatttgaactaccagaaacaaaagaagtaaggaaagaaagagcatctcttgctgagctactttataagacaaagtcaacaagtcaagattgtatagacacaggaatacaaggagaaacacaagtcaagagaacacctaagtctgctgccatgcatattatgagaaagatattgaaaagggtccacagttcttcaaaaagctgtaacacttccaggaatgatgctgattctgcttcaaccaataaaaaactccaaaaggttcaacgtatgtttcacaaaaaagtctatcctgaaagccctgtagacggaaaagattgcattcaatcccacaaaggtaagataaaaaatgtccctcatgaatactttcaggaatatgaaaatgggaagttcacaaacccagacaaaggcaaaagatttcattcagataccaaatcaagaaagtggtcccaacactgtatgaccaattggaacccaccacagcatgggctaatttgcagtagctcaactggaaacaatgagcactggatcaaaacagatgcagagtatttggtgctggagctgtagcaacttaagctgtactaaagtcgtgatgaattgagcctctataagagagacttgtcaaaactagtattgataatttgatattatgatcgtgttatgcatgtacttggagtgatcatgtattcaataaatctgagtttcgtgaaagcttcttaataaatagacatgtttggttc

SEQ ID NO: 53314 - protein, 394 aa, Glycine max
  peptide (1)..(394): Ceres Seq. ID no. 14304629
  misc_feature (37)..(308): Homolog of NCBI NO: 15241307 NR Description: hypothetical protein [Arabidopsis thaliana]
EIFGYQTRKEIKMKLFQWVHRKLRQNSIDPFKDFTLGNPCTCLTVQPTLDNQYSQSKPSFSSTNQPSFSKPHHQENQTSYSGLVDSREDKSQEETPAIISELFEGFLTIGTLGAETVTNEPGTPTFAMPSENITSRSEEVTGNELKLISYELEKFLETEKEESLYDSSGRNSYVSIITLSEKEIDGPKAEDYRNKAVCPLQGYLLGSSFELPETKEVRKERASLAELLYKTKSTSQDCIDTGIQGETQVKRTPKSAAMHIMRKILKRVHSSSKSCNTSRNDADSASTNKKLQKVQRMFHKKVYPESPVDGKDCIQSHKGKIKNVPHEYFQEYENGKFTNPDKGKRFHSDTKSRKWSQHCMTNWNPPQHGLICSSSTGNNEHWIKTDAEYLVLEL

SEQ ID NO: 53315 - protein, 382 aa, Glycine max
  peptide (1)..(382): Ceres Seq. ID no. 14304630
  misc_feature (25)..(296): Homolog of NCBI NO: 15241307 NR Description: hypothetical protein [Arabidopsis thaliana]
MKLFQWVHRKLRQNSIDPFKDFTLGNPCTCLTVQPTLDNQYSQSKPSFSSTNQPSFSKPHHQENQTSYSGLVDSREDKSQEETPAIISELFEGFLTIGTLGAETVTNEPGTPTFAMPSENITSRSEEVTGNELKLISYELEKFLETEKEESLYDSSGRNSYVSIITLSEKEIDGPKAEDYRNKAVCPLQGYLLGSSFELPETKEVRKERASLAELLYKTKSTSQDCIDTGIQGETQVKRTPKSAAMHIMRKILKRVHSSSKSCNTSRNDADSASTNKKLQKVQRMFHKKVYPESPVDGKDCIQSHKGKIKNVPHEYFQEYENGKFTNPDKGKRFHSDTKSRKWSQHCMTNWNPPQHGLICSSSTGNNEHWIKTDAEYLVLEL

SEQ ID NO: 53316 - protein, 267 aa, Glycine max
  peptide (1)..(267): Ceres Seq. ID no. 14304631
  misc_feature (1)..(181): Homolog of NCBI NO: 15241307 NR Description: hypothetical protein [Arabidopsis thaliana]
MPSENITSRSEEVTGNELKLISYELEKFLETEKEESLYDSSGRNSYVSIITLSEKEIDGPKAEDYRNKAVCPLQGYLLGSSFELPETKEVRKERASLAELLYKTKSTSQDCIDTGIQGETQVKRTPKSAAMHIMRKILKRVHSSSKSCNTSRNDADSASTNKKLQKVQRMFHKKVYPESPVDGKDCIQSHKGKIKNVPHEYFQEYENGKFTNPDKGKRFHSDTKSRKWSQHCMTNWNPPQHGLICSSSTGNNEHWIKTDAEYLVLEL

SEQ ID NO: 53317 - DNA, 1568 bp, Glycine max
  misc_feature (1)..(1568): Ceres Seq. ID no. 14310729
gggaatgccaatacccacctcttagcatggaaataataagtaacataaccccatgtgtattttcatattcctgggaatcaactattcttgggaacgtttttacaaaacttgtagcaaacatgagaatgcgatattctcaagtccatattcatgagaatatttcttgataacttgaaacaaacgcctcctttaggtaaagcatgaggtttctttttccatctctaacaatatgctaccagaaggagcataatgtgaatcttgtctttgagcgttttcatgtcaatagatgcacatggagacacatttacttatttgataatacataaatgttgtactattttatatttgataatgtgtagatgttatgctattttatctatccattcagttataaatagcttaagctgtgttattctcaaattaacgcattattcattatcaaaaaggttcctctctctttggcaataaggatagcatccctcaaagggacattgcggttgcagataaagccacctccgtctgatcaattgtggtttggtttcacatttatgcctgatatagacttcagcttggaatcatttgttggagaacacaagataactaattcacacatagctttgttcctggtcaatcgactcaaggcagcgatccgggaaactttagtgctcccaaattgtgaaagcatatgcattccatggatgctagccgaaaaggatgattgggttcctaggagtgtcgctccgttcatatggatccacccagaatcggggaacgagatttcaacctcagttgataccaataatcaaccttgtggtggattgaaagctagtgcaaggaccttaagtggtgatggtccagaactcaaacaacataaaccgccaaagtgtaccaaatctagtcaggaaccagctaggaaatcagattctgtggcacttccaccaatttcctctagttcagtaacattaaggagcagcaaaagttcggaagaactgacaagacctctgttagagaatgacaaaccacaagaaactagagatttgcaagaacttagaactacttcattgcagaatgataatactaatgaagctagtgaagagaagatgggggatatttctgtgagtgaatcacctcccagaaacgtggtgatggataaacaatatagttcaattgaacaggatgattcaaggccaaggaaaattggaaaaagggaaagaattcttgatttgaaaaagaggatgagtgagaaattggaagaaagagtcggcacattgttgagaagataagaggaccatgagaaatataaacaaagtaaatgtcagaatggttacaaatttgttactgattttttactattgcagacattagtaccattcataaataaaaatgtggggtattaggtattgtttcattgatgagttgtatattttttaggggcttagaagatcatatggaactagatatatacatcacagaaaatactttcatttcgttccacgggagttccacaacactgacgtaatccacttgtaaatttgcaattgtcacagggtataatagaaaactcattt

SEQ ID NO: 53318 - protein, 244 aa, Glycine max
  peptide (1)..(244): Ceres Seq. ID no. 14310730
  misc_feature (1)..(198): Homolog of NCBI NO: 6325349 NR Description: Hypothetical ORF; Ypr091cp [Saccharomyces
  misc_feature (1)..(64): Homolog of NCBI NO: 7689015 NR Description: uncharacterized hypothalamus protein HT008 [Homo
  misc_feature (1)..(64): Homolog of NCBI NO: 38091890 NR Description: testis expressed gene 2 [Mus musculus]
  misc_feature (1)..(64): Homolog of NCBI NO: 34873954 NR Description: similar to putative protein of eukaryotic origin
  misc_feature (1)..(64): Homolog of NCBI NO: 7020410 NR Description: unnamed protein product [Homo sapiens]
  misc_feature (1)..(64): Homolog of NCBI NO: 34783705 NR Description: Unknown (protein for MGC:62520) [Mus musculus]
  misc_feature (1)..(46): Homolog of NCBI NO: 19112656 NR Description: hypothetical protein [Schizosaccharomyces pombe]
  misc_feature (1)..(161): Homolog of NCBI NO: 15219405 NR Description: hypothetical protein [Arabidopsis thaliana]
  misc_feature (1)..(237): Homolog of NCBI NO: 30685543 NR Description: expressed protein [Arabidopsis thaliana]
  misc_feature (1)..(237): Homolog of NCBI NO: 25518065 NR Description: F2H15.5 protein - Arabidopsis thaliana
MPDIDFSLESFVGEHKITNSHIALFLVNRLKAAIRETLVLPNCESICIPWMLAEKDDWVPRSVAPFIWIHPESGNEISTSVDTNNQPCGGLKASARTLSGDGPELKQHKPPKCTKSSQEPARKSDSVALPPISSSSVTLRSSKSSEELTRPLLENDKPQETRDLQELRTTSLQNDNTNEASEEKMGDISVSESPPRNVVMDKQYSSIEQDDSRPRKIGKRERILDLKKRMSEKLEERVGTLLRR

SEQ ID NO: 53319 - protein, 194 aa, Glycine max
  peptide (1)..(194): Ceres Seq. ID no. 14310731
  misc_feature (1)..(14): Homolog of NCBI NO: 33337924 NR Description: MSTP069 [Homo sapiens]
  misc_feature (1)..(148): Homolog of NCBI NO: 6325349 NR Description: Hypothetical ORF; Ypr091cp [Saccharomyces
  misc_feature (1)..(14): Homolog of NCBI NO: 7689015 NR Description: uncharacterized hypothalamus protein HT008 [Homo
  misc_feature (1)..(14): Homolog of NCBI NO: 38091890 NR Description: testis expressed gene 2 [Mus musculus]
  misc_feature (1)..(14): Homolog of NCBI NO: 34873954 NR Description: similar to putative protein of eukaryotic origin
  misc_feature (1)..(14): Homolog of NCBI NO: 7020410 NR Description: unnamed protein product [Homo sapiens]
  misc_feature (1)..(14): Homolog of NCBI NO: 34783705 NR Description: Unknown (protein for MGC:62520) [Mus musculus]
  misc_feature (1)..(111): Homolog of NCBI NO: 15219405 NR Description: hypothetical protein [Arabidopsis thaliana]
  misc_feature (1)..(187): Homolog of NCBI NO: 30685543 NR Description: expressed protein [Arabidopsis thaliana]
  misc_feature (1)..(187): Homolog of NCBI NO: 25518065 NR Description: F2H15.5 protein - Arabidopsis thaliana
MLAEKDDWVPRSVAPFIWIHPESGNEISTSVDTNNQPCGGLKASARTLSGDGPELKQHKPPKCTKSSQEPARKSDSVALPPISSSSVTLRSSKSSEELTRPLLENDKPQETRDLQELRTTSLQNDNTNEASEEKMGDISVSESPPRNVVMDKQYSSIEQDDSRPRKIGKRERILDLKKRMSEKLEERVGTLLRR

SEQ ID NO: 53320 - DNA, 1169 bp, Glycine max
  misc_feature (1)..(1169): Ceres Seq. ID no. 14306908
aatttttttgtaattactgtgggatttattgtcctctgcctagtgtttttttttcctgcttttataattatttcttgttttgccataaaagaaagtcaatacatgtcatcattggttcttgttgtagggtaaatcaaaaaagcgtctctccaaaagagatctggttgaaagggttagggttctggatggtccggaaaaggataatgtatttcggggatttagaccagttgctgcaccatctgacctgttgaaagcttccagggcaaaaaagttgctccagaagaaggcaattgaaaaggagaaaagaaaagctgaggcactggcctctggaattgactggctaagtgatgattcagatgatgagcctcagaaagaaaacagagaacctcccttgtgtaatcttctcaaagatgaagaacatcaccagctaataattgatttgtgcaaggcattagcatccttgcaaaggtattgggaagcactggagattattaatctctttctaagattggcccatacatctctgtctactgaaaaaaaagaggagcttcgatctcttggagctcaaatggcatataacaccacagatccgaaacatgggtttgattgtgtaaaatacattgttcagcaacatccacacagtgttgcagcttggaattgctactacaaggttatctcaagattggaaaaccgagatacaagacattacaaatttgtacgtggtatgcaaggaaagtttgtggattgtgtgcctcctatccttatttctgggcatcagtttaccatatgtagccatcatcaagatgcagcaaggaaataccttgaagcttataaactattgccagagaatcctttggttaatctttgtgttggaacagccttgatcaacttagcattgggtttaagacttcaaaataagcatcaatgtgttgtacaaggtttagcattcctctacaataatttgagaatctgcgagaacagccaggtttgtctgctcagcatttcatgaatatttttgtgcccgtttaagaagaaaatgttttattattaataaaagatgataataagaaaaagatatcacctttttttatacataggactggctaagttcgtgtacatattctacaaattcttatccaatagaaaattatgctcgggtaattattatc

SEQ ID NO: 53321 - protein, 146 aa, Glycine max
  peptide (1)..(146): Ceres Seq. ID no. 14306909
  misc_feature (8)..(138): Homolog of NCBI NO: 34875864 NR Description: similar to general transcription factor IIIC,
  misc_feature (1)..(138): Homolog of NCBI NO: 28175202 NR Description: similar to general transcription factor IIIC,
  misc_feature (1)..(138): Homolog of NCBI NO: 6912398 NR Description: general transcription factor IIIC, polypeptide 3,
  misc_feature (1)..(138): Homolog of NCBI NO: 11360230 NR Description: hypothetical protein DKFZp761E129.1 - human
  misc_feature (1)..(138): Homolog of NCBI NO: 10440070 NR Description: unnamed protein product [Homo sapiens]
  misc_feature (1)..(138): Homolog of NCBI NO: 16359058 NR Description: Similar to general transcription factor IIIC,
  misc_feature (1)..(146): Homolog of NCBI NO: 25511644 NR Description: F11A6.2 protein - Arabidopsis thaliana
  misc_feature (1)..(146): Homolog of NCBI NO: 30685450 NR Description: transcription factor - related [Arabidopsis
MAYNTTDPKHGFDCVKYIVQQHPHSVAAWNCYYKVISRLENRDTRHYKFVRGMQGKFVDCVPPILISGHQFTICSHHQDAARKYLEAYKLLPENPLVNLCVGTALINLALGLRLQNKHQCVVQGLAFLYNNLRICENSQVCLLSIS

SEQ ID NO: 53322 - protein, 94 aa, Glycine max
  peptide (1)..(94): Ceres Seq. ID no. 14306910
  misc_feature (1)..(86): Homolog of NCBI NO: 34875864 NR Description: similar to general transcription factor IIIC,
  misc_feature (1)..(86): Homolog of NCBI NO: 28175202 NR Description: similar to general transcription factor IIIC,
  misc_feature (1)..(86): Homolog of NCBI NO: 6912398 NR Description: general transcription factor IIIC, polypeptide 3,
  misc_feature (1)..(86): Homolog of NCBI NO: 11360230 NR Description: hypothetical protein DKFZp761E129.1 - human
  misc_feature (1)..(86): Homolog of NCBI NO: 10440070 NR Description: unnamed protein product [Homo sapiens]
  misc_feature (1)..(86): Homolog of NCBI NO: 16359058 NR Description: Similar to general transcription factor IIIC,
  misc_feature (1)..(94): Homolog of NCBI NO: 25511644 NR Description: F11A6.2 protein - Arabidopsis thaliana
  misc_feature (1)..(94): Homolog of NCBI NO: 30685450 NR Description: transcription factor - related [Arabidopsis
MQGKFVDCVPPILISGHQFTICSHHQDAARKYLEAYKLLPENPLVNLCVGTALINLALGLRLQNKHQCVVQGLAFLYNNLRICENSQVCLLSIS

SEQ ID NO: 53323 - protein, 82 aa, Glycine max
  peptide (1)..(82): Ceres Seq. ID no. 14306911
FFCNYCGIYCPLPSVFFSCFYNYFLFCHKRKSIHVIIGSCCRVNQKSVSPKEIWLKGLGFWMVRKRIMYFGDLDQLLHHLTC

SEQ ID NO: 53324 - DNA, 1338 bp, Glycine max
  misc_feature (1)..(1338): Ceres Seq. ID no. 12484482
gaccataagtcgatagtagagaaaaatatatccaactaatggctacccttattgctcctagccaccattcccgggttgaggatgctgaagctctccgaaatgctttcaaaggatggggggctgatgacaaggccattatagcaatactgggtcacagaaatgttcatcagaggcaagaaatcagaaaagcttatgaggagatttaccaagaggatctcatcaaacgccttgagtccgagatctctggtgactttgagagagctatgtaccggtggatgttgcagcctgcggatcgtgatgctgttttggtgaatgtggcaatcaagaatggcaccaaagactaccatgtgattgcagagattgcttgtgtcctatcagctgaagagctcttggcagtgaggcgggcctaccaccgccgctacaagtgttccttggaggaagatgtggcagctaacaccaccggcaatcttcgccagcttttggttggattggtgacctcatataggtatgagggtgatgagatcaatgtaaaattttcacaaactgaagctaatgttcttcatgaatctgtcaaggagaagaaaggcaacagtgaagaagtcatcaggatccttactacaagaagcaaaactcaacttgtggcaactttcaaccgctacagagatgaacatggaatttccatcagtaagaaattgttggatcaaacatctgatgacttccacaaggtgttgcacactgctattcgctgcatcaatgaccataagaagtactatgagaaggttttgcgcaatgcagtcaagaagtttggaactgacgaggatggactaagccgtgtgattgttacaagggctgagaaggatctgaaggacatcaaagagctctactacaagagaaacagtgttcaccttgaggatgaagtgtccaaggaaacttctggggactacaagaagttcctcctcactctcttggggaaataagactaagttaagaacttgctctaagggcatcttagtaatgggtttttgttaattatgtcattggtttctggtttgtgcgatttcattatgttagttttccagtaagagtttgttatatctggttaagtttttgagacaacaagaactcgtgtcttgtttgagggcatgcgtgccatttcttagggttgtgttggtacttggcatgctcttattagaggacctctatgctgcgtgtttcctttggattatgctattacctcacctggtttgcttttaatgaaaggttgataacaaatttatatgtacttgaattcttcattttaaattctaatcagcagaggcaccggtagcaagttnttct

SEQ ID NO: 53325 - protein, 312 aa, Glycine max
  peptide (1)..(312): Ceres Seq. ID no. 12484483
  misc_feature (242)..(309): Pfam Name: Annexin Pfam Description: Annexin
  misc_feature (1)..(311): Homolog of NCBI NO: 7484723 NR Description: fiber annexin - upland cotton
  misc_feature (1)..(312): Homolog of NCBI NO: 7441506 NR Description: annexin P33 - maize
  misc_feature (1)..(312): Homolog of NCBI NO: 4580920 NR Description: vacuole-associated annexin VCaB42 [Nicotiana
  misc_feature (1)..(312): Homolog of NCBI NO: 3928134 NR Description: annexin P38 [Capsicum annuum]
  misc_feature (1)..(312): Homolog of NCBI NO: 1621539 NR Description: annexin-like protein
  misc_feature (1)..(312): Homolog of NCBI NO: 15220216 NR Description: Ca2+-dependent membrane-binding protein annexin
  misc_feature (1)..(311): Homolog of NCBI NO: 22326753 NR Description: annexin-like protein; protein id: At5g12380.1
  misc_feature (44)..(312): Homolog of NCBI NO: 1362037 NR Description: annexin homolog RJ4 (clone RJ4) - garden
  misc_feature (1)..(312): Homolog of NCBI NO: 21264397 NR Description: Annexin-like protein RJ4
  misc_feature (1)..(312): Homolog of NCBI NO: 3176098 NR Description: annexin [Medicago truncatula]
MATLIAPSHHSRVEDAEALRNAFKGWGADDKAIIAILGHRNVHQRQEIRKAYEEIYQEDLIKRLESEISGDFERAMYRWMLQPADRDAVLVNVAIKNGTKDYHVIAEIACVLSAEELLAVRRAYHRRYKCSLEEDVAANTTGNLRQLLVGLVTSYRYEGDEINVKFSQTEANVLHESVKEKKGNSEEVIRILTTRSKTQLVATFNRYRDEHGISISKKLLDQTSDDFHKVLHTAIRCINDHKKYYEKVLRNAVKKFGTDEDGLSRVIVTRAEKDLKDIKELYYKRNSVHLEDEVSKETSGDYKKFLLTLLGK

SEQ ID NO: 53326 - protein, 237 aa, Glycine max
  peptide (1)..(237): Ceres Seq. ID no. 12484484
  misc_feature (167)..(234): Pfam Name: Annexin Pfam Description: Annexin
  misc_feature (1)..(236): Homolog of NCBI NO: 7484723 NR Description: fiber annexin - upland cotton
  misc_feature (1)..(237): Homolog of NCBI NO: 7441506 NR Description: annexin P33 - maize
  misc_feature (1)..(237): Homolog of NCBI NO: 4580920 NR Description: vacuole-associated annexin VCaB42 [Nicotiana
  misc_feature (1)..(237): Homolog of NCBI NO: 3928134 NR Description: annexin P38 [Capsicum annuum]
  misc_feature (1)..(237): Homolog of NCBI NO: 1621539 NR Description: annexin-like protein
  misc_feature (1)..(237): Homolog of NCBI NO: 15220216 NR Description: Ca2+-dependent membrane-binding protein annexin
  misc_feature (1)..(236): Homolog of NCBI NO: 22326753 NR Description: annexin-like protein; protein id: At5g12380.1
  misc_feature (1)..(237): Homolog of NCBI NO: 1362037 NR Description: annexin homolog RJ4 (clone RJ4) - garden
  misc_feature (1)..(237): Homolog of NCBI NO: 21264397 NR Description: Annexin-like protein RJ4
  misc_feature (1)..(237): Homolog of NCBI NO: 3176098 NR Description: annexin [Medicago truncatula]
MYRWMLQPADRDAVLVNVAIKNGTKDYHVIAEIACVLSAEELLAVRRAYHRRYKCSLEEDVAANTTGNLRQLLVGLVTSYRYEGDEINVKFSQTEANVLHESVKEKKGNSEEVIRILTTRSKTQLVATFNRYRDEHGISISKKLLDQTSDDFHKVLHTAIRCINDHKKYYEKVLRNAVKKFGTDEDGLSRVIVTRAEKDLKDIKELYYKRNSVHLEDEVSKETSGDYKKFLLTLLGK

SEQ ID NO: 53327 - protein, 233 aa, Glycine max
  peptide (1)..(233): Ceres Seq. ID no. 12484485
  misc_feature (163)..(230): Pfam Name: Annexin Pfam Description: Annexin
  misc_feature (1)..(232): Homolog of NCBI NO: 7484723 NR Description: fiber annexin - upland cotton
  misc_feature (1)..(233): Homolog of NCBI NO: 7441506 NR Description: annexin P33 - maize
  misc_feature (1)..(233): Homolog of NCBI NO: 4580920 NR Description: vacuole-associated annexin VCaB42 [Nicotiana
  misc_feature (1)..(233): Homolog of NCBI NO: 3928134 NR Description: annexin P38 [Capsicum annuum]
  misc_feature (1)..(233): Homolog of NCBI NO: 1621539 NR Description: annexin-like protein
  misc_feature (1)..(233): Homolog of NCBI NO: 15220216 NR Description: Ca2+-dependent membrane-binding protein annexin
  misc_feature (1)..(232): Homolog of NCBI NO: 22326753 NR Description: annexin-like protein; protein id: At5g12380.1
  misc_feature (1)..(233): Homolog of NCBI NO: 1362037 NR Description: annexin homolog RJ4 (clone RJ4) - garden
  misc_feature (1)..(233): Homolog of NCBI NO: 21264397 NR Description: Annexin-like protein RJ4
  misc_feature (1)..(233): Homolog of NCBI NO: 3176098 NR Description: annexin [Medicago truncatula]
MLQPADRDAVLVNVAIKNGTKDYHVIAEIACVLSAEELLAVRRAYHRRYKCSLEEDVAANTTGNLRQLLVGLVTSYRYEGDEINVKFSQTEANVLHESVKEKKGNSEEVIRILTTRSKTQLVATFNRYRDEHGISISKKLLDQTSDDFHKVLHTAIRCINDHKKYYEKVLRNAVKKFGTDEDGLSRVIVTRAEKDLKDIKELYYKRNSVHLEDEVSKETSGDYKKFLLTLLGK

SEQ ID NO: 53328 - DNA, 1249 bp, Glycine max
  misc_feature (1)..(1249): Ceres Seq. ID no. 13593886
attcactctcttctatcccttgcctcaccaccttaaatttgttatgcgcgaacacttgaaaaataatagtgaaaatgtggagtgctcccacagatgaacgatgtttggttgtttatctgaccttcttgaacaatatttgtggaagctgaatttctgttttcaaactggggtctgttgaaagatggactgtcttgagggagcacctgctggattcgttgatgacttgatggtcctctaaaggaagtccccaaactaatcatggctcccatctaatgtatcacccttggtagggactggtggaaatggtatcctataggtaaatacgctggaaagatcttaatgggctggtaatctgacttaccttcccacttctttcctctcccttgggtgtttccaacttcctgttgagagcatagcctgtgccacggttggctgttaaaattgaaattatctatttatttagtagtttctatattgccctacagagtttttagatattcaatcaaaactctgaagtaaataattgggtgttctaaggttgtggcataacatgactttctgatctggcaaaagattatccatccaggttcaattgagttcatgaatggtctggatttcactacatcaatgccctctggctatcaagaggctggagagcctgtattgttgatcagttaatttggaaagtgaatttcgaaaaagttaattatttttgcgtatgaatttactttggaaaagagagaactattttctgattattttttcgtcttccagcaggactctttaaggggtggtggtaaatggagcaatggagctgagatgactgaggaagaagcattagcagagcagcaaaggatgtttgcagaggcgcgtgctaggatgaacggtggagccattgcttccaagcagccagatgctgaccaaagtttagatagctaactttaggatcttcattgaagcatagacaaagcaccaccctgactcctgtctgtgcttccaatgagctcgatggtgtacaaaaaccattcactagtttgctggcccatgtggatgtgctcatttgtattctttcgataaatccatatttgtaagtcaatgtaattagtgagagatcatgaaaaccctcccgtttagcatttacttgtaattatttaatttacgtttttgtatcttctacatactaacaactcctagcttgattctgacagtagctactatgttagattgtaacaaattattaaatatgtag

SEQ ID NO: 53329 - protein, 39 aa, Glycine max
  peptide (1)..(39): Ceres Seq. ID no. 13593887
MTEEEALAEQQRMFAEARARMNGGAIASKQPDADQSLDS

SEQ ID NO: 53330 - protein, 31 aa, Glycine max
  peptide (1)..(31): Ceres Seq. ID no. 13593888
FTLFYPLPHHLKFVMREHLKNNSENVECSHR

SEQ ID NO: 53331 - DNA, 1463 bp, Glycine max
  misc_feature (1)..(1463): Ceres Seq. ID no. 14306707
gacacatacaaacatccatcatcattattattttactccgaacgagttgacaccgattccactcactcaaccatgagccgattcaggcgttttgagctcatagaacaaccacctttcttccactcctgctactctttcccttccttcgtcctccaagactcactctctctcgacctcgacctcttgccacttcccagccacttcgacgctttcgcagatctggtgcacgcgccgtcgttcgcttaccggcgcgtggagaggcatctcgagaatgagttgcgtttgcagagcctctctgaccgtgtggcggagctggagtcgcggttcgaccgtgtgctcggcggagatcggaagtacacgtggacagcggagatcaagggagcggagaagaacgggttcgataggaagtacaagtgggttgcggaggtcgctgaggaggaagataagaagaagaagaagaataagaagaagcaggtgaaggtgctgaaggataagagcgcgaggtggactcttcagctggagaatgaggatgctgaggaagaagaggagaagaagaagaagttgctgaagggcgttgcgaggaacgtgaaatggacggctgagatcacgggaaaaggggagaacagtgggagctcgaggaagtacacttttcaggtgcagagtggggatgctgagaagaaggagaaaaagaacaagggaaatgggaatggattgcgtattgtggagattcaggagccaattggtcatagagatgtggttttgagacaggcatttgccaagaggtttggagctgttcaaaatgagaggggcaaaaagaaggacctgtctcctcaagatgctgccttgttgatccagatcagctttagagcttacttgatccgtaggtcaaaggctctccgtgcccttagagaactggccattgcaaagtctaaattaaaggaaatcagagcccagttcaataacttttcctaccgacgtcatgtagctcgtgatgcggaggaacgccagcggttttctgagaaaatcattgtcttgctcctcactgttgatgccattgagggatctgatattatggtaagatctgcgaagaggtcaatggtggatgagctggaagcaatgcttgatgtggtagatccccagcctggtggaagatcagcatcgctctacttcaaaagaaggacatttgatatgcctgatggagtcatcaggaaggaaatagaagaaggggttgcacaggttgtgcaaatgcttgaagaagcagagaatagtagtgaagcatgaccgtgagatcaagaaagtaatatctatctgtttatttcgtgttttccttctgctgttgtagtttgtttgcagagacgtattttagtctaagatttcaagacttctaaattaggctttccatccaatggtatttgttttgctgaacttttggcactttctgaacgaaaagattggcttgtgtc

SEQ ID NO: 53332 - protein, 426 aa, Glycine max
  peptide (1)..(426): Ceres Seq. ID no. 14306708
  misc_feature (110)..(422): Homolog of NCBI NO: 34897716 NR Description: ESTs AU082316(E3368),D41461(S3973) correspond to
  misc_feature (86)..(421): Homolog of NCBI NO: 15241803 NR Description: calmodulin-binding protein family [Arabidopsis
DTYKHPSSLLFYSERVDTDSTHSTMSRFRRFELIEQPPFFHSCYSFPSFVLQDSLSLDLDLLPLPSHFDAFADLVHAPSFAYRRVERHLENELRLQSLSDRVAELESRFDRVLGGDRKYTWTAEIKGAEKNGFDRKYKWVAEVAEEEDKKKKKNKKKQVKVLKDKSARWTLQLENEDAEEEEEKKKKLLKGVARNVKWTAEITGKGENSGSSRKYTFQVQSGDAEKKEKKNKGNGNGLRIVEIQEPIGHRDVVLRQAFAKRFGAVQNERGKKKDLSPQDAALLIQISFRAYLIRRSKALRALRELAIAKSKLKEIRAQFNNFSYRRHVARDAEERQRFSEKIIVLLLTVDAIEGSDIMVRSAKRSMVDELEAMLDVVDPQPGGRSASLYFKRRTFDMPDGVIRKEIEEGVAQVVQMLEEAENSSEA

SEQ ID NO: 53333 - protein, 402 aa, Glycine max
  peptide (1)..(402): Ceres Seq. ID no. 14306709
  misc_feature (86)..(398): Homolog of NCBI NO: 34897716 NR Description: ESTs AU082316(E3368),D41461(S3973) correspond to
  misc_feature (62)..(397): Homolog of NCBI NO: 15241803 NR Description: calmodulin-binding protein family [Arabidopsis
MSRFRRFELIEQPPFFHSCYSFPSFVLQDSLSLDLDLLPLPSHFDAFADLVHAPSFAYRRVERHLENELRLQSLSDRVAELESRFDRVLGGDRKYTWTAEIKGAEKNGFDRKYKWVAEVAEEEDKKKKKNKKKQVKVLKDKSARWTLQLENEDAEEEEEKKKKLLKGVARNVKWTAEITGKGENSGSSRKYTFQVQSGDAEKKEKKNKGNGNGLRIVEIQEPIGHRDVVLRQAFAKRFGAVQNERGKKKDLSPQDAALLIQISFRAYLIRRSKALRALRELAIAKSKLKEIRAQFNNFSYRRHVARDAEERQRFSEKIIVLLLTVDAIEGSDIMVRSAKRSMVDELEAMLDVVDPQPGGRSASLYFKRRTFDMPDGVIRKEIEEGVAQVVQMLEEAENSSEA

SEQ ID NO: 53334 - DNA, 1596 bp, Glycine max
  misc_feature (1)..(1596): Ceres Seq. ID no. 15169334
tttttgtgatgacagtgtttcaaaagtaactgaaacgatggatcctcctaaagaacaagaacaccaggaatccatagtttcaccttccacagatgaagttttgacatcttcgaaacgtggaaggccacgaaaaacaaagcctaccaagttcgtaatcaacgagaaatccaatcccacatcaacaccccgaagatctaaaagaataaagcatgtagcagataaaactgccaacaatgttcccgaagtatcttcatccgaggaattattgaagggacgtactgcagaaaattcacaagcagatggcaaagaagtctcttcagatattgacgccttagtaatctacaaaagaaaaagactacctcgaaagaggtcttctggtcaaataagcaagtctccaaagaaaactgctccttcagagcctccatctgctgcaatttcaagctctactactgcatcaccccctcatcaagatcctcctgcagctacttcacccagcgctgatgctcctcatattgaaaatacaaatactgctgagccagtattgagtaaaagccttgtcgaagaggtcgagaaggtgaaccctgctccagccaatgctcaagaacaggttgcttctagtaagggtcaagaatctccagatcaagttgacccaaaggttgatgaagtctctactgggaacacctcactcgatctagaagccattaacaaaatgatcgaagatgaccctttgagtgctattgaaaatatcctgacagggaaggtttccatttgttctaagactccacaatctatcactcagtcagaacaaccaaaagttcaaggctcccctgcagatgttctgtcaaaagagctaaaagacttaatgcagatctttagcttaggtgattttgttactgaccatgaacaaatgtcaaaggtcctacttattcttgaagagttgcagaagaatgagaagtttctttctcttgaacagcaagcattcataaaggccttcagactcttcttcaacaatgctgttactcaccgcaaacagtgtgatacggctggaataaagaaagtcgagttgaaccgagctaaagaagatatccttctgaaactgcaagaagttaaacatacacaggagcaaatcacatcgaccatttcaaatgccaacaacagggtcaatgaaatatcttcttatattgaacaacttgaagaacggttatccaaactgaaggaagagagggagacctttcagttggctattaaggaaggcgagaaacaaagggagacattgaagaatgatagcatcttatgggctcatcagactaaggacctggtttttgatcttgcagagattgaggccaaagaaaaaatccttggacagcaacttgaaacagacaatgatgcatatgaccaatttaaagcatcctttcctttttaatttctgtttgaaaattggtagttgtaattactctgttatgttcaattcatgtatggtttagttcatgcatgtttagtttatgttcctttaagcaatttaaggatttagacccagttaagtgtagaattataacctttgattacaaaattaatggatgaaattttaacaatttc

SEQ ID NO: 53335 - protein, 473 aa, Glycine max
  peptide (1)..(473): Ceres Seq. ID no. 15169335
  misc_feature (35)..(277): Pfam Name: Treacher Collins syndrome protein Treacle Pfam Description: Treacher Collins syndrome protein Treacle
FCDDSVSKVTETMDPPKEQEHQESIVSPSTDEVLTSSKRGRPRKTKPTKFVINEKSNPTSTPRRSKRIKHVADKTANNVPEVSSSEELLKGRTAENSQADGKEVSSDIDALVIYKRKRLPRKRSSGQISKSPKKTAPSEPPSAAISSSTTASPPHQDPPAATSPSADAPHIENTNTAEPVLSKSLVEEVEKVNPAPANAQEQVASSKGQESPDQVDPKVDEVSTGNTSLDLEAINKMIEDDPLSAIENILTGKVSICSKTPQSITQSEQPKVQGSPADVLSKELKDLMQIFSLGDFVTDHEQMSKVLLILEELQKNEKFLSLEQQAFIKAFRLFFNNAVTHRKQCDTAGIKKVELNRAKEDILLKLQEVKHTQEQITSTISNANNRVNEISSYIEQLEERLSKLKEERETFQLAIKEGEKQRETLKNDSILWAHQTKDLVFDLAEIEAKEKILGQQLETDNDAYDQFKASFPF

SEQ ID NO: 53336 - protein, 461 aa, Glycine max
  peptide (1)..(461): Ceres Seq. ID no. 15169336
  misc_feature (23)..(265): Pfam Name: Treacher Collins syndrome protein Treacle Pfam Description: Treacher Collins syndrome protein Treacle
MDPPKEQEHQESIVSPSTDEVLTSSKRGRPRKTKPTKFVINEKSNPTSTPRRSKRIKHVADKTANNVPEVSSSEELLKGRTAENSQADGKEVSSDIDALVIYKRKRLPRKRSSGQISKSPKKTAPSEPPSAAISSSTTASPPHQDPPAATSPSADAPHIENTNTAEPVLSKSLVEEVEKVNPAPANAQEQVASSKGQESPDQVDPKVDEVSTGNTSLDLEAINKMIEDDPLSAIENILTGKVSICSKTPQSITQSEQPKVQGSPADVLSKELKDLMQIFSLGDFVTDHEQMSKVLLILEELQKNEKFLSLEQQAFIKAFRLFFNNAVTHRKQCDTAGIKKVELNRAKEDILLKLQEVKHTQEQITSTISNANNRVNEISSYIEQLEERLSKLKEERETFQLAIKEGEKQRETLKNDSILWAHQTKDLVFDLAEIEAKEKILGQQLETDNDAYDQFKASFPF

SEQ ID NO: 53337 - protein, 237 aa, Glycine max
  peptide (1)..(237): Ceres Seq. ID no. 15169337
  misc_feature (1)..(232): Pfam Name: Myosin tail Pfam Description: Myosin tail
MIEDDPLSAIENILTGKVSICSKTPQSITQSEQPKVQGSPADVLSKELKDLMQIFSLGDFVTDHEQMSKVLLILEELQKNEKFLSLEQQAFIKAFRLFFNNAVTHRKQCDTAGIKKVELNRAKEDILLKLQEVKHTQEQITSTISNANNRVNEISSYIEQLEERLSKLKEERETFQLAIKEGEKQRETLKNDSILWAHQTKDLVFDLAEIEAKEKILGQQLETDNDAYDQFKASFPF

SEQ ID NO: 53338 - DNA, 1372 bp, Glycine max
  misc_feature (1)..(1372): Ceres Seq. ID no. 14306467
aagaagacccccaactcttcatgggattcccagagaaaacagaacgctgcatatgagtcttgcagaagcttgtaactatcagaagaacatatttgctcttgattcagaaagcaaacccttggatctgcctagctctaccaaaaatcttacacaaaatttgggcccgacaatggagggtttgagggatgcagttgatgaagctcctaaggaccaaccttgtgaagcttccacacaggtgcaccttgaagctttaaaggaagcatctctagagaaacccaaagaggtatttactgaatttccccaggaagcaccaattgaagctccaaatccaaatgaagtttccaaggaagttgatactgtatccaatagccatgaaagaaagaggcccattaaaatcaaggtcaagcaatcttctgccaccagtagggctgatactgataatcaagtggttgaatgttctttaggtggtcgtaatgaaatggatcatggagctagcagttcagtttctgtagatgcaccccagaggaattttgccgatactgttagcatcagtaatcataatattgacgaagttaattcttggcatgatcgtggttcgcgcatgactgccagcattggcagtgcaaagtttttgagtgatggtgatgaattggtcaaagaactgcagtgcactgctgattcaagtatagtttattcacaacctcagccagaagatccatcatcatccagtattatccaggataacaatatagatgctgatgcacgacgatatgccagccttcaaactctttcagttgcaagatttgatcctgacggagaatcattaggtaaagaaatttctgctcgggggaaagaaaagcacaaaagcaaggaaaagaaacggaaacaggaaagtaataaaggacaccatgatgatgcagaatatttggagcgaaaacgactaaagaaagagaaaaaacatcgggaaaaagagctggcaaaacttcagagtgatgaagcaaagagatcctccattgatttgtcaagcaagaaagtggaacccgtagtggacgttgctagacaggttaaatctgttgaacccagtggatataattctaaagtagaaataaaaaagatagataccaaatcggagccatctgaaggcacatctggtgcaccaaaaattcgaattaaaattaaaaaccgaatgctcagcaagtcctagggaatataatgtcctttattttgtggatgctagaatgaaaatcacaactccttcatattttctaggttgtatttttcttttcattatccggcgtagtagatcatttaggtacatacaattattgattcaatgagctttattcgctggtagttcttatctgattttaga

SEQ ID NO: 53339 - protein, 400 aa, Glycine max
  peptide (1)..(400): Ceres Seq. ID no. 14306468
  misc_feature (43)..(372): Homolog of NCBI NO: 38490055 NR Description: TFIID component TAF2 [Arabidopsis thaliana]
  misc_feature (43)..(372): Homolog of NCBI NO: 22330618 NR Description: expressed protein [Arabidopsis thaliana]
  misc_feature (43)..(372): Homolog of NCBI NO: 25406308 NR Description: unknown protein F2P9.17 [imported] - Arabidopsis
RRPPTLHGIPRENRTLHMSLAEACNYQKNIFALDSESKPLDLPSSTKNLTQNLGPTMEGLRDAVDEAPKDQPCEASTQVHLEALKEASLEKPKEVFTEFPQEAPIEAPNPNEVSKEVDTVSNSHERKRPIKIKVKQSSATSRADTDNQVVECSLGGRNEMDHGASSSVSVDAPQRNFADTVSISNHNIDEVNSWHDRGSRMTASIGSAKFLSDGDELVKELQCTADSSIVYSQPQPEDPSSSSIIQDNNIDADARRYASLQTLSVARFDPDGESLGKEISARGKEKHKSKEKKRKQESNKGHHDDAEYLERKRLKKEKKHREKELAKLQSDEAKRSSIDLSSKKVEPVVDVARQVKSVEPSGYNSKVEIKKIDTKSEPSEGTSGAPKIRIKIKNRMLSKS

SEQ ID NO: 53340 - protein, 383 aa, Glycine max
  peptide (1)..(383): Ceres Seq. ID no. 14306469
  misc_feature (26)..(355): Homolog of NCBI NO: 38490055 NR Description: TFIID component TAF2 [Arabidopsis thaliana]
  misc_feature (26)..(355): Homolog of NCBI NO: 22330618 NR Description: expressed protein [Arabidopsis thaliana]
  misc_feature (26)..(355): Homolog of NCBI NO: 25406308 NR Description: unknown protein F2P9.17 [imported] - Arabidopsis
MSLAEACNYQKNIFALDSESKPLDLPSSTKNLTQNLGPTMEGLRDAVDEAPKDQPCEASTQVHLEALKEASLEKPKEVFTEFPQEAPIEAPNPNEVSKEVDTVSNSHERKRPIKIKVKQSSATSRADTDNQVVECSLGGRNEMDHGASSSVSVDAPQRNFADTVSISNHNIDEVNSWHDRGSRMTASIGSAKFLSDGDELVKELQCTADSSIVYSQPQPEDPSSSSIIQDNNIDADARRYASLQTLSVARFDPDGESLGKEISARGKEKHKSKEKKRKQESNKGHHDDAEYLERKRLKKEKKHREKELAKLQSDEAKRSSIDLSSKKVEPVVDVARQVKSVEPSGYNSKVEIKKIDTKSEPSEGTSGAPKIRIKIKNRMLSKS

SEQ ID NO: 53341 - protein, 344 aa, Glycine max
  peptide (1)..(344): Ceres Seq. ID no. 14306470
  misc_feature (1)..(316): Homolog of NCBI NO: 38490055 NR Description: TFIID component TAF2 [Arabidopsis thaliana]
  misc_feature (1)..(316): Homolog of NCBI NO: 22330618 NR Description: expressed protein [Arabidopsis thaliana]
  misc_feature (1)..(316): Homolog of NCBI NO: 25406308 NR Description: unknown protein F2P9.17 [imported] - Arabidopsis
MEGLRDAVDEAPKDQPCEASTQVHLEALKEASLEKPKEVFTEFPQEAPIEAPNPNEVSKEVDTVSNSHERKRPIKIKVKQSSATSRADTDNQVVECSLGGRNEMDHGASSSVSVDAPQRNFADTVSISNHNIDEVNSWHDRGSRMTASIGSAKFLSDGDELVKELQCTADSSIVYSQPQPEDPSSSSIIQDNNIDADARRYASLQTLSVARFDPDGESLGKEISARGKEKHKSKEKKRKQESNKGHHDDAEYLERKRLKKEKKHREKELAKLQSDEAKRSSIDLSSKKVEPVVDVARQVKSVEPSGYNSKVEIKKIDTKSEPSEGTSGAPKIRIKIKNRMLSKS

SEQ ID NO: 53342 - DNA, 1350 bp, Glycine max
  misc_feature (1)..(1350): Ceres Seq. ID no. 14306793
ggtgcatggcaactgaaccgagtgagagcacacaaaggaacacccttgtcgttagaaagccatgttttggcctcccaacaggttgccctcaatgcctctctgcttacatttttctcaagctctctcaagttcccttcaacttggattaccaccctaactaccctgattctgatcagattccttactttgaggatggtgattctgtgacatacaataatgagaaggaggggatcattgagtgcttgaaaaggaatgtgggtggtgatttagatagtgaggtttcttctctccctgattggataccaaccaaagtgatggccaccacttggcttgctgatgcacttgagtatgaactgtgggtgggatgtgatggttcctctgcttatagcatctattattctgatcttccctggcctatcggcaaggttctcttttggaagaaagcttattgggtaaagcagaaacatgggataagtgaagagaatgtagaagtaaaggaagaagagatttatgggagagcaaactctgcatatgatgctctgtcgacttggttaggggaacaaaactacctttttgaaaacaggccatcgagcttggatgctatttttcttgcacatgcattagttgttcttcaagctttacctgaatcatcaattttgcggaccaattttttggaacatgccaatttagtgagatatgtgcaacgatgtaagacagaacttatagtagctggtacttctgcttccaatgatccatattttcatgcagacccatcatcatcagcttctagaggtcgttcaacttcaagttcaaagcccaagactaaacccaaaaggcagccgccaacaaaggaggagaaaaccttgagaagaagggctaaatattttgtggtagcacagctagttgctgttgttcttttcgtcagtgtcttgtctggatatagaaataatgctgctgacatggagttagacaatgacgacttgggctatgaatgaaaatacattcatttgtttatcttctcaatgacaaagcctaggctgactgcatgttgaagatgcatccccgtttcttgtgtatgatccaaatatagaagcacggaaaattatcattcacttcaaaatttcctatcataggatccattttgataattttttaagagtagtagctttacattttcattggaatatggtgcaggttttttacttgtggtaaatgaaccttggtttgagaggatctatgggtctgttagccttgtgcatgtaaattttgggaggggtatgtttacaattatcttgtgctgttgtgcatactgtcagatggagatgccaaatatatcagtccttttatgag

SEQ ID NO: 53343 - protein, 330 aa, Glycine max
  peptide (1)..(330): Ceres Seq. ID no. 14306794
  misc_feature (5)..(326): Homolog of NCBI NO: 18398935 NR Description: expressed protein [Arabidopsis thaliana]
CMATEPSESTQRNTLVVRKPCFGLPTGCPQCLSAYIFLKLSQVPFNLDYHPNYPDSDQIPYFEDGDSVTYNNEKEGIIECLKRNVGGDLDSEVSSLPDWIPTKVMATTWLADALEYELWVGCDGSSAYSIYYSDLPWPIGKVLFWKKAYWVKQKHGISEENVEVKEEEIYGRANSAYDALSTWLGEQNYLFENRPSSLDAIFLAHALVVLQALPESSILRTNFLEHANLVRYVQRCKTELIVAGTSASNDPYFHADPSSSASRGRSTSSSKPKTKPKRQPPTKEEKTLRRRAKYFVVAQLVAVVLFVSVLSGYRNNAADMELDNDDLGYE

SEQ ID NO: 53344 - protein, 329 aa, Glycine max
  peptide (1)..(329): Ceres Seq. ID no. 14306795
  misc_feature (4)..(325): Homolog of NCBI NO: 18398935 NR Description: expressed protein [Arabidopsis thaliana]
MATEPSESTQRNTLVVRKPCFGLPTGCPQCLSAYIFLKLSQVPFNLDYHPNYPDSDQIPYFEDGDSVTYNNEKEGIIECLKRNVGGDLDSEVSSLPDWIPTKVMATTWLADALEYELWVGCDGSSAYSIYYSDLPWPIGKVLFWKKAYWVKQKHGISEENVEVKEEEIYGRANSAYDALSTWLGEQNYLFENRPSSLDAIFLAHALVVLQALPESSILRTNFLEHANLVRYVQRCKTELIVAGTSASNDPYFHADPSSSASRGRSTSSSKPKTKPKRQPPTKEEKTLRRRAKYFVVAQLVAVVLFVSVLSGYRNNAADMELDNDDLGYE

SEQ ID NO: 53345 - protein, 226 aa, Glycine max
  peptide (1)..(226): Ceres Seq. ID no. 14306796
  misc_feature (1)..(222): Homolog of NCBI NO: 18398935 NR Description: expressed protein [Arabidopsis thaliana]
MATTWLADALEYELWVGCDGSSAYSIYYSDLPWPIGKVLFWKKAYWVKQKHGISEENVEVKEEEIYGRANSAYDALSTWLGEQNYLFENRPSSLDAIFLAHALVVLQALPESSILRTNFLEHANLVRYVQRCKTELIVAGTSASNDPYFHADPSSSASRGRSTSSSKPKTKPKRQPPTKEEKTLRRRAKYFVVAQLVAVVLFVSVLSGYRNNAADMELDNDDLGYE

SEQ ID NO: 53346 - DNA, 1225 bp, Glycine max
  misc_feature (1)..(1225): Ceres Seq. ID no. 14304245
ggtgagatatttgcaattatcttgggttgcaatggagggagtgttgcttcccgtgtgtccttcaccttcttcttgctctgcaactcctaaacccagaatccccattccgctacgctcttctttcccttctccattattacacaaccgtttcttctcccaaaacgcagcgttttcccttcgcaactctctccgcacttccaccttcgcactcgcgcaacacgaagctcccgttctgggcaaacccgataacaacaacaactcttcaccctatcttcccaaaatcgataagacgggacgcttctgcagccccagagccgccagagaactcgcactgtcgataatctatgctgcgtgcttggagggaatggacccggttcggctctttgagaaacggatgaatgcgcggcgagaagccggatataaatttaatgaggaaaagttgttggagtataatcatatgagtttcggagggccgcctgttactgttggatcggacgaagaagcaaatgagctactgcggcacattgaagaagagtctgccattgaagcagaagtccttacagctcctccaaagctggtatacaacaaactgattttaagattcaccaagaaactattggttgcagtcagggatacatgggacagtcatgtcctggtcattaacaaaattgccccacaaaattggaagaatgaaccagctgcgaagattttagagctgtctattcttcacttggccatgtccgaaatggaagtgctagaaacgagacaccaaatcgtcattaatgaggcggtagatcttgctaaacggttttgtgatggagcagcccctcgcatcattaacggctgtctccgcacatttttccgagaactggagcttgaagcatcgaataaccaggtttagttgaccttgatgtacattgtcagattgtctacacgttgtagttcttgggtcattgaaaagcttgacgtgcatttcaggaaatatcacctatgggggtttgataatttgcatattgacctgtagacaaggcctgagttaggaatcgtgttgtttgaaactggtagagttattatgacattttgtttttacagcagttattatgacattgcaatattgtaatcgtgtatatgtatattttatgtatgctagctcgtgggatttgtaataaattttgtttaagttaaagaacttttgaaatttaatttaattaagtacttttgaaac

SEQ ID NO: 53347 - protein, 299 aa, Glycine max
  peptide (1)..(299): Ceres Seq. ID no. 14304246
  misc_feature (91)..(160): Pfam Name: NusB family Pfam Description: NusB family
  misc_feature (69)..(281): Homolog of NCBI NO: 18483231 NR Description: hypothetical protein M3E9.200 [Sorghum bicolor]
  misc_feature (39)..(295): Homolog of NCBI NO: 31415975 NR Description: unknown protein [Oryza sativa (japonica
  misc_feature (91)..(289): Homolog of NCBI NO: 7486786 NR Description: hypothetical protein M3E9.200 - Arabidopsis
  misc_feature (11)..(289): Homolog of NCBI NO: 18416739 NR Description: expressed protein [Arabidopsis thaliana]
VRYLQLSWVAMEGVLLPVCPSPSSCSATPKPRIPIPLRSSFPSPLLHNRFFSQNAAFSLRNSLRTSTFALAQHEAPVLGKPDNNNNSSPYLPKIDKTGRFCSPRAARELALSIIYAACLEGMDPVRLFEKRMNARREAGYKFNEEKLLEYNHMSFGGPPVTVGSDEEANELLRHIEEESAIEAEVLTAPPKLVYNKLILRFTKKLLVAVRDTWDSHVLVINKIAPQNWKNEPAAKILELSILHLAMSEMEVLETRHQIVINEAVDLAKRFCDGAAPRIINGCLRTFFRELELEASNNQV

SEQ ID NO: 53348 - protein, 289 aa, Glycine max
  peptide (1)..(289): Ceres Seq. ID no. 14304247
  misc_feature (81)..(150): Pfam Name: NusB family Pfam Description: NusB family
  misc_feature (59)..(271): Homolog of NCBI NO: 18483231 NR Description: hypothetical protein M3E9.200 [Sorghum bicolor]
  misc_feature (29)..(285): Homolog of NCBI NO: 31415975 NR Description: unknown protein [Oryza sativa (japonica
  misc_feature (81)..(279): Homolog of NCBI NO: 7486786 NR Description: hypothetical protein M3E9.200 - Arabidopsis
  misc_feature (1)..(279): Homolog of NCBI NO: 18416739 NR Description: expressed protein [Arabidopsis thaliana]
MEGVLLPVCPSPSSCSATPKPRIPIPLRSSFPSPLLHNRFFSQNAAFSLRNSLRTSTFALAQHEAPVLGKPDNNNNSSPYLPKIDKTGRFCSPRAARELALSIIYAACLEGMDPVRLFEKRMNARREAGYKFNEEKLLEYNHMSFGGPPVTVGSDEEANELLRHIEEESAIEAEVLTAPPKLVYNKLILRFTKKLLVAVRDTWDSHVLVINKIAPQNWKNEPAAKILELSILHLAMSEMEVLETRHQIVINEAVDLAKRFCDGAAPRIINGCLRTFFRELELEASNNQV

SEQ ID NO: 53349 - protein, 178 aa, Glycine max
  peptide (1)..(178): Ceres Seq. ID no. 14304248
  misc_feature (1)..(160): Homolog of NCBI NO: 18483231 NR Description: hypothetical protein M3E9.200 [Sorghum bicolor]
  misc_feature (1)..(174): Homolog of NCBI NO: 31415975 NR Description: unknown protein [Oryza sativa (japonica
  misc_feature (1)..(168): Homolog of NCBI NO: 7486786 NR Description: hypothetical protein M3E9.200 - Arabidopsis
  misc_feature (1)..(168): Homolog of NCBI NO: 18416739 NR Description: expressed protein [Arabidopsis thaliana]
MDPVRLFEKRMNARREAGYKFNEEKLLEYNHMSFGGPPVTVGSDEEANELLRHIEEESAIEAEVLTAPPKLVYNKLILRFTKKLLVAVRDTWDSHVLVINKIAPQNWKNEPAAKILELSILHLAMSEMEVLETRHQIVINEAVDLAKRFCDGAAPRIINGCLRTFFRELELEASNNQV

SEQ ID NO: 53350 - DNA, 1327 bp, Glycine max
  misc_feature (1)..(1327): Ceres Seq. ID no. 14306737
agcaacaaatgatgtcattccttgcaaaggctgttcagagtcctggttttttagctcaatttgtacaacagcaaaatgagagtagtagacgcataacggaggcaaataaaaaacgccggcttaagcaggagggtattggtgaaatggaacatactgctgcttctgatggccaaattgttaaatatcaacctctgataaatgaagcagcaaaagcaatgctgaggcaaatgatgaaattggatacttctcgactagaatcttttagtaataacgctgataattacttgattggtgatcattcatcatcatccggtgcaacggacaggggaaactctttgagccggacttctggagtaacacttcaagtggtccctctgactacaatccagtcttctcacattccatctgcaacagggataggggatgacccttcaacaggaaaatctgagattctatctactcctcaagttgtagcctgtgatgaagttacgaaagctcagtactctaatgtaaatgtttcggttggagaatctaatgcacctgctatccctgttactcaaacagatgaaatcatgcgggacctctctacaataccagacatagtggcaggaaatattcttgatattcctcaagaaaattatatggcacctgagacaggcggtgaaggatatatggatcctacttcatttggagtgaatgtgtcattgcccattgattttgatagtatttcacctgaagcagacattgatgatttgttgaacaatcctcacttttgggatgatattttgcgaactccagtgtcagaggagattgatacgaatgatgctgaagtattcaaggagaatgaggtgcagccaatggaaaatggattggacaaatcacaaaatatggaccaacttactgagcagatgggcctactttcttctgatgccaaaagaatttgagtgtattatgaaagtgtacattattaatatttcatattgtgcaaggtaaccttagcctagacaatgggttatgttgttttagctaattacacctccaattgctcactcaggactcacatgcttttttgtttggtctggtttagtttgtgcatatgagaccgaacctaattgcttttgtagatttacgttcatttttccttagacccgtacctggttctgttctattgtcatcccttaatgtaagtaaggttctaagaggctagcttattgatgtgaagcgtcttagaaatgtgtaattttttaaaagtcatatcaacagggattcataataggatgatagtgtaaaataagtttatattatcaagtgcatgaccattaaactt

SEQ ID NO: 53351 - protein, 313 aa, Glycine max
  peptide (1)..(313): Ceres Seq. ID no. 14306738
  misc_feature (1)..(199): Homolog of NCBI NO: 429155 NR Description: heat shock factor [Arabidopsis thaliana]
  misc_feature (1)..(135): Homolog of NCBI NO: 15228440 NR Description: heat shock transcription factor 2 (HSF2)
  misc_feature (1)..(135): Homolog of NCBI NO: 6624612 NR Description: heat shock factor 2 [Arabidopsis thaliana]
  misc_feature (1)..(146): Homolog of NCBI NO: 25296101 NR Description: heat shock transcription factor HSF3
  misc_feature (1)..(231): Homolog of NCBI NO: 15223168 NR Description: heat shock transcription factor family
  misc_feature (1)..(146): Homolog of NCBI NO: 30686034 NR Description: heat shock transcription factor 3 (HSF3)
  misc_feature (1)..(146): Homolog of NCBI NO: 11357325 NR Description: Heat Shock Factor 3 - Arabidopsis thaliana
  misc_feature (1)..(308): Homolog of NCBI NO: 29126355 NR Description: putative heat shock transcription factor
  misc_feature (1)..(304): Homolog of NCBI NO: 11386827 NR Description: Heat shock factor protein HSF8 (Heat shock
  misc_feature (1)..(304): Homolog of NCBI NO: 729775 NR Description: HEAT SHOCK FACTOR PROTEIN HSF8 (HEAT SHOCK
QQMMSFLAKAVQSPGFLAQFVQQQNESSRRITEANKKRRLKQEGIGEMEHTAASDGQIVKYQPLINEAAKAMLRQMMKLDTSRLESFSNNADNYLIGDHSSSSGATDRGNSLSRTSGVTLQVVPLTTIQSSHIPSATGIGDDPSTGKSEILSTPQVVACDEVTKAQYSNVNVSVGESNAPAIPVTQTDEIMRDLSTIPDIVAGNILDIPQENYMAPETGGEGYMDPTSFGVNVSLPIDFDSISPEADIDDLLNNPHFWDDILRTPVSEEIDTNDAEVFKENEVQPMENGLDKSQNMDQLTEQMGLLSSDAKRI

SEQ ID NO: 53352 - protein, 311 aa, Glycine max
  peptide (1)..(311): Ceres Seq. ID no. 14306739
  misc_feature (1)..(197): Homolog of NCBI NO: 429155 NR Description: heat shock factor [Arabidopsis thaliana]
  misc_feature (1)..(133): Homolog of NCBI NO: 15228440 NR Description: heat shock transcription factor 2 (HSF2)
  misc_feature (1)..(133): Homolog of NCBI NO: 6624612 NR Description: heat shock factor 2 [Arabidopsis thaliana]
  misc_feature (1)..(144): Homolog of NCBI NO: 25296101 NR Description: heat shock transcription factor HSF3
  misc_feature (1)..(229): Homolog of NCBI NO: 15223168 NR Description: heat shock transcription factor family
  misc_feature (1)..(144): Homolog of NCBI NO: 30686034 NR Description: heat shock transcription factor 3 (HSF3)
  misc_feature (1)..(144): Homolog of NCBI NO: 11357325 NR Description: Heat Shock Factor 3 - Arabidopsis thaliana
  misc_feature (1)..(306): Homolog of NCBI NO: 29126355 NR Description: putative heat shock transcription factor
  misc_feature (1)..(302): Homolog of NCBI NO: 11386827 NR Description: Heat shock factor protein HSF8 (Heat shock
  misc_feature (1)..(302): Homolog of NCBI NO: 729775 NR Description: HEAT SHOCK FACTOR PROTEIN HSF8 (HEAT SHOCK
MMSFLAKAVQSPGFLAQFVQQQNESSRRITEANKKRRLKQEGIGEMEHTAASDGQIVKYQPLINEAAKAMLRQMMKLDTSRLESFSNNADNYLIGDHSSSSGATDRGNSLSRTSGVTLQVVPLTTIQSSHIPSATGIGDDPSTGKSEILSTPQVVACDEVTKAQYSNVNVSVGESNAPAIPVTQTDEIMRDLSTIPDIVAGNILDIPQENYMAPETGGEGYMDPTSFGVNVSLPIDFDSISPEADIDDLLNNPHFWDDILRTPVSEEIDTNDAEVFKENEVQPMENGLDKSQNMDQLTEQMGLLSSDAKRI

SEQ ID NO: 53353 - protein, 310 aa, Glycine max
  peptide (1)..(310): Ceres Seq. ID no. 14306740
  misc_feature (1)..(196): Homolog of NCBI NO: 429155 NR Description: heat shock factor [Arabidopsis thaliana]
  misc_feature (1)..(132): Homolog of NCBI NO: 15228440 NR Description: heat shock transcription factor 2 (HSF2)
  misc_feature (1)..(132): Homolog of NCBI NO: 6624612 NR Description: heat shock factor 2 [Arabidopsis thaliana]
  misc_feature (1)..(143): Homolog of NCBI NO: 25296101 NR Description: heat shock transcription factor HSF3
  misc_feature (1)..(228): Homolog of NCBI NO: 15223168 NR Description: heat shock transcription factor family
  misc_feature (1)..(143): Homolog of NCBI NO: 30686034 NR Description: heat shock transcription factor 3 (HSF3)
  misc_feature (1)..(143): Homolog of NCBI NO: 11357325 NR Description: Heat Shock Factor 3 - Arabidopsis thaliana
  misc_feature (1)..(305): Homolog of NCBI NO: 29126355 NR Description: putative heat shock transcription factor
  misc_feature (1)..(301): Homolog of NCBI NO: 11386827 NR Description: Heat shock factor protein HSF8 (Heat shock
  misc_feature (1)..(301): Homolog of NCBI NO: 729775 NR Description: HEAT SHOCK FACTOR PROTEIN HSF8 (HEAT SHOCK
MSFLAKAVQSPGFLAQFVQQQNESSRRITEANKKRRLKQEGIGEMEHTAASDGQIVKYQPLINEAAKAMLRQMMKLDTSRLESFSNNADNYLIGDHSSSSGATDRGNSLSRTSGVTLQVVPLTTIQSSHIPSATGIGDDPSTGKSEILSTPQVVACDEVTKAQYSNVNVSVGESNAPAIPVTQTDEIMRDLSTIPDIVAGNILDIPQENYMAPETGGEGYMDPTSFGVNVSLPIDFDSISPEADIDDLLNNPHFWDDILRTPVSEEIDTNDAEVFKENEVQPMENGLDKSQNMDQLTEQMGLLSSDAKRI

SEQ ID NO: 53354 - DNA, 1284 bp, Glycine max
  misc_feature (1)..(1284): Ceres Seq. ID no. 14306797
gtcagaactgccaacagatagccccatctctttctccttctccctaaacctcgaactcagcacccccatccactggtgattgtttgattgagccttgaagaaatggaccacagcgctgatgcacatcgcacggacttgatgaccataacgcggttcgtgctgaacgagcaatccaagcacccggagtcacgcggcgatttcaccatcttgctcagtcacattgttctcggttgcaagttcgtttgttccgctgtcagcaaggctggtcttgctaaacttattggactcgctggagaaaccaatgttcagggtgaagaacagaagaaacttgatgttctttccaatgaggttttcatcaaggctctcataagcagtggccgaacatgcatcttggtttctgaagaagacgaagaagcgataattgtggagccttctaagcgcggaaagtactgtgtttgctttgacccattggatggctcgtccaacattgattgtggggtttccattggcacaatttttggggtttatgcgttgaaagatgtccatgaaccaaccatagaagatgtcctgcttcctgggaagaacatggtggcagctggttactgtatgtatggaagctcttgcacgcttgtgttaagcactggagcaggtgttaatggtttcacccttgacccatctcttggtgagttcatcctaactcaccctaacattaagatcccaaagaaaggtaaaatttattcagtgaatgaaggaaatgccaaaaactgggatcgtcctactgctacttacgttgaaaaatgcaagtttcctgaagatggttcatcaccaaagtctctaagatatattggaagcatggtagctgatgttcatcgtacgttgctttatggaggcatctttttgtaccctgctgacaaaaaaagtccaaatggaaaacttcgtgtcctgtatgaagtcttcccaatgtcattcttgatggaacaggcaggaggacagtctttcacgggcaaggaacgggcacttgatttagttccaacgaagttgcatgagcgatctcccatattccttggtagctatgatgatgttgaggaaatcaaagctctttatgctgctgctgagggtgaacaagaatgaaattggaaaggtttcttgtatctttcgctacttacaagcgcttgttttctaattgttactagcaagtgcttataagaaaactagttatctggtcatgtatatgttaataaaattggttgatgtgcctgtcagggctatagaatttatttagat

SEQ ID NO: 53355 - protein, 342 aa, Glycine max
  peptide (1)..(342): Ceres Seq. ID no. 14306798
  misc_feature (13)..(336): Pfam Name: Fructose-1-6-bisphosphatase Pfam Description: Fructose-1-6-bisphosphatase
  misc_feature (10)..(340): Homolog of NCBI NO: 3293553 NR Description: fructose-1,6-bisphosphatase [Homo sapiens]
  misc_feature (1)..(338): Homolog of NCBI NO: 15218438 NR Description: fructose 1,6-bisphosphatase -related [Arabidopsis
  misc_feature (1)..(338): Homolog of NCBI NO: 20278691 NR Description: cytoplasmic fructose-1,6-bisphosphatase [Pisum
  misc_feature (13)..(338): Homolog of NCBI NO: 5305145 NR Description: fructose-1,6-bisphosphatase [Pisum sativum]
  misc_feature (1)..(338): Homolog of NCBI NO: 11139718 NR Description: cytosolic fructose-1,6-bisphosphatase [Beta
  misc_feature (1)..(338): Homolog of NCBI NO: 4741918 NR Description: cytosolic fructose-1,6-bisphosphatase [Musa
  misc_feature (1)..(338): Homolog of NCBI NO: 119748 NR Description: FRUCTOSE-1,6-BISPHOSPHATASE, CYTOSOLIC
  misc_feature (1)..(336): Homolog of NCBI NO: 6684169 NR Description: fructose-1,6-bisphosphatase [Porteresia coarctata]
  misc_feature (1)..(338): Homolog of NCBI NO: 1169586 NR Description: FRUCTOSE-1,6-BISPHOSPHATASE, CYTOSOLIC
  misc_feature (1)..(336): Homolog of NCBI NO: 3913640 NR Description: FRUCTOSE-1,6-BISPHOSPHATASE, CYTOSOLIC
MDHSADAHRTDLMTITRFVLNEQSKHPESRGDFTILLSHIVLGCKFVCSAVSKAGLAKLIGLAGETNVQGEEQKKLDVLSNEVFIKALISSGRTCILVSEEDEEAIIVEPSKRGKYCVCFDPLDGSSNIDCGVSIGTIFGVYALKDVHEPTIEDVLLPGKNMVAAGYCMYGSSCTLVLSTGAGVNGFTLDPSLGEFILTHPNIKIPKKGKIYSVNEGNAKNWDRPTATYVEKCKFPEDGSSPKSLRYIGSMVADVHRTLLYGGIFLYPADKKSPNGKLRVLYEVFPMSFLMEQAGGQSFTGKERALDLVPTKLHERSPIFLGSYDDVEEIKALYAAAEGEQE

SEQ ID NO: 53356 - protein, 330 aa, Glycine max
  peptide (1)..(330): Ceres Seq. ID no. 14306799
  misc_feature (1)..(324): Pfam Name: Fructose-1-6-bisphosphatase Pfam Description: Fructose-1-6-bisphosphatase
  misc_feature (1)..(328): Homolog of NCBI NO: 3293553 NR Description: fructose-1,6-bisphosphatase [Homo sapiens]
  misc_feature (1)..(326): Homolog of NCBI NO: 15218438 NR Description: fructose 1,6-bisphosphatase -related [Arabidopsis
  misc_feature (1)..(326): Homolog of NCBI NO: 20278691 NR Description: cytoplasmic fructose-1,6-bisphosphatase [Pisum
  misc_feature (1)..(326): Homolog of NCBI NO: 5305145 NR Description: fructose-1,6-bisphosphatase [Pisum sativum]
  misc_feature (1)..(326): Homolog of NCBI NO: 11139718 NR Description: cytosolic fructose-1,6-bisphosphatase [Beta
  misc_feature (1)..(326): Homolog of NCBI NO: 4741918 NR Description: cytosolic fructose-1,6-bisphosphatase [Musa
  misc_feature (1)..(326): Homolog of NCBI NO: 119748 NR Description: FRUCTOSE-1,6-BISPHOSPHATASE, CYTOSOLIC
  misc_feature (1)..(324): Homolog of NCBI NO: 6684169 NR Description: fructose-1,6-bisphosphatase [Porteresia coarctata]
  misc_feature (1)..(326): Homolog of NCBI NO: 1169586 NR Description: FRUCTOSE-1,6-BISPHOSPHATASE, CYTOSOLIC
  misc_feature (1)..(324): Homolog of NCBI NO: 3913640 NR Description: FRUCTOSE-1,6-BISPHOSPHATASE, CYTOSOLIC
MTITRFVLNEQSKHPESRGDFTILLSHIVLGCKFVCSAVSKAGLAKLIGLAGETNVQGEEQKKLDVLSNEVFIKALISSGRTCILVSEEDEEAIIVEPSKRGKYCVCFDPLDGSSNIDCGVSIGTIFGVYALKDVHEPTIEDVLLPGKNMVAAGYCMYGSSCTLVLSTGAGVNGFTLDPSLGEFILTHPNIKIPKKGKIYSVNEGNAKNWDRPTATYVEKCKFPEDGSSPKSLRYIGSMVADVHRTLLYGGIFLYPADKKSPNGKLRVLYEVFPMSFLMEQAGGQSFTGKERALDLVPTKLHERSPIFLGSYDDVEEIKALYAAAEGEQE

SEQ ID NO: 53357 - protein, 181 aa, Glycine max
  peptide (1)..(181): Ceres Seq. ID no. 14306800
  misc_feature (1)..(175): Pfam Name: Fructose-1-6-bisphosphatase Pfam Description: Fructose-1-6-bisphosphatase
  misc_feature (1)..(179): Homolog of NCBI NO: 3293553 NR Description: fructose-1,6-bisphosphatase [Homo sapiens]
  misc_feature (1)..(177): Homolog of NCBI NO: 15218438 NR Description: fructose 1,6-bisphosphatase -related [Arabidopsis
  misc_feature (1)..(177): Homolog of NCBI NO: 20278691 NR Description: cytoplasmic fructose-1,6-bisphosphatase [Pisum
  misc_feature (1)..(177): Homolog of NCBI NO: 5305145 NR Description: fructose-1,6-bisphosphatase [Pisum sativum]
  misc_feature (1)..(177): Homolog of NCBI NO: 11139718 NR Description: cytosolic fructose-1,6-bisphosphatase [Beta
  misc_feature (1)..(177): Homolog of NCBI NO: 4741918 NR Description: cytosolic fructose-1,6-bisphosphatase [Musa
  misc_feature (1)..(177): Homolog of NCBI NO: 119748 NR Description: FRUCTOSE-1,6-BISPHOSPHATASE, CYTOSOLIC
  misc_feature (1)..(175): Homolog of NCBI NO: 6684169 NR Description: fructose-1,6-bisphosphatase [Porteresia coarctata]
  misc_feature (1)..(177): Homolog of NCBI NO: 1169586 NR Description: FRUCTOSE-1,6-BISPHOSPHATASE, CYTOSOLIC
  misc_feature (1)..(175): Homolog of NCBI NO: 3913640 NR Description: FRUCTOSE-1,6-BISPHOSPHATASE, CYTOSOLIC
MVAAGYCMYGSSCTLVLSTGAGVNGFTLDPSLGEFILTHPNIKIPKKGKIYSVNEGNAKNWDRPTATYVEKCKFPEDGSSPKSLRYIGSMVADVHRTLLYGGIFLYPADKKSPNGKLRVLYEVFPMSFLMEQAGGQSFTGKERALDLVPTKLHERSPIFLGSYDDVEEIKALYAAAEGEQE

SEQ ID NO: 53358 - DNA, 1461 bp, Glycine max
  misc_feature (1)..(1461): Ceres Seq. ID no. 14304941
gcaccctcgtacaggcggcacagcttcgtaccccgttctttttctcactgacaaccctaacctaaagtctccgctgcgcacagctgctccgccgtgactctgtggtcgacggtataaagtatatgccaaactaatgttaatttctcttcctctttactccatcattcatcaatctatcatatgtgaactttcaaaaatggtggatgtggttctgaatgaaaccagattatatgattggcatttatgcaaaagttgaatgatctaatgccgattaaatttccgagctaacccctgtctccgcattttcttcagattgtgttatatgcattgttgcagatgaaggtgaaaaagcagaagaggcacaggaagattttgacgttttacactgcttgcttcggttttcggaagccttacaaggttctatgtgatggcacatttgttcatcaccttcttgtgaatcgaataacccctgctgacacggccattggcaatgtcctcagtgctacgatcaagctctacacaacaagatgtgttctagctgagttgaaacgacttggtagctcgtattctgaggctctcgaggcagctcataaacttatagttgcaagatgtgagcatgaaaaatgtaagagcgcagatgcttgcatcatggaggttgttggagaaaaaaattctgagcatttctttgttgctagtcaggacactgacctgcggaaacagttgcaagaggtacctggtgtgcctctcatatttggtcttagaaatgctcttttccttgaatctccatctgcatttcagcggcaatatgtcaaaacttctgaagaaggacgattacatatgacacagaaggagtaccagatatttaaggatagggtaatgaatagattgactggtgaggaagccaacaattccattactgaaataatggaaattgaagattcagaagatcagaccataaatgtgcaggcagtagagaagggtattacctcaaggaatcgtatggaaatcaaggatgaacctcagttcaagagaaaaagagctaagggtccaaacccactttcatgcaagaagaagaaaagtgaaaaacaaaatattggtcctttgaaggaaacgaatgaagacaacacagtgaagagaagtaggaaaaggaagaggtcacataaacaaaaaatggcaacagaaacaagcagttaggtccatatatatatatatatatatatatatatatatacacagttacaaataggtatttttagaagagctccttgactttactgcttctgttgagtcgagagaaaagcaagttttaaatccatgctgacatggaaggggaagtgtatcgagattagttgcttgttgaattttatactgtgtctattttgctggctatcgtatttttacctacggatagccaaatagccgttgttcacggtggaaatagattctgatatttatgatctt

SEQ ID NO: 53359 - protein, 285 aa, Glycine max
  peptide (1)..(285): Ceres Seq. ID no. 14304942
  misc_feature (53)..(150): Pfam Name: Protein of unknown function, DUF652 Pfam Description: Protein of unknown function, DUF652
  misc_feature (1)..(139): Homolog of NCBI NO: 17552478 NR Description: protein required for cell viability like (26.3
  misc_feature (1)..(159): Homolog of NCBI NO: 24580927 NR Description: CG17652-PA [Drosophila melanogaster]
  misc_feature (1)..(236): Homolog of NCBI NO: 6324577 NR Description: Protein required for cell viability; Yor004wp
  misc_feature (1)..(251): Homolog of NCBI NO: 31222167 NR Description: ENSANGP00000006696 [Anopheles gambiae]
  misc_feature (1)..(225): Homolog of NCBI NO: 19075891 NR Description: conserved protein; putative tRNA synthetase class
  misc_feature (1)..(252): Homolog of NCBI NO: 14150118 NR Description: hypothetical protein MGC14595 [Homo sapiens]
  misc_feature (1)..(251): Homolog of NCBI NO: 26335161 NR Description: unnamed protein product [Mus musculus]
  misc_feature (1)..(251): Homolog of NCBI NO: 21313442 NR Description: RIKEN cDNA D530033C11 [Mus musculus]
  misc_feature (1)..(272): Homolog of NCBI NO: 25408336 NR Description: hypothetical protein At2g34570 [imported] -
  misc_feature (1)..(282): Homolog of NCBI NO: 30686117 NR Description: expressed protein [Arabidopsis thaliana]
MKVKKQKRHRKILTFYTACFGFRKPYKVLCDGTFVHHLLVNRITPADTAIGNVLSATIKLYTTRCVLAELKRLGSSYSEALEAAHKLIVARCEHEKCKSADACIMEVVGEKNSEHFFVASQDTDLRKQLQEVPGVPLIFGLRNALFLESPSAFQRQYVKTSEEGRLHMTQKEYQIFKDRVMNRLTGEEANNSITEIMEIEDSEDQTINVQAVEKGITSRNRMEIKDEPQFKRKRAKGPNPLSCKKKKSEKQNIGPLKETNEDNTVKRSRKRKRSHKQKMATETSS

SEQ ID NO: 53360 - protein, 181 aa, Glycine max
  peptide (1)..(181): Ceres Seq. ID no. 14304943
  misc_feature (1)..(35): Homolog of NCBI NO: 17552478 NR Description: protein required for cell viability like (26.3
  misc_feature (1)..(55): Homolog of NCBI NO: 24580927 NR Description: CG17652-PA [Drosophila melanogaster]
  misc_feature (1)..(132): Homolog of NCBI NO: 6324577 NR Description: Protein required for cell viability; Yor004wp
  misc_feature (1)..(147): Homolog of NCBI NO: 31222167 NR Description: ENSANGP00000006696 [Anopheles gambiae]
  misc_feature (1)..(121): Homolog of NCBI NO: 19075891 NR Description: conserved protein; putative tRNA synthetase class
  misc_feature (1)..(148): Homolog of NCBI NO: 14150118 NR Description: hypothetical protein MGC14595 [Homo sapiens]
  misc_feature (1)..(147): Homolog of NCBI NO: 26335161 NR Description: unnamed protein product [Mus musculus]
  misc_feature (1)..(147): Homolog of NCBI NO: 21313442 NR Description: RIKEN cDNA D530033C11 [Mus musculus]
  misc_feature (1)..(168): Homolog of NCBI NO: 25408336 NR Description: hypothetical protein At2g34570 [imported] -
  misc_feature (1)..(178): Homolog of NCBI NO: 30686117 NR Description: expressed protein [Arabidopsis thaliana]
MEVVGEKNSEHFFVASQDTDLRKQLQEVPGVPLIFGLRNALFLESPSAFQRQYVKTSEEGRLHMTQKEYQIFKDRVMNRLTGEEANNSITEIMEIEDSEDQTINVQAVEKGITSRNRMEIKDEPQFKRKRAKGPNPLSCKKKKSEKQNIGPLKETNEDNTVKRSRKRKRSHKQKMATETSS

SEQ ID NO: 53361 - DNA, 1677 bp, Glycine max
  misc_feature (1)..(1677): Ceres Seq. ID no. 15226862
cagctacgtaggccccccccccgctttgttaattttatttgtgctatcacgcctatcatacattattgtattgtaccactttataaagcagagggatttaaagcataagaatgcgtcgctgccttagttcatgttttgtcgcgagaggtaaggacaaggatgctcaggggaagagggcacaaccccagactcacactgtaaaaaaagttcatgtgtccaccgatgataatggccttagtaatagtggctcacactcgccaccaagagagaccaaaccaattgggctttacggatacgtgcaagagagacatggacatagtctctacacgtggaagcaagccttcttgaaactagagagtggttatctcttatgttatagtactggtgtctcgggttccccctgcaagatgctccctctgcatatatgcatggttcgcccgttgaaacgttctggcttccgggtgatctgtgccactcaattctcgctcacctttagggctaaagatgtagcggaaatgagagaatgggtagctgagattcaggctggcattgccgaagccttgaccgctcagtctgccccagctgcctgtactggtagagatacgttgtcagcattgcgaagcaagcatactgccaacagatactgtgctgactgtggagctccagatcctacgtgggtatcgacttccctgggatcattaatttgtatcgaatgctcaggagtacacagaagcttagggtcacatatatcgaaagtgagatcatttgagttggaccattgggatccaaaagacgtgaagactgacgggatcggaaattctgaagttaatacattgtatgaggcttccatacctaaacactgtaccaagccagacattaattccgacagagagacaagagaaaactggatcatggataagtatgtgcacaagcgcttcacaaagaagaccttgcacacaaacaatactcgccgtccatccacacctaatattaccctctctgttgttcctaaatctggaagcacttctaatcttcctgatgtctcttctcttcctctttccaacgccacatctacggccgccggtgccccatcactctctctcactctctctccaaaagagtccctctctccatcgccccatttggctcatgacttcacaagtaaactgccacctagtttacaaggcggtgtagttaggccacgtacgcctgactgtctaccgacttcccatatcggttccaatgtctttaataagaagatgccatacggagccgccaccgcagtggacttatcagcaaggagaggatcagtgggatcattcttatatgcccccaacaacactcgaacttctgcccgccgtagttcgatgtttcaaaatcagcgcgtaatgtagaaagattctctctctttctcattttttctattattctctcatccatccattccgctactattcttgggttctctatcggcttaaatatttttgttttatcttatatatatcttttttatcggaacacccctctggatagtagttttttttttctctcattcatgaatgattgaatatggactattgtaaagattcttctgagctttttgctctactttgtaaaaacttgtaatttttgtatcactacattcaaccccaaattaattattagtaaataatttct

SEQ ID NO: 53362 - protein, 427 aa, Glycine max
  peptide (1)..(427): Ceres Seq. ID no. 15226863
  misc_feature (176)..(279): Pfam Name: Putative GTPase activating protein for Arf Pfam Description: Putative GTPase activating protein for Arf
  misc_feature (152)..(289): Homolog of NCBI NO: 38079084 NR Description: centaurin, beta 5 [Mus musculus]
  misc_feature (128)..(323): Homolog of NCBI NO: 24584226 NR Description: centaurin gamma 1A CG31811-PC [Drosophila
  misc_feature (61)..(287): Homolog of NCBI NO: 37077982 NR Description: 130-kDa phosphatidylinositol ARF1 GTPase-activating protein (PIP2-dependent ARF1 GAP) factor-directed GTPase-activating protein 1) (ARF
  misc_feature (61)..(287): Homolog of NCBI NO: 6330854 NR Description: KIAA1249 protein [Homo sapiens]
  misc_feature (103)..(276): Homolog of NCBI NO: 28571836 NR Description: centaurin beta 1A CG6742-PB [Drosophila
  misc_feature (176)..(291): Homolog of NCBI NO: 21594052 NR Description: putative GTPase activating protein [Arabidopsis
  misc_feature (176)..(291): Homolog of NCBI NO: 18415638 NR Description: zinc finger and C2 domain protein (ZAC)
  misc_feature (61)..(276): Homolog of NCBI NO: 17738139 NR Description: centaurin beta 1A CG6742-PA [Drosophila
  misc_feature (61)..(276): Homolog of NCBI NO: 17861564 NR Description: GH12888p [Drosophila melanogaster]
  misc_feature (103)..(276): Homolog of NCBI NO: 21428352 NR Description: GM06875p [Drosophila melanogaster]
MRRCLSSCFVARGKDKDAQGKRAQPQTHTVKKVHVSTDDNGLSNSGSHSPPRETKPIGLYGYVQERHGHSLYTWKQAFLKLESGYLLCYSTGVSGSPCKMLPLHICMVRPLKRSGFRVICATQFSLTFRAKDVAEMREWVAEIQAGIAEALTAQSAPAACTGRDTLSALRSKHTANRYCADCGAPDPTWVSTSLGSLICIECSGVHRSLGSHISKVRSFELDHWDPKDVKTDGIGNSEVNTLYEASIPKHCTKPDINSDRETRENWIMDKYVHKRFTKKTLHTNNTRRPSTPNITLSVVPKSGSTSNLPDVSSLPLSNATSTAAGAPSLSLTLSPKESLSPSPHLAHDFTSKLPPSLQGGVVRPRTPDCLPTSHIGSNVFNKKMPYGAATAVDLSARRGSVGSFLYAPNNTRTSARRSSMFQNQRVM

SEQ ID NO: 53363 - protein, 328 aa, Glycine max
  peptide (1)..(328): Ceres Seq. ID no. 15226864
  misc_feature (77)..(180): Pfam Name: Putative GTPase activating protein for Arf Pfam Description: Putative GTPase activating protein for Arf
  misc_feature (53)..(190): Homolog of NCBI NO: 38079084 NR Description: centaurin, beta 5 [Mus musculus]
  misc_feature (29)..(224): Homolog of NCBI NO: 24584226 NR Description: centaurin gamma 1A CG31811-PC [Drosophila
  misc_feature (1)..(188): Homolog of NCBI NO: 37077982 NR Description: 130-kDa phosphatidylinositol ARF1 GTPase-activating protein (PIP2-dependent ARF1 GAP) factor-directed GTPase-activating protein 1) (ARF
  misc_feature (1)..(188): Homolog of NCBI NO: 6330854 NR Description: KIAA1249 protein [Homo sapiens]
  misc_feature (4)..(177): Homolog of NCBI NO: 28571836 NR Description: centaurin beta 1A CG6742-PB [Drosophila
  misc_feature (77)..(192): Homolog of NCBI NO: 21594052 NR Description: putative GTPase activating protein [Arabidopsis
  misc_feature (77)..(192): Homolog of NCBI NO: 18415638 NR Description: zinc finger and C2 domain protein (ZAC)
  misc_feature (1)..(177): Homolog of NCBI NO: 17738139 NR Description: centaurin beta 1A CG6742-PA [Drosophila
  misc_feature (1)..(177): Homolog of NCBI NO: 17861564 NR Description: GH12888p [Drosophila melanogaster]
  misc_feature (4)..(177): Homolog of NCBI NO: 21428352 NR Description: GM06875p [Drosophila melanogaster]
MLPLHICMVRPLKRSGFRVICATQFSLTFRAKDVAEMREWVAEIQAGIAEALTAQSAPAACTGRDTLSALRSKHTANRYCADCGAPDPTWVSTSLGSLICIECSGVHRSLGSHISKVRSFELDHWDPKDVKTDGIGNSEVNTLYEASIPKHCTKPDINSDRETRENWIMDKYVHKRFTKKTLHTNNTRRPSTPNITLSVVPKSGSTSNLPDVSSLPLSNATSTAAGAPSLSLTLSPKESLSPSPHLAHDFTSKLPPSLQGGVVRPRTPDCLPTSHIGSNVFNKKMPYGAATAVDLSARRGSVGSFLYAPNNTRTSARRSSMFQNQRVM

SEQ ID NO: 53364 - protein, 321 aa, Glycine max
  peptide (1)..(321): Ceres Seq. ID no. 15226865
  misc_feature (70)..(173): Pfam Name: Putative GTPase activating protein for Arf Pfam Description: Putative GTPase activating protein for Arf
  misc_feature (46)..(183): Homolog of NCBI NO: 38079084 NR Description: centaurin, beta 5 [Mus musculus]
  misc_feature (22)..(217): Homolog of NCBI NO: 24584226 NR Description: centaurin gamma 1A CG31811-PC [Drosophila
  misc_feature (1)..(181): Homolog of NCBI NO: 37077982 NR Description: 130-kDa phosphatidylinositol ARF1 GTPase-activating protein (PIP2-dependent ARF1 GAP) factor-directed GTPase-activating protein 1) (ARF
  misc_feature (1)..(181): Homolog of NCBI NO: 6330854 NR Description: KIAA1249 protein [Homo sapiens]
  misc_feature (1)..(170): Homolog of NCBI NO: 28571836 NR Description: centaurin beta 1A CG6742-PB [Drosophila
  misc_feature (70)..(185): Homolog of NCBI NO: 21594052 NR Description: putative GTPase activating protein [Arabidopsis
  misc_feature (70)..(185): Homolog of NCBI NO: 18415638 NR Description: zinc finger and C2 domain protein (ZAC)
  misc_feature (1)..(170): Homolog of NCBI NO: 17738139 NR Description: centaurin beta 1A CG6742-PA [Drosophila
  misc_feature (1)..(170): Homolog of NCBI NO: 17861564 NR Description: GH12888p [Drosophila melanogaster]
  misc_feature (1)..(170): Homolog of NCBI NO: 21428352 NR Description: GM06875p [Drosophila melanogaster]
MVRPLKRSGFRVICATQFSLTFRAKDVAEMREWVAEIQAGIAEALTAQSAPAACTGRDTLSALRSKHTANRYCADCGAPDPTWVSTSLGSLICIECSGVHRSLGSHISKVRSFELDHWDPKDVKTDGIGNSEVNTLYEASIPKHCTKPDINSDRETRENWIMDKYVHKRFTKKTLHTNNTRRPSTPNITLSVVPKSGSTSNLPDVSSLPLSNATSTAAGAPSLSLTLSPKESLSPSPHLAHDFTSKLPPSLQGGVVRPRTPDCLPTSHIGSNVFNKKMPYGAATAVDLSARRGSVGSFLYAPNNTRTSARRSSMFQNQRVM

SEQ ID NO: 53365 - DNA, 1186 bp, Glycine max
  misc_feature (1)..(1186): Ceres Seq. ID no. 14306522
gtagctttaattacttcgggaatatcaacgaaacatcatcgttggtcactttctaccaaaccacaacgctcaaattgttttcttttgctatcactgttaccgaatccctcactttcttcttcatcttcttctcctttgtcacttctcagcaccactcaatctcttcaatttctttcttctactggcaataagcatcagcacactgccacatccagttcccttctgtgtgttcctttcttctactctctccagtccagccaaaacgaagctccttccatcattttcagttttttctgtcaagtgttgttgcttcttctcccaaactcgtccaaacattgctggtaacaagtcccccatgaacttgttgagcagaattgttgggttgggtagcccaagggcagcagaaaacatgaattcaaccactgctcggggaccagatgatgacataccagcaccaggtcaacagtttgcccagtttggtgctggctgcttttggagtgttgagctggccttccagagggcatcaggggtgatcaagacagaagttggttatagccaggggcagttgcataatccaagctatgaggatgtgtgtacggggaccacacaccactcggaggttgtcagggtccaatatgatcccaatgtatgtagctatgagagtttgcttgatgtgttctgggctagacatgatcctaccacactgaatcggcagggaaatgatgtgggaacacaatacaggtctggaatatactattacacacctgaacaagagaaggcagccatagagtctttagaacaacaacagaagaagctgaacaggaagattgttactgagatccttcctgccaagaagttctacagggctgaagaataccatcaacagtaccttgagaaaggagggagatttggttccaagcaatctgcttctaagggatgcaatgatccaattcgatgctatggttagattaatatgactagatgtttaaagcagggagttttcttgataagtatttgttaatataccaataaagtaagtcacaatctacctactctctgtattctatttatagggtgaagatcactatagaatccgaatcagttttagagttatatagtattttatatgtatagttatctaaaaactgattttataacacctttaatcagtgactcttctcgagtt

SEQ ID NO: 53366 - protein, 203 aa, Glycine max
  peptide (1)..(203): Ceres Seq. ID no. 14306523
  misc_feature (37)..(190): Pfam Name: Peptide methionine sulfoxide reductase Pfam Description: Peptide methionine sulfoxide reductase
  misc_feature (9)..(203): Homolog of NCBI NO: 37536896 NR Description: putative peptide methionine sulfoxide reductase
  misc_feature (1)..(203): Homolog of NCBI NO: 21592658 NR Description: peptide methionine sulfoxide reductase (msr)
  misc_feature (1)..(203): Homolog of NCBI NO: 11278974 NR Description: protein-methionine-S-oxide reductase (EC 1.8.4.6)
  misc_feature (1)..(203): Homolog of NCBI NO: 1709690 NR Description: Peptide methionine sulfoxide reductase
  misc_feature (1)..(203): Homolog of NCBI NO: 1279212 NR Description: methionine sulfoxide reductase [Arabidopsis
  misc_feature (1)..(203): Homolog of NCBI NO: 15146324 NR Description: AT4g25130/F13M23_270 [Arabidopsis thaliana]
  misc_feature (1)..(203): Homolog of NCBI NO: 15234942 NR Description: protein-methionine-S-oxide reductase [Arabidopsis
  misc_feature (1)..(203): Homolog of NCBI NO: 21593143 NR Description: protein-methionine-S-oxide reductase [Arabidopsis
  misc_feature (1)..(203): Homolog of NCBI NO: 12230349 NR Description: Peptide methionine sulfoxide reductase
  misc_feature (1)..(203): Homolog of NCBI NO: 29469000 NR Description: peptide methionine sulfoxide reductase; cPMSR
MNLLSRIVGLGSPRAAENMNSTTARGPDDDIPAPGQQFAQFGAGCFWSVELAFQRASGVIKTEVGYSQGQLHNPSYEDVCTGTTHHSEVVRVQYDPNVCSYESLLDVFWARHDPTTLNRQGNDVGTQYRSGIYYYTPEQEKAAIESLEQQQKKLNRKIVTEILPAKKFYRAEEYHQQYLEKGGRFGSKQSASKGCNDPIRCYG

SEQ ID NO: 53367 - protein, 185 aa, Glycine max
  peptide (1)..(185): Ceres Seq. ID no. 14306524
  misc_feature (19)..(172): Pfam Name: Peptide methionine sulfoxide reductase Pfam Description: Peptide methionine sulfoxide reductase
  misc_feature (1)..(185): Homolog of NCBI NO: 37536896 NR Description: putative peptide methionine sulfoxide reductase
  misc_feature (1)..(185): Homolog of NCBI NO: 21592658 NR Description: peptide methionine sulfoxide reductase (msr)
  misc_feature (1)..(185): Homolog of NCBI NO: 11278974 NR Description: protein-methionine-S-oxide reductase (EC 1.8.4.6)
  misc_feature (1)..(185): Homolog of NCBI NO: 1709690 NR Description: Peptide methionine sulfoxide reductase
  misc_feature (1)..(185): Homolog of NCBI NO: 1279212 NR Description: methionine sulfoxide reductase [Arabidopsis
  misc_feature (1)..(185): Homolog of NCBI NO: 15146324 NR Description: AT4g25130/F13M23_270 [Arabidopsis thaliana]
  misc_feature (1)..(185): Homolog of NCBI NO: 15234942 NR Description: protein-methionine-S-oxide reductase [Arabidopsis
  misc_feature (1)..(185): Homolog of NCBI NO: 21593143 NR Description: protein-methionine-S-oxide reductase [Arabidopsis
  misc_feature (1)..(185): Homolog of NCBI NO: 12230349 NR Description: Peptide methionine sulfoxide reductase
  misc_feature (1)..(185): Homolog of NCBI NO: 29469000 NR Description: peptide methionine sulfoxide reductase; cPMSR
MNSTTARGPDDDIPAPGQQFAQFGAGCFWSVELAFQRASGVIKTEVGYSQGQLHNPSYEDVCTGTTHHSEVVRVQYDPNVCSYESLLDVFWARHDPTTLNRQGNDVGTQYRSGIYYYTPEQEKAAIESLEQQQKKLNRKIVTEILPAKKFYRAEEYHQQYLEKGGRFGSKQSASKGCNDPIRCYG

SEQ ID NO: 53368 - protein, 114 aa, Glycine max
  peptide (1)..(114): Ceres Seq. ID no. 14306525
VALITSGISTKHHRWSLSTKPQRSNCFLLLSLLPNPSLSSSSSSPLSLLSTTQSLQFLSSTGNKHQHTATSSSLLCVPFFYSLQSSQNEAPSIIFSFFCQVLLLLLPNSSKHCW

SEQ ID NO: 53369 - DNA, 1409 bp, Glycine max
  misc_feature (1)..(1409): Ceres Seq. ID no. 14311025
gctttgccccttgttttcgttctgctatggcacccgatgccgccgccgccgtcgccgccaacggcaaaaagagaagacgctatcttcctcacaataaggcagtgaagaagaagggttcgtaccctctgcggcctggcgtgcaaggctttttcatcacttgcgatggcggcagagaacaccaagcctctcgtgaagctctcaatattctcgattccttttatgaagagctagttgatggggaaaaggagttacccagcaaacctttaaataaaaaaatcacgtttgctgattctgactcttctagtagtgatggtgaggaagaggaggaggaggaggaggaggaggaggaggaggaggaggaggccgtgcatgatggggatgaggaaaagggggacaaaaagccaaaattggatacttctagtgacgacaatgccagtcatgacgatggagcaggtgaaaaatcagatcctcataacgttgatgaaccgcacactcaggaagaaaataaaacttgtgataataaagggaataatggcaatcttaagactacaaaagggacagcagatgatctaccagctgtgaaacagtgctgcaaaacaaacgtgcctgcatgtaattttagtgacaaagtggaacacaagtctattgataagttaattgaagaagaattcaaagaattgggagacaagaataagaggcgctttgtcaagcttgattctggttgtaatggtgtagtatttgttcaaatgcggaagaaagatggagaccgaagccccaaggatatagttcaccggatagtgacatcagcagcatcaacagggaaacatatgtcaaggtttattttgagaattttgccaattgaagtctcatgttatgcttcaaaggaggaaatttcaagaacaatcaagcctcttgtggaacagtactttcctgtggaaactcaaaatccactcaagtttgctgtactgtatgaggcacgggcaaatactggtgttgacaggatggaaatcatcgatgctgtggcaaagtcagttcctggaccccataaagttgatctcaaaaatcctgataaaactatagtagttgaaattgccaggactgtgtgcttgatcggggtcattgagaaatataaggagctttccaagtacaatctgaggcagttaacatcacgtaaagactaagccttcttgcagcattatagtacctttcccttttgcttcatgttgatactctggtctgtgactgttgttgtcatttggttaagtgttagattagatgactcttgcagctagtctcctttgactgagtgtagttagtaagttctcacaaatcaaacgagaaacccttacatggaagtagagttatatacgctcaatccatttaaatatcatagttggatttacaataag

SEQ ID NO: 53370 - protein, 392 aa, Glycine max
  peptide (1)..(392): Ceres Seq. ID no. 14311026
  misc_feature (282)..(374): Pfam Name: THUMP domain Pfam Description: THUMP domain
  misc_feature (224)..(392): Homolog of NCBI NO: 34365206 NR Description: hypothetical protein [Homo sapiens]
  misc_feature (224)..(392): Homolog of NCBI NO: 12653357 NR Description: hypothetical protein FLJ20274 [Homo sapiens]
  misc_feature (224)..(392): Homolog of NCBI NO: 8923247 NR Description: hypothetical protein FLJ20274 [Homo sapiens]
  misc_feature (232)..(392): Homolog of NCBI NO: 2988398 NR Description: Unknown gene product [Homo sapiens]
  misc_feature (224)..(392): Homolog of NCBI NO: 34859071 NR Description: similar to RIKEN cDNA 6330575P11 [Rattus
  misc_feature (221)..(392): Homolog of NCBI NO: 38174056 NR Description: Unknown (protein for MGC:75804) [Silurana
  misc_feature (224)..(392): Homolog of NCBI NO: 24657540 NR Description: CG15014-PA [Drosophila melanogaster]
  misc_feature (187)..(392): Homolog of NCBI NO: 31198447 NR Description: ENSANGP00000021551 [Anopheles gambiae]
  misc_feature (224)..(392): Homolog of NCBI NO: 21704176 NR Description: RIKEN cDNA 6330575P11 [Mus musculus]
  misc_feature (22)..(389): Homolog of NCBI NO: 18416857 NR Description: expressed protein [Arabidopsis thaliana]
FAPCFRSAMAPDAAAAVAANGKKRRRYLPHNKAVKKKGSYPLRPGVQGFFITCDGGREHQASREALNILDSFYEELVDGEKELPSKPLNKKITFADSDSSSSDGEEEEEEEEEEEEEEEEAVHDGDEEKGDKKPKLDTSSDDNASHDDGAGEKSDPHNVDEPHTQEENKTCDNKGNNGNLKTTKGTADDLPAVKQCCKTNVPACNFSDKVEHKSIDKLIEEEFKELGDKNKRRFVKLDSGCNGVVFVQMRKKDGDRSPKDIVHRIVTSAASTGKHMSRFILRILPIEVSCYASKEEISRTIKPLVEQYFPVETQNPLKFAVLYEARANTGVDRMEIIDAVAKSVPGPHKVDLKNPDKTIVVEIARTVCLIGVIEKYKELSKYNLRQLTSRKD

SEQ ID NO: 53371 - protein, 384 aa, Glycine max
  peptide (1)..(384): Ceres Seq. ID no. 14311027
  misc_feature (274)..(366): Pfam Name: THUMP domain Pfam Description: THUMP domain
  misc_feature (216)..(384): Homolog of NCBI NO: 34365206 NR Description: hypothetical protein [Homo sapiens]
  misc_feature (216)..(384): Homolog of NCBI NO: 12653357 NR Description: hypothetical protein FLJ20274 [Homo sapiens]
  misc_feature (216)..(384): Homolog of NCBI NO: 8923247 NR Description: hypothetical protein FLJ20274 [Homo sapiens]
  misc_feature (224)..(384): Homolog of NCBI NO: 2988398 NR Description: Unknown gene product [Homo sapiens]
  misc_feature (216)..(384): Homolog of NCBI NO: 34859071 NR Description: similar to RIKEN cDNA 6330575P11 [Rattus
  misc_feature (213)..(384): Homolog of NCBI NO: 38174056 NR Description: Unknown (protein for MGC:75804) [Silurana
  misc_feature (216)..(384): Homolog of NCBI NO: 24657540 NR Description: CG15014-PA [Drosophila melanogaster]
  misc_feature (179)..(384): Homolog of NCBI NO: 31198447 NR Description: ENSANGP00000021551 [Anopheles gambiae]
  misc_feature (216)..(384): Homolog of NCBI NO: 21704176 NR Description: RIKEN cDNA 6330575P11 [Mus musculus]
  misc_feature (14)..(381): Homolog of NCBI NO: 18416857 NR Description: expressed protein [Arabidopsis thaliana]
MAPDAAAAVAANGKKRRRYLPHNKAVKKKGSYPLRPGVQGFFITCDGGREHQASREALNILDSFYEELVDGEKELPSKPLNKKITFADSDSSSSDGEEEEEEEEEEEEEEEEAVHDGDEEKGDKKPKLDTSSDDNASHDDGAGEKSDPHNVDEPHTQEENKTCDNKGNNGNLKTTKGTADDLPAVKQCCKTNVPACNFSDKVEHKSIDKLIEEEFKELGDKNKRRFVKLDSGCNGVVFVQMRKKDGDRSPKDIVHRIVTSAASTGKHMSRFILRILPIEVSCYASKEEISRTIKPLVEQYFPVETQNPLKFAVLYEARANTGVDRMEIIDAVAKSVPGPHKVDLKNPDKTIVVEIARTVCLIGVIEKYKELSKYNLRQLTSRKD

SEQ ID NO: 53372 - DNA, 1383 bp, Glycine max
  misc_feature (1)..(1383): Ceres Seq. ID no. 15176387
accgatagcgttccgaattttccgcatagggaaaatgttgattcgacgattgccttggacggcgatttgttttgccgcagcacttcacttccgtttcggcgctaccaatggacttcccattagcattcgcaagcaacttccctcttctctcttctccttcttctgctccagctccctctgctacctgtaatttcatgttcatgccatgcctaggttcatttcactttcggtacatatttagtctcttggcgccaccataagaggctgaggagttgtgtaccattcccttcttgttgggtccactcgtccaagtcccattaacttggatgttgaaccacctgattccaatacgagttaacatataactcgtactagacctaaaaagtggagacattatactttcttcgaggcatgaccttgtggcgacagaaacaattataatattccttgcatcactcacccaatttgaatttcaattttcaactcgtagggtcaccaaaaggatacacctcactcgcactctctgaaacccggtctttacctcgttggaacaccaatcggaaatctcgaagatatcactctgagggctattcgcgtgctgaactcggctgacgtcatactctcagaggacacgaggcactcggggaagttgcttcatcactatcacatcaaaacaccccttatgagttatcacaagttcaatgaatcgcaaagggaacaggttgtgctgaggaggttgaagcagggtgagattgtggctctcataagtgatgctggaatgccaggcatcagtgatcccggtatggagttggccaaactgtgtgtgagtgagaatatcctggttgttccaatccctggtccctgtgctttggtatcagctctttctgcctcgggtttaactactgatgaatttacatttgttggttttcttcctaaacattcggaattgagaagaaaaaggctcatggtttcagctgatcaaactacaactcaaatattttatgttgctcctcacaagctttctcagttccttgatgagagttcttcaatttttggtgatgcaaggcaatgtgttattgctcgggaaatgactaagttacatgaagagcgggatgacaccttggaggaaaatgctagtagagtaaaagccattaaatgcattaagcctgcttttgcagtaccattacacgtagttagtcgaatggatcttgccggtgctgtcttttggtacattttaattccttaactttcagaaactaagaagaattcccaacttacaaggcatatgcttgctttatttatattatgatctcatcacaaattaatacgtgttatattaacatgtaatttatttatttaagtggtattagatttgatatcttc

SEQ ID NO: 53373 - protein, 187 aa, Glycine max
  peptide (1)..(187): Ceres Seq. ID no. 15176388
  misc_feature (1)..(132): Pfam Name: Tetrapyrrole (Corrin/Porphyrin) Methylases Pfam Description: Tetrapyrrole (Corrin/Porphyrin) Methylases
  misc_feature (1)..(142): Homolog of NCBI NO: 39995759 NR Description: tetrapyrrole methylase family protein
  misc_feature (1)..(141): Homolog of NCBI NO: 29655027 NR Description: tetrapyrrole (Corrin/Porphyrin) methylase domain
  misc_feature (1)..(141): Homolog of NCBI NO: 23113481 NR Description: hypothetical protein [Desulfitobacterium
  misc_feature (1)..(149): Homolog of NCBI NO: 20806633 NR Description: predicted methyltransferases [Thermoanaerobacter
  misc_feature (1)..(142): Homolog of NCBI NO: 23041512 NR Description: hypothetical protein [Trichodesmium erythraeum
  misc_feature (1)..(142): Homolog of NCBI NO: 23125107 NR Description: hypothetical protein [Nostoc punctiforme]
  misc_feature (1)..(142): Homolog of NCBI NO: 17232172 NR Description: tetrapyrrole methylase family protein [Nostoc sp.
  misc_feature (1)..(132): Homolog of NCBI NO: 7767663 NR Description: F27F5.18 [Arabidopsis thaliana]
  misc_feature (1)..(142): Homolog of NCBI NO: 37534330 NR Description: hypothetical protein [Oryza sativa (japonica
  misc_feature (1)..(142): Homolog of NCBI NO: 30693914 NR Description: expressed protein [Arabidopsis thaliana]
MSYHKFNESQREQVVLRRLKQGEIVALISDAGMPGISDPGMELAKLCVSENILVVPIPGPCALVSALSASGLTTDEFTFVGFLPKHSELRRKRLMVSADQTTTQIFYVAPHKLSQFLDESSSIFGDARQCVIAREMTKLHEERDDTLEENASRVKAIKCIKPAFAVPLHVVSRMDLAGAVFWYILIP

SEQ ID NO: 53374 - protein, 155 aa, Glycine max
  peptide (1)..(155): Ceres Seq. ID no. 15176389
  misc_feature (1)..(100): Pfam Name: Tetrapyrrole (Corrin/Porphyrin) Methylases Pfam Description: Tetrapyrrole (Corrin/Porphyrin) Methylases
  misc_feature (1)..(110): Homolog of NCBI NO: 39995759 NR Description: tetrapyrrole methylase family protein
  misc_feature (1)..(109): Homolog of NCBI NO: 29655027 NR Description: tetrapyrrole (Corrin/Porphyrin) methylase domain
  misc_feature (1)..(109): Homolog of NCBI NO: 23113481 NR Description: hypothetical protein [Desulfitobacterium
  misc_feature (1)..(117): Homolog of NCBI NO: 20806633 NR Description: predicted methyltransferases [Thermoanaerobacter
  misc_feature (1)..(110): Homolog of NCBI NO: 23041512 NR Description: hypothetical protein [Trichodesmium erythraeum
  misc_feature (1)..(110): Homolog of NCBI NO: 23125107 NR Description: hypothetical protein [Nostoc punctiforme]
  misc_feature (1)..(110): Homolog of NCBI NO: 17232172 NR Description: tetrapyrrole methylase family protein [Nostoc sp.
  misc_feature (1)..(100): Homolog of NCBI NO: 7767663 NR Description: F27F5.18 [Arabidopsis thaliana]
  misc_feature (1)..(110): Homolog of NCBI NO: 37534330 NR Description: hypothetical protein [Oryza sativa (japonica
  misc_feature (1)..(110): Homolog of NCBI NO: 30693914 NR Description: expressed protein [Arabidopsis thaliana]
MPGISDPGMELAKLCVSENILVVPIPGPCALVSALSASGLTTDEFTFVGFLPKHSELRRKRLMVSADQTTTQIFYVAPHKLSQFLDESSSIFGDARQCVIAREMTKLHEERDDTLEENASRVKAIKCIKPAFAVPLHVVSRMDLAGAVFWYILIP

SEQ ID NO: 53375 - protein, 147 aa, Glycine max
  peptide (1)..(147): Ceres Seq. ID no. 15176390
  misc_feature (1)..(92): Pfam Name: Tetrapyrrole (Corrin/Porphyrin) Methylases Pfam Description: Tetrapyrrole (Corrin/Porphyrin) Methylases
  misc_feature (1)..(102): Homolog of NCBI NO: 39995759 NR Description: tetrapyrrole methylase family protein
  misc_feature (1)..(101): Homolog of NCBI NO: 29655027 NR Description: tetrapyrrole (Corrin/Porphyrin) methylase domain
  misc_feature (1)..(101): Homolog of NCBI NO: 23113481 NR Description: hypothetical protein [Desulfitobacterium
  misc_feature (1)..(109): Homolog of NCBI NO: 20806633 NR Description: predicted methyltransferases [Thermoanaerobacter
  misc_feature (1)..(102): Homolog of NCBI NO: 23041512 NR Description: hypothetical protein [Trichodesmium erythraeum
  misc_feature (1)..(102): Homolog of NCBI NO: 23125107 NR Description: hypothetical protein [Nostoc punctiforme]
  misc_feature (1)..(102): Homolog of NCBI NO: 17232172 NR Description: tetrapyrrole methylase family protein [Nostoc sp.
  misc_feature (1)..(92): Homolog of NCBI NO: 7767663 NR Description: F27F5.18 [Arabidopsis thaliana]
  misc_feature (1)..(102): Homolog of NCBI NO: 37534330 NR Description: hypothetical protein [Oryza sativa (japonica
  misc_feature (1)..(102): Homolog of NCBI NO: 30693914 NR Description: expressed protein [Arabidopsis thaliana]
MELAKLCVSENILVVPIPGPCALVSALSASGLTTDEFTFVGFLPKHSELRRKRLMVSADQTTTQIFYVAPHKLSQFLDESSSIFGDARQCVIAREMTKLHEERDDTLEENASRVKAIKCIKPAFAVPLHVVSRMDLAGAVFWYILIP

SEQ ID NO: 53376 - DNA, 1386 bp, Glycine max
  misc_feature (1)..(1386): Ceres Seq. ID no. 14310972
agggtttgagcagaaaagagattgtgttggattggtttccattcccaattcccaatcgtgttgggtggccatggattctctactggcgaactatgcctcttcagatgaagaagaagatcaacagccatccccaccaaaaacgacgacgttttcctcccttcctcaacccaaactttctctgtttcaatcccttcctcaacccaaatcttctctgtttcaatcccttcctccacccaaacaaccttccaccgaaagctcttccctccctaaccctaaccctaaccctgaccctaaaccccaaatcgaaaagacacaacccaaacgcgtcgtgcaattcaggcccccaatcatccctctcccacacccttcacaacacgacgatgacgacgatgacgacgacgacgacgaagaagaagaacgaaacagaagaaagaaaaagttagagtcctccacgcaaacctcatcggtcaagtccttcctcgccagcattccagcacccaggaacaccgccactctcggcgttcaagcaagttccggttcaggccggaaatccatcctcgaaaccgaaacaccgccaccggcatcgaattccggtggtttcagcaatgttcccgtcgatcaaagtacaggggattatgaaaattttgatgattaccaatatgccactgaccagtatgctagttattatggcaattttggttcgggtgccgagccagggagttcgggtactgaaccaaaggctggggttgctgcttatggaactgaacagtatgggaattatggtgatgcctatgcttcctatggggattatggacagtatgggaataattggggtgacgtgtcggcgccaccggtgctggaagcttctgggattgatgtcagtgtggtaaggattcctgggaagagagggaggcatgagattccgacggaagtgattgaggtgaagcaagaagagttgattaagaatcggccaagagaggatcaggtcaagctaactgggattgcattcggacccacttatcagcctgcttcgacaaaggggaagcctacaaagctgcacaagaggaaacatcaaattggttcattgtactttgatatgaaacaaaatgaaatgaaacttgctgagcggcgtgtaaagggcatgcttaccaaagctgaaacacaagcgaaatatggatggtgatttgagatgatgatattggaaatacttacattgaaacgtgaaaaagcaaagtcgaagttttcatatttagttgcaatccttgtgtttcactgttctgtgtacatttgctccgtctttaagtgcaaattatgtatttctattcttatagccagtggaattttataccgtacatttttttatgacaaaaaaaatcatttctttcg

SEQ ID NO: 53377 - protein, 393 aa, Glycine max
  peptide (1)..(393): Ceres Seq. ID no. 14310973
  misc_feature (44)..(106): Homolog of NCBI NO: 20069537 NR Description: papillary renal cell carcinoma protein [Xenopus
  misc_feature (235)..(393): Homolog of NCBI NO: 20069537 NR Description: papillary renal cell carcinoma protein [Xenopus
  misc_feature (149)..(393): Homolog of NCBI NO: 22135888 NR Description: unknown protein [Arabidopsis thaliana]
  misc_feature (24)..(393): Homolog of NCBI NO: 15224752 NR Description: expressed protein [Arabidopsis thaliana]
GFEQKRDCVGLVSIPNSQSCWVAMDSLLANYASSDEEEDQQPSPPKTTTFSSLPQPKLSLFQSLPQPKSSLFQSLPPPKQPSTESSSLPNPNPNPDPKPQIEKTQPKRVVQFRPPIIPLPHPSQHDDDDDDDDDDEEEERNRRKKKLESSTQTSSVKSFLASIPAPRNTATLGVQASSGSGRKSILETETPPPASNSGGFSNVPVDQSTGDYENFDDYQYATDQYASYYGNFGSGAEPGSSGTEPKAGVAAYGTEQYGNYGDAYASYGDYGQYGNNWGDVSAPPVLEASGIDVSVVRIPGKRGRHEIPTEVIEVKQEELIKNRPREDQVKLTGIAFGPTYQPASTKGKPTKLHKRKHQIGSLYFDMKQNEMKLAERRVKGMLTKAETQAKYGW

SEQ ID NO: 53378 - protein, 370 aa, Glycine max
  peptide (1)..(370): Ceres Seq. ID no. 14310974
  misc_feature (21)..(83): Homolog of NCBI NO: 20069537 NR Description: papillary renal cell carcinoma protein [Xenopus
  misc_feature (212)..(370): Homolog of NCBI NO: 20069537 NR Description: papillary renal cell carcinoma protein [Xenopus
  misc_feature (126)..(370): Homolog of NCBI NO: 22135888 NR Description: unknown protein [Arabidopsis thaliana]
  misc_feature (1)..(370): Homolog of NCBI NO: 15224752 NR Description: expressed protein [Arabidopsis thaliana]
MDSLLANYASSDEEEDQQPSPPKTTTFSSLPQPKLSLFQSLPQPKSSLFQSLPPPKQPSTESSSLPNPNPNPDPKPQIEKTQPKRVVQFRPPIIPLPHPSQHDDDDDDDDDDEEEERNRRKKKLESSTQTSSVKSFLASIPAPRNTATLGVQASSGSGRKSILETETPPPASNSGGFSNVPVDQSTGDYENFDDYQYATDQYASYYGNFGSGAEPGSSGTEPKAGVAAYGTEQYGNYGDAYASYGDYGQYGNNWGDVSAPPVLEASGIDVSVVRIPGKRGRHEIPTEVIEVKQEELIKNRPREDQVKLTGIAFGPTYQPASTKGKPTKLHKRKHQIGSLYFDMKQNEMKLAERRVKGMLTKAETQAKYGW

SEQ ID NO: 53379 - DNA, 1307 bp, Glycine max
  misc_feature (1)..(1307): Ceres Seq. ID no. 14310748
ttcgtctctcctcacattttttcttcttctttcttctttcttttgggcgccgttcctgtctctcctcacatttttcttctctcttctctctcctcggcgccccaccgcgcgacccctcctttccccctcccccttcgcctccgccgcgacacccaccttccccttccggacctccgtgcgacccccccccctccgccgtgttttagttgcaaagttttagagttggattggaagattgtgaacttagaaagatggtgaagttgactatgattgctcgtgttactgatggtcttcctctagctgaaggtctggatgatggtcgtgatcttaaagatgcggaattttacaaactgcaagtcaaggctttgtttaagaatctctcaagaggacattatgaagcatcaaggatgtcagttgaaactggcccttatgtttttcattatattatagaaggacgggtctgttacttgacaatgtgtgatcgtgcataccctaagaaactagcctttcaatatcttgaagagctcaggaacgagtttgagcgtgttaatgggtctcaaattgaaactgctgcaagaccttatgccttcattaagtttgatacatttatgcagaagacaaagaaactttatcaggatacccatactcagcgcaatattgcaaagttgaatgatgaactctatgaagtccaccagataatgactcggaatgtgcaggaagttcttggtgttggtgaacagttggaccaggtcagccaaatgtccagtcgcttatcatcagaatctcgcatatatgctgataaggctagagatttaaaccggcaggctctgattcggaagtgggcccctgttgctattgtttttggagttgtcttcgtacttttctggatcaaaaataaactatggtgatcgagctcagtatgaaatttaaaacctggattctgtggcttcttgcttttctcacatgattatccagatttgcacagattggtgggaaccctttatgcatgagatgatgtcaactttttcttgacaacttcggtttagaaaaaaaaaaaaagactatcctttgttacatctggatcagtctttctggaacaggaaccttttgacctttatagtaaggagccaggatatgagaaaactttatccccgtggggatgcatgtaggcatttcttctttatacttctcaattattttcaggattattgcgttaatgaattaaatatattacctcttcgattttattgtttccatttgagccgctgaattaaaattgcgtttttatatacagctaacataatgac

SEQ ID NO: 53380 - protein, 218 aa, Glycine max
  peptide (1)..(218): Ceres Seq. ID no. 14310749
  misc_feature (132)..(218): Pfam Name: Synaptobrevin Pfam Description: Synaptobrevin
  misc_feature (1)..(212): Homolog of NCBI NO: 1927215 NR Description: ERS-24 [Cricetulus griseus]
  misc_feature (1)..(212): Homolog of NCBI NO: 14290512 NR Description: SEC22 vesicle trafficking protein-like 1 [Mus
  misc_feature (1)..(212): Homolog of NCBI NO: 4759086 NR Description: vesicle trafficking protein sec22b [Homo sapiens]
  misc_feature (1)..(121): Homolog of NCBI NO: 35215218 NR Description: putative vesicle trafficking protein
  misc_feature (1)..(121): Homolog of NCBI NO: 34015230 NR Description: putative vesicle trafficking protein
  misc_feature (1)..(218): Homolog of NCBI NO: 34904386 NR Description: unnamed protein product [Oryza sativa (japonica
  misc_feature (1)..(218): Homolog of NCBI NO: 28269424 NR Description: putative vesicle trafficking protein
  misc_feature (1)..(64): Homolog of NCBI NO: 25402691 NR Description: hypothetical protein [imported] - Arabidopsis
  misc_feature (62)..(218): Homolog of NCBI NO: 25402691 NR Description: hypothetical protein [imported] - Arabidopsis
  misc_feature (1)..(218): Homolog of NCBI NO: 15221123 NR Description: vesicle transport protein SEC22, putative
MVKLTMIARVTDGLPLAEGLDDGRDLKDAEFYKLQVKALFKNLSRGHYEASRMSVETGPYVFHYIIEGRVCYLTMCDRAYPKKLAFQYLEELRNEFERVNGSQIETAARPYAFIKFDTFMQKTKKLYQDTHTQRNIAKLNDELYEVHQIMTRNVQEVLGVGEQLDQVSQMSSRLSSESRIYADKARDLNRQALIRKWAPVAIVFGVVFVLFWIKNKLW

SEQ ID NO: 53381 - protein, 213 aa, Glycine max
  peptide (1)..(213): Ceres Seq. ID no. 14310750
  misc_feature (127)..(213): Pfam Name: Synaptobrevin Pfam Description: Synaptobrevin
  misc_feature (1)..(207): Homolog of NCBI NO: 1927215 NR Description: ERS-24 [Cricetulus griseus]
  misc_feature (1)..(207): Homolog of NCBI NO: 14290512 NR Description: SEC22 vesicle trafficking protein-like 1 [Mus
  misc_feature (1)..(207): Homolog of NCBI NO: 4759086 NR Description: vesicle trafficking protein sec22b [Homo sapiens]
  misc_feature (1)..(116): Homolog of NCBI NO: 35215218 NR Description: putative vesicle trafficking protein
  misc_feature (1)..(116): Homolog of NCBI NO: 34015230 NR Description: putative vesicle trafficking protein
  misc_feature (1)..(213): Homolog of NCBI NO: 34904386 NR Description: unnamed protein product [Oryza sativa (japonica
  misc_feature (1)..(213): Homolog of NCBI NO: 28269424 NR Description: putative vesicle trafficking protein
  misc_feature (1)..(59): Homolog of NCBI NO: 25402691 NR Description: hypothetical protein [imported] - Arabidopsis
  misc_feature (57)..(213): Homolog of NCBI NO: 25402691 NR Description: hypothetical protein [imported] - Arabidopsis
  misc_feature (1)..(213): Homolog of NCBI NO: 15221123 NR Description: vesicle transport protein SEC22, putative
MIARVTDGLPLAEGLDDGRDLKDAEFYKLQVKALFKNLSRGHYEASRMSVETGPYVFHYIIEGRVCYLTMCDRAYPKKLAFQYLEELRNEFERVNGSQIETAARPYAFIKFDTFMQKTKKLYQDTHTQRNIAKLNDELYEVHQIMTRNVQEVLGVGEQLDQVSQMSSRLSSESRIYADKARDLNRQALIRKWAPVAIVFGVVFVLFWIKNKLW

SEQ ID NO: 53382 - protein, 166 aa, Glycine max
  peptide (1)..(166): Ceres Seq. ID no. 14310751
  misc_feature (80)..(166): Pfam Name: Synaptobrevin Pfam Description: Synaptobrevin
  misc_feature (1)..(160): Homolog of NCBI NO: 1927215 NR Description: ERS-24 [Cricetulus griseus]
  misc_feature (1)..(160): Homolog of NCBI NO: 14290512 NR Description: SEC22 vesicle trafficking protein-like 1 [Mus
  misc_feature (1)..(160): Homolog of NCBI NO: 4759086 NR Description: vesicle trafficking protein sec22b [Homo sapiens]
  misc_feature (1)..(69): Homolog of NCBI NO: 35215218 NR Description: putative vesicle trafficking protein
  misc_feature (1)..(69): Homolog of NCBI NO: 34015230 NR Description: putative vesicle trafficking protein
  misc_feature (1)..(166): Homolog of NCBI NO: 34904386 NR Description: unnamed protein product [Oryza sativa (japonica
  misc_feature (1)..(166): Homolog of NCBI NO: 28269424 NR Description: putative vesicle trafficking protein
  misc_feature (1)..(12): Homolog of NCBI NO: 25402691 NR Description: hypothetical protein [imported] - Arabidopsis
  misc_feature (10)..(166): Homolog of NCBI NO: 25402691 NR Description: hypothetical protein [imported] - Arabidopsis
  misc_feature (1)..(166): Homolog of NCBI NO: 15221123 NR Description: vesicle transport protein SEC22, putative
MSVETGPYVFHYIIEGRVCYLTMCDRAYPKKLAFQYLEELRNEFERVNGSQIETAARPYAFIKFDTFMQKTKKLYQDTHTQRNIAKLNDELYEVHQIMTRNVQEVLGVGEQLDQVSQMSSRLSSESRIYADKARDLNRQALIRKWAPVAIVFGVVFVLFWIKNKLW

SEQ ID NO: 53383 - DNA, 1313 bp, Glycine max
  misc_feature (1)..(1313): Ceres Seq. ID no. 15174591
acacctctttcagagtcagcttttaactatgtgcattgcaagctatgagccttctggcagtcaagttcagcttacacttgagaggggtcttcctgctatggttgcttctttcacttctaaacaattgccatatccatctctctcctttgacatgttgcattgtgcaagatgtggcattgattgggaccgaaaagatggcattctcatgattgaagctgatagacttttaagaccggggggctactttgtctggacttcaccacttacaaatgctcgtgacaaagacagtcagaaaagatggaagttcatacaaagttttgctgaaaacctttgctgggatatgctgtcacagcaagatgaaactgtcgtatggaagaaaactagtaaaaggaattgctatagttcaagaaagaatagttctccccctcctttatgtggcagaggctatgatgtggagtctccgtattatcgagaactgcaaaactgcataggaggaacacatagcagccgctggatttctgtccaagagagggaaacttggccttccagagatcacttgaacaaaaaggagcttgcaatctttgggttgcaatctgatgaatttgctgaggactctgaaagctggaaagcagcagttcgaaattattggtctcttctgtcacctttaatattttctgatcatccaaagagacctggtgatgaggaccctccaccaccttataacatgctaagaaatgtgctagacatgaatgctcatgttggtggttttaattctgcaatgttgcaagctggaaaatccatatgggtaatgaatgtggtccctctgagtggactcaactatcttcccttgatccaggatcgaggttatgttggtgttttgcacgattggtgtgaggccttcccaacgtaccctagaacctatgacttggtccatgcagcaggacttttatcccttgaatttgctcagcagcgcagctgtaccatgcttgacatgttcattgaaattgacaggttacttcgtccagagggttggattataattcgtgacacagttcctttaatagagtcagcaagagctctaacaacaaggctaaagtgggatgcgcgagttgtagaaattgaaagtgacagcgatcagagactcctgatctgtcaaaaacctttctttaagagacaggcaaattaattcattcatgcccagaagaaattagaccataatattcatatattcatttttcataatgttcatttattatcataatgctccgccatagaaagtggggattgaaaattttggacagaaaagaaagccg

SEQ ID NO: 53384 - protein, 394 aa, Glycine max
  peptide (1)..(394): Ceres Seq. ID no. 15174592
  misc_feature (18)..(386): Pfam Name: Putative methyltransferase Pfam Description: Putative methyltransferase
  misc_feature (1)..(391): Homolog of NCBI NO: 15222970 NR Description: dehydration-induced protein-related [Arabidopsis
  misc_feature (1)..(391): Homolog of NCBI NO: 26449782 NR Description: unknown protein [Arabidopsis thaliana]
  misc_feature (8)..(393): Homolog of NCBI NO: 24111341 NR Description: At2g03480/T4M8.9 [Arabidopsis thaliana]
  misc_feature (8)..(393): Homolog of NCBI NO: 14532450 NR Description: At2g03480/T4M8.9 [Arabidopsis thaliana]
  misc_feature (8)..(391): Homolog of NCBI NO: 18395560 NR Description: dehydration-induced protein-related [Arabidopsis
  misc_feature (1)..(391): Homolog of NCBI NO: 25411012 NR Description: hypothetical protein At2g03480 [imported] -
  misc_feature (342)..(393): Homolog of NCBI NO: 8052540 NR Description: F3F9.21 [Arabidopsis thaliana]
  misc_feature (1)..(136): Homolog of NCBI NO: 8052540 NR Description: F3F9.21 [Arabidopsis thaliana]
  misc_feature (135)..(296): Homolog of NCBI NO: 8052540 NR Description: F3F9.21 [Arabidopsis thaliana]
  misc_feature (18)..(393): Homolog of NCBI NO: 12324243 NR Description: unknown protein, 5' partial; 69506-67937
HLFQSQLLTMCIASYEPSGSQVQLTLERGLPAMVASFTSKQLPYPSLSFDMLHCARCGIDWDRKDGILMIEADRLLRPGGYFVWTSPLTNARDKDSQKRWKFIQSFAENLCWDMLSQQDETVVWKKTSKRNCYSSRKNSSPPPLCGRGYDVESPYYRELQNCIGGTHSSRWISVQERETWPSRDHLNKKELAIFGLQSDEFAEDSESWKAAVRNYWSLLSPLIFSDHPKRPGDEDPPPPYNMLRNVLDMNAHVGGFNSAMLQAGKSIWVMNVVPLSGLNYLPLIQDRGYVGVLHDWCEAFPTYPRTYDLVHAAGLLSLEFAQQRSCTMLDMFIEIDRLLRPEGWIIIRDTVPLIESARALTTRLKWDARVVEIESDSDQRLLICQKPFFKRQAN

SEQ ID NO: 53385 - protein, 385 aa, Glycine max
  peptide (1)..(385): Ceres Seq. ID no. 15174593
  misc_feature (9)..(377): Pfam Name: Putative methyltransferase Pfam Description: Putative methyltransferase
  misc_feature (1)..(382): Homolog of NCBI NO: 15222970 NR Description: dehydration-induced protein-related [Arabidopsis
  misc_feature (1)..(382): Homolog of NCBI NO: 26449782 NR Description: unknown protein [Arabidopsis thaliana]
  misc_feature (1)..(384): Homolog of NCBI NO: 24111341 NR Description: At2g03480/T4M8.9 [Arabidopsis thaliana]
  misc_feature (1)..(384): Homolog of NCBI NO: 14532450 NR Description: At2g03480/T4M8.9 [Arabidopsis thaliana]
  misc_feature (1)..(382): Homolog of NCBI NO: 18395560 NR Description: dehydration-induced protein-related [Arabidopsis
  misc_feature (1)..(382): Homolog of NCBI NO: 25411012 NR Description: hypothetical protein At2g03480 [imported] -
  misc_feature (333)..(384): Homolog of NCBI NO: 8052540 NR Description: F3F9.21 [Arabidopsis thaliana]
  misc_feature (1)..(127): Homolog of NCBI NO: 8052540 NR Description: F3F9.21 [Arabidopsis thaliana]
  misc_feature (126)..(287): Homolog of NCBI NO: 8052540 NR Description: F3F9.21 [Arabidopsis thaliana]
  misc_feature (9)..(384): Homolog of NCBI NO: 12324243 NR Description: unknown protein, 5' partial; 69506-67937
MCIASYEPSGSQVQLTLERGLPAMVASFTSKQLPYPSLSFDMLHCARCGIDWDRKDGILMIEADRLLRPGGYFVWTSPLTNARDKDSQKRWKFIQSFAENLCWDMLSQQDETVVWKKTSKRNCYSSRKNSSPPPLCGRGYDVESPYYRELQNCIGGTHSSRWISVQERETWPSRDHLNKKELAIFGLQSDEFAEDSESWKAAVRNYWSLLSPLIFSDHPKRPGDEDPPPPYNMLRNVLDMNAHVGGFNSAMLQAGKSIWVMNVVPLSGLNYLPLIQDRGYVGVLHDWCEAFPTYPRTYDLVHAAGLLSLEFAQQRSCTMLDMFIEIDRLLRPEGWIIIRDTVPLIESARALTTRLKWDARVVEIESDSDQRLLICQKPFFKRQAN

SEQ ID NO: 53386 - protein, 362 aa, Glycine max
  peptide (1)..(362): Ceres Seq. ID no. 15174594
  misc_feature (1)..(354): Pfam Name: Putative methyltransferase Pfam Description: Putative methyltransferase
  misc_feature (1)..(359): Homolog of NCBI NO: 15222970 NR Description: dehydration-induced protein-related [Arabidopsis
  misc_feature (1)..(359): Homolog of NCBI NO: 26449782 NR Description: unknown protein [Arabidopsis thaliana]
  misc_feature (1)..(361): Homolog of NCBI NO: 24111341 NR Description: At2g03480/T4M8.9 [Arabidopsis thaliana]
  misc_feature (1)..(361): Homolog of NCBI NO: 14532450 NR Description: At2g03480/T4M8.9 [Arabidopsis thaliana]
  misc_feature (1)..(359): Homolog of NCBI NO: 18395560 NR Description: dehydration-induced protein-related [Arabidopsis
  misc_feature (1)..(359): Homolog of NCBI NO: 25411012 NR Description: hypothetical protein At2g03480 [imported] -
  misc_feature (310)..(361): Homolog of NCBI NO: 8052540 NR Description: F3F9.21 [Arabidopsis thaliana]
  misc_feature (1)..(104): Homolog of NCBI NO: 8052540 NR Description: F3F9.21 [Arabidopsis thaliana]
  misc_feature (103)..(264): Homolog of NCBI NO: 8052540 NR Description: F3F9.21 [Arabidopsis thaliana]
  misc_feature (1)..(361): Homolog of NCBI NO: 12324243 NR Description: unknown protein, 5' partial; 69506-67937
MVASFTSKQLPYPSLSFDMLHCARCGIDWDRKDGILMIEADRLLRPGGYFVWTSPLTNARDKDSQKRWKFIQSFAENLCWDMLSQQDETVVWKKTSKRNCYSSRKNSSPPPLCGRGYDVESPYYRELQNCIGGTHSSRWISVQERETWPSRDHLNKKELAIFGLQSDEFAEDSESWKAAVRNYWSLLSPLIFSDHPKRPGDEDPPPPYNMLRNVLDMNAHVGGFNSAMLQAGKSIWVMNVVPLSGLNYLPLIQDRGYVGVLHDWCEAFPTYPRTYDLVHAAGLLSLEFAQQRSCTMLDMFIEIDRLLRPEGWIIIRDTVPLIESARALTTRLKWDARVVEIESDSDQRLLICQKPFFKRQAN

SEQ ID NO: 53387 - DNA, 1369 bp, Glycine max
  misc_feature (1)..(1369): Ceres Seq. ID no. 15176548
agcttgagcgatgtcgggcctgtataactccaacttctcaccagtgagagctgcttctcctcagattagaaccaacccagaagtcgacagtcagtaccttacggagttgctggcagagcatcagaagtttggtcccttcatgcaagcccttcccatatgcagtcgtctcttgaatcaagaaatattaagagtttctggaatgctgtccaatcaaggttttggtgactttgacagactgcggcatagaagccctagtcctatggcttcttcaaacctcatgtcaagtgtcactggaacgggattgggtggatggaatagtcttcagcaggagagattacgcggaactcctggaatgacaatggactggcaagttgcacctgcaagtcctagttcatacacagttaagaggattttgcgcttggaaattccagttgatacataccccaatttcaattttgttggaagacttctgggacccagaggcaattctctaaaacgggtagaagcttctacaggttgtcgtgtgtatattagaggaaagggttcaataaaagatccagacaaggaagaaaaattaagaggaagaccaggctatgagcatctcaatgagcaactccacattttgattgaggctgatttacctgctaatgttgttgacttaagactccggcaagctcaggaaattatagaagaattgctcaaacctgtggaagagtctgaggactatattaagaggcagcagttgcgtgaattggcgatgctgaattcaaatttcagagaagagagtcctggaccaagtggaagtgtatctccattcaactccagtggaatgaaacgagctaaaactggccgatgaaaggtttccttgttacttgtagatgagtgttattgttttggagctatctcaatcaaagcatctatgaaagaataggctaacaattattgctggctagtattctggtggttttaaatcctctccctttattttacatttttcttctaaaacaactggagtcaaagctagaaagatttttagagagaaaaaaaatgataatataattgggtattgagaataggtgtgttcaaatgagtctttttcttgcacacttcatacatttattattgaatttattcttgcatctgtaacttgtgagaagcatgagatatatgttatgggtgaagttttaggtcttgagtggatcaaattttgtgggcatgtgacatgccgggtctcatcagtattcaaagattagttatagtataggttgaattttttttagttgtttgtctcaaacatttgtattttattcactgtgttacagttattgaacgatacatgtcatgtcacagatatctttccatgtaaaag

SEQ ID NO: 53388 - protein, 281 aa, Glycine max
  peptide (1)..(281): Ceres Seq. ID no. 15176549
  misc_feature (136)..(191): Pfam Name: KH domain Pfam Description: KH domain
  misc_feature (136)..(268): Homolog of NCBI NO: 20378859 NR Description: QKI isoform 7B [Mus musculus]
  misc_feature (8)..(279): Homolog of NCBI NO: 20268733 NR Description: unknown protein [Arabidopsis thaliana]
  misc_feature (8)..(279): Homolog of NCBI NO: 15236738 NR Description: KH domain protein [Arabidopsis thaliana]
  misc_feature (5)..(279): Homolog of NCBI NO: 15241136 NR Description: KH domain protein [Arabidopsis thaliana]
  misc_feature (1)..(278): Homolog of NCBI NO: 34909270 NR Description: P0454H12.18 [Oryza sativa (japonica
  misc_feature (3)..(278): Homolog of NCBI NO: 34900448 NR Description: contains EST C27129(C51039)~similar to
  misc_feature (1)..(281): Homolog of NCBI NO: 40645104 NR Description: hypothetical protein [Nicotiana tabacum]
  misc_feature (1)..(281): Homolog of NCBI NO: 30680583 NR Description: KH domain protein [Arabidopsis thaliana]
  misc_feature (1)..(281): Homolog of NCBI NO: 12322716 NR Description: unknown protein; 28504-31237 [Arabidopsis
  misc_feature (1)..(280): Homolog of NCBI NO: 15224909 NR Description: KH domain protein [Arabidopsis thaliana]
MSGLYNSNFSPVRAASPQIRTNPEVDSQYLTELLAEHQKFGPFMQALPICSRLLNQEILRVSGMLSNQGFGDFDRLRHRSPSPMASSNLMSSVTGTGLGGWNSLQQERLRGTPGMTMDWQVAPASPSSYTVKRILRLEIPVDTYPNFNFVGRLLGPRGNSLKRVEASTGCRVYIRGKGSIKDPDKEEKLRGRPGYEHLNEQLHILIEADLPANVVDLRLRQAQEIIEELLKPVEESEDYIKRQQLRELAMLNSNFREESPGPSGSVSPFNSSGMKRAKTGR

SEQ ID NO: 53389 - protein, 238 aa, Glycine max
  peptide (1)..(238): Ceres Seq. ID no. 15176550
  misc_feature (93)..(148): Pfam Name: KH domain Pfam Description: KH domain
  misc_feature (93)..(225): Homolog of NCBI NO: 20378859 NR Description: QKI isoform 7B [Mus musculus]
  misc_feature (1)..(236): Homolog of NCBI NO: 20268733 NR Description: unknown protein [Arabidopsis thaliana]
  misc_feature (1)..(236): Homolog of NCBI NO: 15236738 NR Description: KH domain protein [Arabidopsis thaliana]
  misc_feature (1)..(236): Homolog of NCBI NO: 15241136 NR Description: KH domain protein [Arabidopsis thaliana]
  misc_feature (1)..(235): Homolog of NCBI NO: 34909270 NR Description: P0454H12.18 [Oryza sativa (japonica
  misc_feature (1)..(235): Homolog of NCBI NO: 34900448 NR Description: contains EST C27129(C51039)~similar to
  misc_feature (1)..(238): Homolog of NCBI NO: 40645104 NR Description: hypothetical protein [Nicotiana tabacum]
  misc_feature (1)..(238): Homolog of NCBI NO: 30680583 NR Description: KH domain protein [Arabidopsis thaliana]
  misc_feature (1)..(238): Homolog of NCBI NO: 12322716 NR Description: unknown protein; 28504-31237 [Arabidopsis
  misc_feature (1)..(237): Homolog of NCBI NO: 15224909 NR Description: KH domain protein [Arabidopsis thaliana]
MQALPICSRLLNQEILRVSGMLSNQGFGDFDRLRHRSPSPMASSNLMSSVTGTGLGGWNSLQQERLRGTPGMTMDWQVAPASPSSYTVKRILRLEIPVDTYPNFNFVGRLLGPRGNSLKRVEASTGCRVYIRGKGSIKDPDKEEKLRGRPGYEHLNEQLHILIEADLPANVVDLRLRQAQEIIEELLKPVEESEDYIKRQQLRELAMLNSNFREESPGPSGSVSPFNSSGMKRAKTGR

SEQ ID NO: 53390 - protein, 218 aa, Glycine max
  peptide (1)..(218): Ceres Seq. ID no. 15176551
  misc_feature (73)..(128): Pfam Name: KH domain Pfam Description: KH domain
  misc_feature (73)..(205): Homolog of NCBI NO: 20378859 NR Description: QKI isoform 7B [Mus musculus]
  misc_feature (1)..(216): Homolog of NCBI NO: 20268733 NR Description: unknown protein [Arabidopsis thaliana]
  misc_feature (1)..(216): Homolog of NCBI NO: 15236738 NR Description: KH domain protein [Arabidopsis thaliana]
  misc_feature (1)..(216): Homolog of NCBI NO: 15241136 NR Description: KH domain protein [Arabidopsis thaliana]
  misc_feature (1)..(215): Homolog of NCBI NO: 34909270 NR Description: P0454H12.18 [Oryza sativa (japonica
  misc_feature (1)..(215): Homolog of NCBI NO: 34900448 NR Description: contains EST C27129(C51039)~similar to
  misc_feature (1)..(218): Homolog of NCBI NO: 40645104 NR Description: hypothetical protein [Nicotiana tabacum]
  misc_feature (1)..(218): Homolog of NCBI NO: 30680583 NR Description: KH domain protein [Arabidopsis thaliana]
  misc_feature (1)..(218): Homolog of NCBI NO: 12322716 NR Description: unknown protein; 28504-31237 [Arabidopsis
  misc_feature (1)..(217): Homolog of NCBI NO: 15224909 NR Description: KH domain protein [Arabidopsis thaliana]
MLSNQGFGDFDRLRHRSPSPMASSNLMSSVTGTGLGGWNSLQQERLRGTPGMTMDWQVAPASPSSYTVKRILRLEIPVDTYPNFNFVGRLLGPRGNSLKRVEASTGCRVYIRGKGSIKDPDKEEKLRGRPGYEHLNEQLHILIEADLPANVVDLRLRQAQEIIEELLKPVEESEDYIKRQQLRELAMLNSNFREESPGPSGSVSPFNSSGMKRAKTGR

SEQ ID NO: 53391 - DNA, 1057 bp, Glycine max
  misc_feature (1)..(1057): Ceres Seq. ID no. 13637473
cccccccccctacaaccaaatggttgtttatattgaagcctgtgaatctggatctatgtttaacaagatccttcctgccaatatcagcatttatgccactactgcttctaatcctgatgaaagctcatgggctacctattgctctcctgatgacaaggtcaatggcaaagaaattggctcatgcttgggagacttgtactctgtgaatttcttggagaatttggaatctgccaaccctgctaaggagactttgttgaagcaatatcagattattaagaagaagactacagcttctgaagttatgcaatatggtgagcttaagattgataaggaaatcattggattattcgaaggaaataacactaaagaagaagctctggttgctgaaaaggaagaagattttgcaaagtacacttctttggtcgactcaagatatgtcaagttaaattatttgaagagaaagcatgaaaaactcggcactgaacaaactgcttatggtcttgctgaagaattggactccatgaagaaatttgatagcagctttggaagcttgagctctgctcttaatttgaatgttgatgctaaagttgatgacattgatttcgagtgcttgaagactagagtcgctatgtatgaaggtgtctgtggaaagttcagtgattatggcttgaagtacgtcagatatttgcacttctcttgtgtccaaggtgttgatatttacgatttcgaaagtgctttaatgagagcttgctaatgtatggtcgattgatgaaatagttattgagagaaaataggtagtgtcatgcattcattgatactttataaaatttcaggatagtatcttgaaattactttaatacttatactttgaactatattacatactttcgtaacatataatgactttataactatgcatgaagtgaaaattacattttaataaaaatacttgatatatctaaaaaaaaaaaaaaaaaaataaaaaaaaaaaaaaaaaagaattcctgcagcccgggggatccactagttctagagcggccgccaccgcggggagctc

SEQ ID NO: 53392 - protein, 250 aa, Glycine max
  peptide (1)..(250): Ceres Seq. ID no. 13637474
  misc_feature (4)..(157): Pfam Name: Peptidase C13 family Pfam Description: Peptidase C13 family
  misc_feature (200)..(250): Homolog of NCBI NO: 14594819 NR Description: putative vacuolar processing enzyme [Beta
  misc_feature (4)..(177): Homolog of NCBI NO: 14594819 NR Description: putative vacuolar processing enzyme [Beta
  misc_feature (4)..(120): Homolog of NCBI NO: 27544010 NR Description: vacuolar processing enzyme-2 [Nicotiana tabacum]
  misc_feature (97)..(250): Homolog of NCBI NO: 27544010 NR Description: vacuolar processing enzyme-2 [Nicotiana tabacum]
PPPYNQMVVYIEACESGSMFNKILPANISIYATTASNPDESSWATYCSPDDKVNGKEIGSCLGDLYSVNFLENLESANPAKETLLKQYQIIKKKTTASEVMQYGELKIDKEIIGLFEGNNTKEEALVAEKEEDFAKYTSLVDSRYVKLNYLKRKHEKLGTEQTAYGLAEELDSMKKFDSSFGSLSSALNLNVDAKVDDIDFECLKTRVAMYEGVCGKFSDYGLKYVRYLHFSCVQGVDIYDFESALMRAC

SEQ ID NO: 53393 - protein, 244 aa, Glycine max
  peptide (1)..(244): Ceres Seq. ID no. 13637475
  misc_feature (1)..(151): Pfam Name: Peptidase C13 family Pfam Description: Peptidase C13 family
  misc_feature (194)..(244): Homolog of NCBI NO: 14594819 NR Description: putative vacuolar processing enzyme [Beta
  misc_feature (1)..(171): Homolog of NCBI NO: 14594819 NR Description: putative vacuolar processing enzyme [Beta
  misc_feature (1)..(114): Homolog of NCBI NO: 27544010 NR Description: vacuolar processing enzyme-2 [Nicotiana tabacum]
  misc_feature (91)..(244): Homolog of NCBI NO: 27544010 NR Description: vacuolar processing enzyme-2 [Nicotiana tabacum]
MVVYIEACESGSMFNKILPANISIYATTASNPDESSWATYCSPDDKVNGKEIGSCLGDLYSVNFLENLESANPAKETLLKQYQIIKKKTTASEVMQYGELKIDKEIIGLFEGNNTKEEALVAEKEEDFAKYTSLVDSRYVKLNYLKRKHEKLGTEQTAYGLAEELDSMKKFDSSFGSLSSALNLNVDAKVDDIDFECLKTRVAMYEGVCGKFSDYGLKYVRYLHFSCVQGVDIYDFESALMRAC

SEQ ID NO: 53394 - protein, 232 aa, Glycine max
  peptide (1)..(232): Ceres Seq. ID no. 13637476
  misc_feature (1)..(139): Pfam Name: Peptidase C13 family Pfam Description: Peptidase C13 family
  misc_feature (182)..(232): Homolog of NCBI NO: 14594819 NR Description: putative vacuolar processing enzyme [Beta
  misc_feature (1)..(159): Homolog of NCBI NO: 14594819 NR Description: putative vacuolar processing enzyme [Beta
  misc_feature (1)..(102): Homolog of NCBI NO: 27544010 NR Description: vacuolar processing enzyme-2 [Nicotiana tabacum]
  misc_feature (79)..(232): Homolog of NCBI NO: 27544010 NR Description: vacuolar processing enzyme-2 [Nicotiana tabacum]
MFNKILPANISIYATTASNPDESSWATYCSPDDKVNGKEIGSCLGDLYSVNFLENLESANPAKETLLKQYQIIKKKTTASEVMQYGELKIDKEIIGLFEGNNTKEEALVAEKEEDFAKYTSLVDSRYVKLNYLKRKHEKLGTEQTAYGLAEELDSMKKFDSSFGSLSSALNLNVDAKVDDIDFECLKTRVAMYEGVCGKFSDYGLKYVRYLHFSCVQGVDIYDFESALMRAC

SEQ ID NO: 53395 - DNA, 1850 bp, Glycine max
  misc_feature (1)..(1850): Ceres Seq. ID no. 15226772
ccgggccccccctcgagtcavctdcgtaggccccccccccccctagttttgttaatactttatagtatagttttagtcacaaaaataaatgattctttgcatttattgcatgttttgacatgcaaattcatttaattgctatttaatatttttaaaatggtatggtatactgtcaatgttttaaaggtgctatctatggtcattattggctttggaaaagagaaaaggggttaggccggtagaggttagattttgtatcataattgtctgcatctatgtatattttatatacattcatccaaacaagtgagatcactagtttattgtgactttgaaggatgaaaggagtgaatccacaattggatcttatgtgaactgttacgattaaagacttgaattgcatgtgtgtgtgcattggaatttatgattttgagttatttcttaaaaatctcttacaagttcattcatttgcattcagcaatcagcttttataaaattttgacatgatccgtacaggtagtaaggctagcaaacgttatggagtaacttgcttagtagggagggagaaagcataatgaaaaagttagggagtaatttttaaggcattgtgaataagaaatttgataatgacaggggaaggtcaaagactaaaaggtttaataaatggtcacgttccacctagtaaacttggcaacccaacccagcctgcttccttaccctccatcttaaacagccaacttatgattttgagtttgattggttttcaatacgttagtaagtgcaccatttaaactttgtttgaccctccttatttttctgaagacagctctcatgtaaaaaaattaaaacatatatctgaaatcctgaaaaattatctctcctactcaacaaatttggtttgggacaaactgttccgaacctttgattgatgggtaaatgtttatttagctgtttatcaaagacggttgtgttctgtttgtgaagtgccaaccttgtaagttgtgactagtaggttccctgttgtaacaattgaacttgttggctcaacctgtggtcgagcatataacaggcagtggcattttcatacaatttccttactgcatttatgtgattcttcatccagagcatgacaattttctgtaccacagtttcatagttcctattaattgttccgttgcgctgttgcagttcattagtgaagctcatttggaagcatgccgaaggcagcgtctttactcaatagcaggctactattatgtgaagaatcacatctgttggggaaagcttagacttaaccccgttgattatccagtctctctgctgatctagaatttttaagatttttcccaacacaatagtgatgtagtttttatgcagaataattggagttcgtactagaattacctacagatttattgagtcgtttatttgggcatatgatctgtagatttatttatttttatgattgttattcatctttaacttttaaaaaaaaaaaaaaaaaaaaaaaaaaaaaaaaaaaaaaaaaaaaaaaaaaaaaaaaaaaaaaaaaagaaaaaaaaaaaaaaaatttttaaaaaaaaaaaaagaaaaaagaaaaaaaaagggttyyckggcgcccgggggryccccwaattttaaagggggccccccccggggggggcccccmtttttkkycccyttaggggggggwaawttccgcgttkgkkktaaamsggggmaaaaggggttccsgggggaaaattgtttycccccccaaattccccaaaaaaaaaaggccggaaagaaaaaggggaaacccggggggggcaaaagggggggcaaaccccatttaagggggggggggcccc

SEQ ID NO: 53396 - protein, 54 aa, Glycine max
  peptide (1)..(54): Ceres Seq. ID no. 15226773
MTGEGQRLKGLINGHVPPSKLGNPTQPASLPSILNSQLMILSLIGFQYVSKCTI

SEQ ID NO: 53397 - protein, 46 aa, Glycine max
  peptide (1)..(46): Ceres Seq. ID no. 15226774
  misc_feature (19)..(46): Homolog of NCBI NO: 39594135 NR Description: Hypothetical protein CBG16734 [Caenorhabditis
  misc_feature (12)..(46): Homolog of NCBI NO: 32450149 NR Description: Unknown (protein for IMAGE:6878208) [Xenopus
  misc_feature (11)..(46): Homolog of NCBI NO: 16416102 NR Description: hypothetical protein [Neurospora crassa]
  misc_feature (18)..(46): Homolog of NCBI NO: 39594135 NR Description: Hypothetical protein CBG16734 [Caenorhabditis
  misc_feature (18)..(46): Homolog of NCBI NO: 39595494 NR Description: Hypothetical protein CBG04159 [Caenorhabditis
  misc_feature (18)..(46): Homolog of NCBI NO: 39592010 NR Description: Hypothetical protein CBG23181 [Caenorhabditis
  misc_feature (18)..(46): Homolog of NCBI NO: 34535151 NR Description: unnamed protein product [Homo sapiens]
  misc_feature (18)..(46): Homolog of NCBI NO: 32416700 NR Description: predicted protein [Neurospora crassa]
  misc_feature (18)..(46): Homolog of NCBI NO: 32411603 NR Description: hypothetical protein [Neurospora crassa]
  misc_feature (18)..(46): Homolog of NCBI NO: 39597582 NR Description: Hypothetical protein CBG03276 [Caenorhabditis
MICRFIYFYDCYSSLTFKKKKKKKKKKKKKKKKKKKKKKEKKKKNF

SEQ ID NO: 53398 - protein, 44 aa, Glycine max
  peptide (1)..(44): Ceres Seq. ID no. 15226775
  misc_feature (7)..(7): Xaa is any aa, unknown or other
  misc_feature (8)..(8): Xaa is any aa, unknown or other
PGPPSSXXRRPPPPLVLLILYSIVLVTKINDSLHLLHVLTCKFI

SEQ ID NO: 53399 - DNA, 1352 bp, Glycine max
  misc_feature (1)..(1352): Ceres Seq. ID no. 14310624
ttgaaattttatcgaggaagtggcatttgctttggactggagcattaataacagtgtcacctccacaaatgctgccattgcaagggataagatcaagaagcaattcagcagtcatttatcacaaaatcaaagtaaaacagatgttgaagataaacagtcttctcgcttgccctcatttgcatatcctgacgaacagtgtgaactcttcaacacacagaatgatcagtgtgatctccttgaagagattagaaaactaaaatatgatttgaggagcacaaaaactgcgaagaaagacttggaagaaaagctgctgtcagtaactgatgagagtcagaacttagcaaaacaatgtcaagaagcacaaaataacatcaaaggtttagaatcagaaatcgaggcactgaaagaatccaaagcaacactagaagatcagattgagaaacagaagattataaatgaagatcttgatacacaacttacaatagctcagaccaaattaaatgacatctttcaaaagttttcgtccttagaagttgaattagaggataaaaagaactcctgtgaggatttagaggcaacatgtctagaacttcaactccagctggaaagcattgcaaagaaggaatctccaacatatggcaaatacgaagtagaaaagatatatcaaactggctgggagatcacaacagcttcatcaaagttggcagagtgccaagaaaccatcctaaaccttaggaaacaactcaaggcacttgcttcatctaatgaagtagcaatttttgacaaggttgtctccacaactaatactatggccaatccaactcagaagaagaacttgatcaaacgatcctctctacgcaatcaaatgcaagcagaggatgaagctaaaggagggatgcataagtctgtccaaactgaagaaactaaaagcgataaagatgtgcagaggccaccccttcttcaatctgaaaccgaaaaatctctgccaagtcccaaaagtctcacttcggagcaacatgatagaagcaaaaccacaggctctttggcaattgtgccaggtaagaagcaaataggctttggttttctgaggaagctgctgtcgagacgaaagaaaggaaggggtaagggaactaagttgttagccaaagcatgaataagaatgatcttggagagaatgcgaagacatgcttctggtgtaacatgcttttgtcttttattagattagattctggtggaacttgtttttatcttgtattggagatgattgaggttggagttgagacacagagtgaaagagaggtttggtgctgtaaatatagctggtgtaaataagttcattggcatttgagatt

SEQ ID NO: 53400 - protein, 114 aa, Glycine max
  peptide (1)..(114): Ceres Seq. ID no. 14310625
  misc_feature (1)..(113): Pfam Name: Myosin tail Pfam Description: Myosin tail
  misc_feature (1)..(69): Homolog of NCBI NO: 2425111 NR Description: ZipA [Dictyostelium discoideum]
  misc_feature (1)..(58): Homolog of NCBI NO: 31210685 NR Description: ENSANGP00000013163 [Anopheles gambiae]
  misc_feature (1)..(102): Homolog of NCBI NO: 38345501 NR Description: OSJNBa0010D21.14 [Oryza sativa (japonica
  misc_feature (1)..(72): Homolog of NCBI NO: 25518563 NR Description: hypothetical protein F6F9.12 - Arabidopsis
  misc_feature (1)..(72): Homolog of NCBI NO: 15223690 NR Description: expressed protein [Arabidopsis thaliana]
  misc_feature (1)..(78): Homolog of NCBI NO: 730093 NR Description: Myosin heavy chain, clone 203
  misc_feature (1)..(106): Homolog of NCBI NO: 15227816 NR Description: expressed protein [Arabidopsis thaliana]
MANPTQKKNLIKRSSLRNQMQAEDEAKGGMHKSVQTEETKSDKDVQRPPLLQSETEKSLPSPKSLTSEQHDRSKTTGSLAIVPGKKQIGFGFLRKLLSRRKKGRGKGTKLLAKA

SEQ ID NO: 53401 - protein, 95 aa, Glycine max
  peptide (1)..(95): Ceres Seq. ID no. 14310626
  misc_feature (1)..(94): Pfam Name: Myosin tail Pfam Description: Myosin tail
  misc_feature (1)..(50): Homolog of NCBI NO: 2425111 NR Description: ZipA [Dictyostelium discoideum]
  misc_feature (1)..(39): Homolog of NCBI NO: 31210685 NR Description: ENSANGP00000013163 [Anopheles gambiae]
  misc_feature (1)..(83): Homolog of NCBI NO: 38345501 NR Description: OSJNBa0010D21.14 [Oryza sativa (japonica
  misc_feature (1)..(53): Homolog of NCBI NO: 25518563 NR Description: hypothetical protein F6F9.12 - Arabidopsis
  misc_feature (1)..(53): Homolog of NCBI NO: 15223690 NR Description: expressed protein [Arabidopsis thaliana]
  misc_feature (1)..(59): Homolog of NCBI NO: 730093 NR Description: Myosin heavy chain, clone 203
  misc_feature (1)..(87): Homolog of NCBI NO: 15227816 NR Description: expressed protein [Arabidopsis thaliana]
MQAEDEAKGGMHKSVQTEETKSDKDVQRPPLLQSETEKSLPSPKSLTSEQHDRSKTTGSLAIVPGKKQIGFGFLRKLLSRRKKGRGKGTKLLAKA

SEQ ID NO: 53402 - protein, 85 aa, Glycine max
  peptide (1)..(85): Ceres Seq. ID no. 14310627
  misc_feature (1)..(84): Pfam Name: Myosin tail Pfam Description: Myosin tail
  misc_feature (1)..(40): Homolog of NCBI NO: 2425111 NR Description: ZipA [Dictyostelium discoideum]
  misc_feature (1)..(29): Homolog of NCBI NO: 31210685 NR Description: ENSANGP00000013163 [Anopheles gambiae]
  misc_feature (1)..(73): Homolog of NCBI NO: 38345501 NR Description: OSJNBa0010D21.14 [Oryza sativa (japonica
  misc_feature (1)..(43): Homolog of NCBI NO: 25518563 NR Description: hypothetical protein F6F9.12 - Arabidopsis
  misc_feature (1)..(43): Homolog of NCBI NO: 15223690 NR Description: expressed protein [Arabidopsis thaliana]
  misc_feature (1)..(49): Homolog of NCBI NO: 730093 NR Description: Myosin heavy chain, clone 203
  misc_feature (1)..(77): Homolog of NCBI NO: 15227816 NR Description: expressed protein [Arabidopsis thaliana]
MHKSVQTEETKSDKDVQRPPLLQSETEKSLPSPKSLTSEQHDRSKTTGSLAIVPGKKQIGFGFLRKLLSRRKKGRGKGTKLLAKA

SEQ ID NO: 53403 - DNA, 1652 bp, Glycine max
  misc_feature (1)..(1652): Ceres Seq. ID no. 13593854
ccccccacacaccatcctctccccacaagaataagcccgttcatgttcctctaccaccgaacacaccccgccaccacctctcgctaacgtgcgccccttccttatcctgcgcttcgacaccccttcttttctttttttactttttcccttattccccttccttcataagctccgcgttctctctctctctctctctctctctctctctctctctctctcggatcggagcgaggctggcggttccggcgttggggacgttagggttagggtttccgagagatgtggtatgctccaggcattgatgaatctgttctcgctgtgttggaagccgtttggccgcgatgctgatcgaatcgattccatcggagttatcggaagagaaggcaaagacggcttgctctggttccgcgacttcggaaaatatggctccggtgatttctccatggctgtcgttcaggccaaccaggttctcgaagaccagagccagatcgagtctggtcctctcggcaccttcgtcggcatctacgacggtcacggaggacccgacgcatcaagatacgtttgcgatcacttgtttcgccattttcaagcaatatcagctgagtcacgcggggttgtgacaactgagacaatcgaaagagcatttcgccaaacagaagaggggtacatggccctcgtgtcaggctcgtggaatgctcgacctcatattgcaagtgctgggacctgttgtctagttggagtgatatttcagcagacactctttgtggcaaacgctggagattcccgtgttgtattgggtaagaaagttggcaacactggaggtatggctgcaattcagctgtctacagaacacaatgcaaatcttgaggctgttaggcaggaacttaaagaattacatcctcatgatccccaaattgttgtcctcaaacatggagtgtggagagtaaaaggcattattcaggtttctagatctataggtgatgtatatttgaagcatgcacagtttaaccgagaaccacttaatgcaaaattcagacttcctgaaccgatgaacatgcctatcttgagtgctaatcccactattctttctcatgctctccaaccaaatgattccttccttatatttgcatctgatggtttatgggagcatttgagtaacgagaaagctgtggatattgtaaacagcaatccacatgcgggtagtgccaagagacttatcaaggctgctctccatgaagcagcaagaaaacgagaaatgcgatattcagacctccgtaagattgacaagaaagttcgacgccattttcatgatgatatatccgttattgttttattcttaaatcacgaccttatttccagaggcacagtgctagacccgacactttcaattcgaagcgctctcgatcactgacttgtatcactgtaagcagtcttgtacgagtttttggcaactgtaccgatacctgaagcattggtaggtacctggctataatatgtcatttctatggcacatatggcttctggtaccgacatcattcttgaggcacgagaatttattaagttataacatattattagaaatttattcataaagaggaaaaaaataaataccaaaaaaaaaaaaaaaaaagaattcctgcagccccggggga

SEQ ID NO: 53404 - protein, 374 aa, Glycine max
  peptide (1)..(374): Ceres Seq. ID no. 15221241
  misc_feature (41)..(323): Pfam Name: Protein phosphatase 2C Pfam Description: Protein phosphatase 2C
  misc_feature (1)..(369): Homolog of NCBI NO: 11282001 NR Description: protein phosphatase 2C-like protein - Arabidopsis
  misc_feature (6)..(371): Homolog of NCBI NO: 7485891 NR Description: hypothetical protein F20M13.80 - Arabidopsis
  misc_feature (1)..(371): Homolog of NCBI NO: 17064756 NR Description: putative protein phosphatase-2c [Arabidopsis
  misc_feature (1)..(369): Homolog of NCBI NO: 7768153 NR Description: protein phosphatase 2C (PP2C) [Fagus sylvatica]
  misc_feature (1)..(371): Homolog of NCBI NO: 22329238 NR Description: protein phosphatase-2c -related [Arabidopsis
  misc_feature (1)..(369): Homolog of NCBI NO: 18855039 NR Description: putative protein phosphatase [Oryza sativa]
  misc_feature (1)..(374): Homolog of NCBI NO: 11282004 NR Description: protein phosphatase 2C homolog [imported] -
  misc_feature (1)..(374): Homolog of NCBI NO: 21537406 NR Description: protein phosphatase-2c, putative [Arabidopsis
  misc_feature (6)..(374): Homolog of NCBI NO: 7670033 NR Description: protein phosphatase 2C-like protein [Arabidopsis
  misc_feature (1)..(374): Homolog of NCBI NO: 18401370 NR Description: protein phosphatase-2c -related [Arabidopsis
MLQALMNLFSLCWKPFGRDADRIDSIGVIGREGKDGLLWFRDFGKYGSGDFSMAVVQANQVLEDQSQIESGPLGTFVGIYDGHGGPDASRYVCDHLFRHFQAISAESRGVVTTETIERAFRQTEEGYMALVSGSWNARPHIASAGTCCLVGVIFQQTLFVANAGDSRVVLGKKVGNTGGMAAIQLSTEHNANLEAVRQELKELHPHDPQIVVLKHGVWRVKGIIQVSRSIGDVYLKHAQFNREPLNAKFRLPEPMNMPILSANPTILSHALQPNDSFLIFASDGLWEHLSNEKAVDIVNSNPHAGSAKRLIKAALHEAARKREMRYSDLRKIDKKVRRHFHDDISVIVLFLNHDLISRGTVLDPTLSIRSALDH

SEQ ID NO: 53405 - protein, 369 aa, Glycine max
  peptide (1)..(369): Ceres Seq. ID no. 15221242
  misc_feature (36)..(318): Pfam Name: Protein phosphatase 2C Pfam Description: Protein phosphatase 2C
  misc_feature (1)..(364): Homolog of NCBI NO: 11282001 NR Description: protein phosphatase 2C-like protein - Arabidopsis
  misc_feature (1)..(366): Homolog of NCBI NO: 7485891 NR Description: hypothetical protein F20M13.80 - Arabidopsis
  misc_feature (1)..(366): Homolog of NCBI NO: 17064756 NR Description: putative protein phosphatase-2c [Arabidopsis
  misc_feature (1)..(364): Homolog of NCBI NO: 7768153 NR Description: protein phosphatase 2C (PP2C) [Fagus sylvatica]
  misc_feature (1)..(366): Homolog of NCBI NO: 22329238 NR Description: protein phosphatase-2c -related [Arabidopsis
  misc_feature (1)..(364): Homolog of NCBI NO: 18855039 NR Description: putative protein phosphatase [Oryza sativa]
  misc_feature (1)..(369): Homolog of NCBI NO: 11282004 NR Description: protein phosphatase 2C homolog [imported] -
  misc_feature (1)..(369): Homolog of NCBI NO: 21537406 NR Description: protein phosphatase-2c, putative [Arabidopsis
  misc_feature (1)..(369): Homolog of NCBI NO: 7670033 NR Description: protein phosphatase 2C-like protein [Arabidopsis
  misc_feature (1)..(369): Homolog of NCBI NO: 18401370 NR Description: protein phosphatase-2c -related [Arabidopsis
MNLFSLCWKPFGRDADRIDSIGVIGREGKDGLLWFRDFGKYGSGDFSMAVVQANQVLEDQSQIESGPLGTFVGIYDGHGGPDASRYVCDHLFRHFQAISAESRGVVTTETIERAFRQTEEGYMALVSGSWNARPHIASAGTCCLVGVIFQQTLFVANAGDSRVVLGKKVGNTGGMAAIQLSTEHNANLEAVRQELKELHPHDPQIVVLKHGVWRVKGIIQVSRSIGDVYLKHAQFNREPLNAKFRLPEPMNMPILSANPTILSHALQPNDSFLIFASDGLWEHLSNEKAVDIVNSNPHAGSAKRLIKAALHEAARKREMRYSDLRKIDKKVRRHFHDDISVIVLFLNHDLISRGTVLDPTLSIRSALDH

SEQ ID NO: 53406 - protein, 322 aa, Glycine max
  peptide (1)..(322): Ceres Seq. ID no. 15221243
  misc_feature (1)..(271): Pfam Name: Protein phosphatase 2C Pfam Description: Protein phosphatase 2C
  misc_feature (1)..(317): Homolog of NCBI NO: 11282001 NR Description: protein phosphatase 2C-like protein - Arabidopsis
  misc_feature (1)..(319): Homolog of NCBI NO: 7485891 NR Description: hypothetical protein F20M13.80 - Arabidopsis
  misc_feature (1)..(319): Homolog of NCBI NO: 17064756 NR Description: putative protein phosphatase-2c [Arabidopsis
  misc_feature (1)..(317): Homolog of NCBI NO: 7768153 NR Description: protein phosphatase 2C (PP2C) [Fagus sylvatica]
  misc_feature (1)..(319): Homolog of NCBI NO: 22329238 NR Description: protein phosphatase-2c -related [Arabidopsis
  misc_feature (1)..(317): Homolog of NCBI NO: 18855039 NR Description: putative protein phosphatase [Oryza sativa]
  misc_feature (1)..(322): Homolog of NCBI NO: 11282004 NR Description: protein phosphatase 2C homolog [imported] -
  misc_feature (1)..(322): Homolog of NCBI NO: 21537406 NR Description: protein phosphatase-2c, putative [Arabidopsis
  misc_feature (1)..(322): Homolog of NCBI NO: 7670033 NR Description: protein phosphatase 2C-like protein [Arabidopsis
  misc_feature (1)..(322): Homolog of NCBI NO: 18401370 NR Description: protein phosphatase-2c -related [Arabidopsis
MAVVQANQVLEDQSQIESGPLGTFVGIYDGHGGPDASRYVCDHLFRHFQAISAESRGVVTTETIERAFRQTEEGYMALVSGSWNARPHIASAGTCCLVGVIFQQTLFVANAGDSRVVLGKKVGNTGGMAAIQLSTEHNANLEAVRQELKELHPHDPQIVVLKHGVWRVKGIIQVSRSIGDVYLKHAQFNREPLNAKFRLPEPMNMPILSANPTILSHALQPNDSFLIFASDGLWEHLSNEKAVDIVNSNPHAGSAKRLIKAALHEAARKREMRYSDLRKIDKKVRRHFHDDISVIVLFLNHDLISRGTVLDPTLSIRSALDH

SEQ ID NO: 53407 - DNA, 1760 bp, Glycine max
  misc_feature (1)..(1760): Ceres Seq. ID no. 14304276
ggtgccttcactctgacaatggatccagcgttacccattgtagcgctgtcgcttctcttgggtgccatcatcgccttcctcatcttcaacacctacttctgcaagcgccaatccgaaatccgatccatcgccgatccaaatccaaattcaaattcgaatcccaaactcgtgtcttccaaaccccctcccaagaagcctctctccaaaccccattcctccgacaaggatcaaaacaagcgtcaccatccgttggatttgaataccttgaagggtcatggtgatgcagtgacaggggtatgcttctcccgcgatggacgaaatttggcaactgcttgcgctgatggagttgtgagagtattcaagttggatgatgcttcgagtaaaagtttcaagtttctaaggattaatttgcctgccggcggtcatccaacggcagttgcattttccgatgatgcatcctccattgttgtggcgtcttatactctgtccggttgttcattatacatgtatggagaagagaaacctaaaacatctgaagacaaaccacaagcaaagcttcctctccccgaaattaagtgggagcatcacaaagttcatgataagaagtcaataattactatgtttggagcctctgcaacttatggcactgctgatggaagtacaattattgcctcgtgttcagaagggactgacatcattctttggcatggaaaaactgggaagagtgttgggcatgtcgatacaaatcaattgaaaaataacatggctactatatcacccaacggtcgttttattgcagctgcagcatttactgccgatgtgaagatctgggagattgtatatgcaaaggatggatctgtgaaggaagttttaaatgttatgcagcttaaggggcataagagtgctgtgacttggttatgctttacgccaaactctgagcaaataatcactgcatccaaggatggttcaatgagaatatggaatatcaatgttcgctatcatcttgatgaggatccaaagacgctaaaggtgttcccaattcctcttcatgattcttccggtactacattgcactatgatcgcatgagtgtttcccctgatggaaattttttggctgcgacccatggttccacattgcagtggttatgtgttgagactggaaaggttctggatacaactgaaaaagcccatgatagtgacatttcatgcatttcatgggctcctaaaactattccaatgggaaatgaacaagttttggttttagccacagccagtgctgacaagaaagtgaagttatgggcatctccatctatccctgcatcctaagccactatgctagtgcccggaatgctaccattagtatgcctttgcacgcgctgacactaattatgttaaagagagatgcttctaaagttctgggatttggtctcttcatagttggttcagtcacttcacaactttttagagctgcatggtatcattgaaaagttgaatgagaaacaaggatgagctgaaatgatgcaatcccttcagttgctgctactgctcagactctgtatcttgacgaattttttgactaataatttatatagacagagagataatgttgttggttttcgttgtgttagtgaggctgacgtgaatggtgaagtgtgatgcgagaatagtttatttgtagaactttggaagagaacataatggacatgttactagtggctacagtttgtcatttaaagaagaaaaaaaaaaacattttcatg

SEQ ID NO: 53408 - protein, 441 aa, Glycine max
  peptide (1)..(441): Ceres Seq. ID no. 14304277
  misc_feature (293)..(328): Pfam Name: WD domain, G-beta repeat Pfam Description: WD domain, G-beta repeat
  misc_feature (215)..(406): Homolog of NCBI NO: 4704417 NR Description: WS beta-transducin repeats protein [Homo sapiens]
  misc_feature (215)..(406): Homolog of NCBI NO: 22760172 NR Description: unnamed protein product [Homo sapiens]
  misc_feature (5)..(197): Homolog of NCBI NO: 22760172 NR Description: unnamed protein product [Homo sapiens]
  misc_feature (7)..(157): Homolog of NCBI NO: 27696175 NR Description: Similar to transducin (beta)-like 2 [Xenopus
  misc_feature (215)..(402): Homolog of NCBI NO: 27696175 NR Description: Similar to transducin (beta)-like 2 [Xenopus
  misc_feature (264)..(441): Homolog of NCBI NO: 14091657 NR Description: F6N15.8-like protein [Mangifera indica]
  misc_feature (10)..(436): Homolog of NCBI NO: 30102987 NR Description: putative WD repeat protein
  misc_feature (7)..(148): Homolog of NCBI NO: 7486549 NR Description: hypothetical protein F6N15.8 - Arabidopsis
  misc_feature (130)..(436): Homolog of NCBI NO: 7486549 NR Description: hypothetical protein F6N15.8 - Arabidopsis
  misc_feature (7)..(436): Homolog of NCBI NO: 18411222 NR Description: transducin / WD-40 repeat protein family
GAFTLTMDPALPIVALSLLLGAIIAFLIFNTYFCKRQSEIRSIADPNPNSNSNPKLVSSKPPPKKPLSKPHSSDKDQNKRHHPLDLNTLKGHGDAVTGVCFSRDGRNLATACADGVVRVFKLDDASSKSFKFLRINLPAGGHPTAVAFSDDASSIVVASYTLSGCSLYMYGEEKPKTSEDKPQAKLPLPEIKWEHHKVHDKKSIITMFGASATYGTADGSTIIASCSEGTDIILWHGKTGKSVGHVDTNQLKNNMATISPNGRFIAAAAFTADVKIWEIVYAKDGSVKEVLNVMQLKGHKSAVTWLCFTPNSEQIITASKDGSMRIWNINVRYHLDEDPKTLKVFPIPLHDSSGTTLHYDRMSVSPDGNFLAATHGSTLQWLCVETGKVLDTTEKAHDSDISCISWAPKTIPMGNEQVLVLATASADKKVKLWASPSIPAS

SEQ ID NO: 53409 - protein, 435 aa, Glycine max
  peptide (1)..(435): Ceres Seq. ID no. 14304278
  misc_feature (287)..(322): Pfam Name: WD domain, G-beta repeat Pfam Description: WD domain, G-beta repeat
  misc_feature (209)..(400): Homolog of NCBI NO: 4704417 NR Description: WS beta-transducin repeats protein [Homo sapiens]
  misc_feature (209)..(400): Homolog of NCBI NO: 22760172 NR Description: unnamed protein product [Homo sapiens]
  misc_feature (1)..(191): Homolog of NCBI NO: 22760172 NR Description: unnamed protein product [Homo sapiens]
  misc_feature (1)..(151): Homolog of NCBI NO: 27696175 NR Description: Similar to transducin (beta)-like 2 [Xenopus
  misc_feature (209)..(396): Homolog of NCBI NO: 27696175 NR Description: Similar to transducin (beta)-like 2 [Xenopus
  misc_feature (258)..(435): Homolog of NCBI NO: 14091657 NR Description: F6N15.8-like protein [Mangifera indica]
  misc_feature (4)..(430): Homolog of NCBI NO: 30102987 NR Description: putative WD repeat protein
  misc_feature (1)..(142): Homolog of NCBI NO: 7486549 NR Description: hypothetical protein F6N15.8 - Arabidopsis
  misc_feature (124)..(430): Homolog of NCBI NO: 7486549 NR Description: hypothetical protein F6N15.8 - Arabidopsis
  misc_feature (1)..(430): Homolog of NCBI NO: 18411222 NR Description: transducin / WD-40 repeat protein family
MDPALPIVALSLLLGAIIAFLIFNTYFCKRQSEIRSIADPNPNSNSNPKLVSSKPPPKKPLSKPHSSDKDQNKRHHPLDLNTLKGHGDAVTGVCFSRDGRNLATACADGVVRVFKLDDASSKSFKFLRINLPAGGHPTAVAFSDDASSIVVASYTLSGCSLYMYGEEKPKTSEDKPQAKLPLPEIKWEHHKVHDKKSIITMFGASATYGTADGSTIIASCSEGTDIILWHGKTGKSVGHVDTNQLKNNMATISPNGRFIAAAAFTADVKIWEIVYAKDGSVKEVLNVMQLKGHKSAVTWLCFTPNSEQIITASKDGSMRIWNINVRYHLDEDPKTLKVFPIPLHDSSGTTLHYDRMSVSPDGNFLAATHGSTLQWLCVETGKVLDTTEKAHDSDISCISWAPKTIPMGNEQVLVLATASADKKVKLWASPSIPAS

SEQ ID NO: 53410 - protein, 273 aa, Glycine max
  peptide (1)..(273): Ceres Seq. ID no. 14304279
  misc_feature (125)..(160): Pfam Name: WD domain, G-beta repeat Pfam Description: WD domain, G-beta repeat
  misc_feature (47)..(238): Homolog of NCBI NO: 15277891 NR Description: Similar to transducin (beta)-like 2 [Homo sapiens]
  misc_feature (1)..(29): Homolog of NCBI NO: 4704417 NR Description: WS beta-transducin repeats protein [Homo sapiens]
  misc_feature (47)..(238): Homolog of NCBI NO: 4704417 NR Description: WS beta-transducin repeats protein [Homo sapiens]
  misc_feature (47)..(238): Homolog of NCBI NO: 22760172 NR Description: unnamed protein product [Homo sapiens]
  misc_feature (1)..(29): Homolog of NCBI NO: 22760172 NR Description: unnamed protein product [Homo sapiens]
  misc_feature (47)..(234): Homolog of NCBI NO: 27696175 NR Description: Similar to transducin (beta)-like 2 [Xenopus
  misc_feature (96)..(273): Homolog of NCBI NO: 14091657 NR Description: F6N15.8-like protein [Mangifera indica]
  misc_feature (1)..(268): Homolog of NCBI NO: 30102987 NR Description: putative WD repeat protein
  misc_feature (1)..(268): Homolog of NCBI NO: 7486549 NR Description: hypothetical protein F6N15.8 - Arabidopsis
  misc_feature (1)..(268): Homolog of NCBI NO: 18411222 NR Description: transducin / WD-40 repeat protein family
MYGEEKPKTSEDKPQAKLPLPEIKWEHHKVHDKKSIITMFGASATYGTADGSTIIASCSEGTDIILWHGKTGKSVGHVDTNQLKNNMATISPNGRFIAAAAFTADVKIWEIVYAKDGSVKEVLNVMQLKGHKSAVTWLCFTPNSEQIITASKDGSMRIWNINVRYHLDEDPKTLKVFPIPLHDSSGTTLHYDRMSVSPDGNFLAATHGSTLQWLCVETGKVLDTTEKAHDSDISCISWAPKTIPMGNEQVLVLATASADKKVKLWASPSIPAS

SEQ ID NO: 53411 - DNA, 1785 bp, Glycine max
  misc_feature (1)..(1785): Ceres Seq. ID no. 14310998
gaacagcacaaggaaacaaaaccaacccttttgagcttgcacaactctgatggtagttgcacaactacttcagactctctctctctgagtgcctcaccacacagattctgtgatataccaatggaggccctcaatgctgctggcttgacccctctatctgtgctctctgatagaacaaaaacaagaactaaacacccttctgtttctgcatgcaaagtctcaaacttttccacctccaccaacaagaaacaagcattgctgcaaagttgcatatcaaaaactttgcatggggggctgattcttgcagcttcggctgttaatggtggagctgccacagccttaacgtacgatgaggcactgggacaacctttgagcctccctggtactggggactttgatgtgaatggctttgtggagagtgtcgctggctttgcagctgagaaccctgcaattgttgccgggggagtggttgttttggcagtgccattggttttgtctcaggttttcaagaagcctaaggcttggggtgttgagtctgctaagaacgcgtatgctaaacttggggctgatgggaatgctcagctgcttgacataagggcactggtggagattaggcaagtggggtccccagatgttgggggtctaaagaagaaagccgtgtcaataccttataagggtgatgataagccagggttcttgaagaagcttgcattgaagtttaaggagccagagaataccacattgtttattcttgacaaatttgatgggaactctgaactggttgcagagttggttaccattaatggatttaaagcagcttatgcaattaaggatggtgcagaaggaccgcgaggatggaagagtagtggtcttccttggatagcaccacggaaaacattgagtttggacaatctgacagatgctatatctgaagcaataggagatacctctgatggtgtggcagttactcttgggattgctgcagctgctgctggacttagtatattagctttttctgagatagaatcaatcctccaagttgtaggatcagctgcgctcattcagtttgcaagcaagaagcttttgtttgctgaggaccgaaagcaaaccgtgaaacaacttgatgagttcttgaacaccaaggttgcccctaaagaacttgttgatgaaataaaggatattggaaaggctcttctaccatcctctaccaataataaggctcttcctgctccagaagagaaaagttcagagcttgctacagctgatagcactgtacagaatgcagtagctactcccgagcccaaagcggatgcagtagctcctgaagtaaactcagtgcccaaaactgaagtgaaggcagaagaatcatttcctgcacaaccaaggccactttcaccatacccatattatccagatttcaagcctccaacatctcctaccccttcacagccctagaccttcacttcttttaatcttgaacataattccatagaaggcaaatcaattgtccaaatatccagcatgtatcaagaggtgtacaatactacaatctataatcctatcagaaaaagtcatgcatcttaatttgcagataagatccgtgacataagttgtataattttaaagtttgttatgattatccatccacttgtgctactgggtacactttttgtaattgatggatgtgttgtagaggtaggtgtcaagttaacattgtagttattttaacatttagtataacattcaatctttcagttttggagtaagcaaataaggtttatgtac

SEQ ID NO: 53412 - protein, 484 aa, Glycine max
  peptide (1)..(484): Ceres Seq. ID no. 14310999
  misc_feature (324)..(484): Homolog of NCBI NO: 18411523 NR Description: proline-rich protein family [Arabidopsis
  misc_feature (127)..(266): Homolog of NCBI NO: 9279727 NR Description: gb|AAB61039.1~gene_id:MWL2.9~similar to unknown
  misc_feature (127)..(286): Homolog of NCBI NO: 21593550 NR Description: unknown [Arabidopsis thaliana]
  misc_feature (127)..(286): Homolog of NCBI NO: 18404538 NR Description: rhodanese-like domain protein [Arabidopsis
  misc_feature (124)..(287): Homolog of NCBI NO: 34907512 NR Description: B1099D03.26 [Oryza sativa (japonica
  misc_feature (41)..(471): Homolog of NCBI NO: 25407077 NR Description: hypothetical protein AT4g01050 [imported] -
  misc_feature (41)..(467): Homolog of NCBI NO: 7485232 NR Description: hypothetical protein A_IG002N01.31 - Arabidopsis
  misc_feature (41)..(483): Homolog of NCBI NO: 18411523 NR Description: proline-rich protein family [Arabidopsis
EQHKETKPTLLSLHNSDGSCTTTSDSLSLSASPHRFCDIPMEALNAAGLTPLSVLSDRTKTRTKHPSVSACKVSNFSTSTNKKQALLQSCISKTLHGGLILAASAVNGGAATALTYDEALGQPLSLPGTGDFDVNGFVESVAGFAAENPAIVAGGVVVLAVPLVLSQVFKKPKAWGVESAKNAYAKLGADGNAQLLDIRALVEIRQVGSPDVGGLKKKAVSIPYKGDDKPGFLKKLALKFKEPENTTLFILDKFDGNSELVAELVTINGFKAAYAIKDGAEGPRGWKSSGLPWIAPRKTLSLDNLTDAISEAIGDTSDGVAVTLGIAAAAAGLSILAFSEIESILQVVGSAALIQFASKKLLFAEDRKQTVKQLDEFLNTKVAPKELVDEIKDIGKALLPSSTNNKALPAPEEKSSELATADSTVQNAVATPEPKADAVAPEVNSVPKTEVKAEESFPAQPRPLSPYPYYPDFKPPTSPTPSQP

SEQ ID NO: 53413 - protein, 444 aa, Glycine max
  peptide (1)..(444): Ceres Seq. ID no. 14311000
  misc_feature (284)..(444): Homolog of NCBI NO: 18411523 NR Description: proline-rich protein family [Arabidopsis
  misc_feature (87)..(226): Homolog of NCBI NO: 9279727 NR Description: gb|AAB61039.1~gene_id:MWL2.9~similar to unknown
  misc_feature (87)..(246): Homolog of NCBI NO: 21593550 NR Description: unknown [Arabidopsis thaliana]
  misc_feature (87)..(246): Homolog of NCBI NO: 18404538 NR Description: rhodanese-like domain protein [Arabidopsis
  misc_feature (84)..(247): Homolog of NCBI NO: 34907512 NR Description: B1099D03.26 [Oryza sativa (japonica
  misc_feature (1)..(431): Homolog of NCBI NO: 25407077 NR Description: hypothetical protein AT4g01050 [imported] -
  misc_feature (1)..(427): Homolog of NCBI NO: 7485232 NR Description: hypothetical protein A_IG002N01.31 - Arabidopsis
  misc_feature (1)..(443): Homolog of NCBI NO: 18411523 NR Description: proline-rich protein family [Arabidopsis
MEALNAAGLTPLSVLSDRTKTRTKHPSVSACKVSNFSTSTNKKQALLQSCISKTLHGGLILAASAVNGGAATALTYDEALGQPLSLPGTGDFDVNGFVESVAGFAAENPAIVAGGVVVLAVPLVLSQVFKKPKAWGVESAKNAYAKLGADGNAQLLDIRALVEIRQVGSPDVGGLKKKAVSIPYKGDDKPGFLKKLALKFKEPENTTLFILDKFDGNSELVAELVTINGFKAAYAIKDGAEGPRGWKSSGLPWIAPRKTLSLDNLTDAISEAIGDTSDGVAVTLGIAAAAAGLSILAFSEIESILQVVGSAALIQFASKKLLFAEDRKQTVKQLDEFLNTKVAPKELVDEIKDIGKALLPSSTNNKALPAPEEKSSELATADSTVQNAVATPEPKADAVAPEVNSVPKTEVKAEESFPAQPRPLSPYPYYPDFKPPTSPTPSQP

SEQ ID NO: 53414 - DNA, 1218 bp, Glycine max
  misc_feature (1)..(1218): Ceres Seq. ID no. 12611963
accgggccccccctcgagtcagctacgtaggcccccccccccttgatagaatattttctcaggttggtgtggattactatatcatgtgttgcttctgtcttgagatttgacttcagctgtctagggccacagacaacccaaatccctacccctcccctccaaataacatgcactgtcctttcacttatgtttatatgaattatcagagcatttgttgaagatgcagattttgattcacttcaatattatctcaggttcccagaaggtttaccagtaaggttgagggaaagatgggttatgaagattttgtttacttcatactgtcagaagaggataaatcatctgagccaagtcttgagtattggttcaagtgcattgatttggatggaaatggagttctgacacggaatgaactgcaatttttttatgaggagcaattgcatcgaatggagtgcatggcccaagaacctgtgctttttgaggatatactgtgccagattattgacatgattggacctgaggatgagagctatataactctgcgtgacctgaaaggtggtaaactctcaggaagtgttttcaatatcctgttcaatctgaataagttcatggcctttgaaactcgtgacccatttttgattcgtcaggaacgtgagaatcctacattgacagagtgggatcgctttgctcatagagaatatattaggctttcaatggaagaagatgtagaggatgcctctaacggtagtgcagaagtttgggatgaatcactagaggctcccttctgacatcatttattgtatgagaagatattaatgcccccgatcggatggactggccattgttcagagacacgactcaggttcagcttggaatgccaactttactttgccccagaaagggggaaattccaagctcagatatggaatgcggtttcaatggggggcaagcagcaacaacgatattcagacatgcatgtactgacatatattgggaccattatcatgaaagttttgtcgcgggaccagtgcccatgtaaagtgaggacctttgctaagaggtgattagccaagttgaattaaattgacatcattttgagtcgcttaccttaagtagcgagattttctgatggatttttttagtaatttgatttacttatcgagtcacttttgcctcggatctgtccaacagtacaatcgtgatttgatttgtttcgtc

SEQ ID NO: 53415 - protein, 165 aa, Glycine max
  peptide (1)..(165): Ceres Seq. ID no. 12611964
  misc_feature (21)..(49): Pfam Name: EF hand Pfam Description: EF hand
  misc_feature (1)..(147): Homolog of NCBI NO: 34865818 NR Description: similar to alpha isoform of regulatory subunit B,
  misc_feature (1)..(119): Homolog of NCBI NO: 16905168 NR Description: putative phosphatase subunit, 3'-partial [Oryza
  misc_feature (1)..(165): Homolog of NCBI NO: 28393301 NR Description: putative protein phosphatase 2A [Arabidopsis
  misc_feature (1)..(165): Homolog of NCBI NO: 15219596 NR Description: putative protein phosphatase 2A; protein id:
  misc_feature (1)..(165): Homolog of NCBI NO: 15240089 NR Description: protein phosphatase 2A 62 kDa B regulatory
  misc_feature (1)..(165): Homolog of NCBI NO: 15221817 NR Description: protein phosphatase 2A 72 kDa regulatory subunit,
  misc_feature (1)..(165): Homolog of NCBI NO: 30692025 NR Description: protein phosphatase 2A regulatory subunit
  misc_feature (1)..(165): Homolog of NCBI NO: 18421273 NR Description: protein phosphatase 2A regulatory subunit B-like
  misc_feature (1)..(165): Homolog of NCBI NO: 15241978 NR Description: protein phosphatase 2A regulatory subunit B-like
  misc_feature (1)..(165): Homolog of NCBI NO: 37535364 NR Description: putative protein phosphatase 2A regulatory
MGYEDFVYFILSEEDKSSEPSLEYWFKCIDLDGNGVLTRNELQFFYEEQLHRMECMAQEPVLFEDILCQIIDMIGPEDESYITLRDLKGGKLSGSVFNILFNLNKFMAFETRDPFLIRQERENPTLTEWDRFAHREYIRLSMEEDVEDASNGSAEVWDESLEAPF

SEQ ID NO: 53416 - protein, 113 aa, Glycine max
  peptide (1)..(113): Ceres Seq. ID no. 12611965
  misc_feature (1)..(95): Homolog of NCBI NO: 34865818 NR Description: similar to alpha isoform of regulatory subunit B,
  misc_feature (1)..(67): Homolog of NCBI NO: 16905168 NR Description: putative phosphatase subunit, 3'-partial [Oryza
  misc_feature (1)..(113): Homolog of NCBI NO: 28393301 NR Description: putative protein phosphatase 2A [Arabidopsis
  misc_feature (1)..(113): Homolog of NCBI NO: 15219596 NR Description: putative protein phosphatase 2A; protein id:
  misc_feature (1)..(113): Homolog of NCBI NO: 15240089 NR Description: protein phosphatase 2A 62 kDa B regulatory
  misc_feature (1)..(113): Homolog of NCBI NO: 15221817 NR Description: protein phosphatase 2A 72 kDa regulatory subunit,
  misc_feature (1)..(113): Homolog of NCBI NO: 30692025 NR Description: protein phosphatase 2A regulatory subunit
  misc_feature (1)..(113): Homolog of NCBI NO: 18421273 NR Description: protein phosphatase 2A regulatory subunit B-like
  misc_feature (1)..(113): Homolog of NCBI NO: 15241978 NR Description: protein phosphatase 2A regulatory subunit B-like
  misc_feature (1)..(113): Homolog of NCBI NO: 37535364 NR Description: putative protein phosphatase 2A regulatory
MECMAQEPVLFEDILCQIIDMIGPEDESYITLRDLKGGKLSGSVFNILFNLNKFMAFETRDPFLIRQERENPTLTEWDRFAHREYIRLSMEEDVEDASNGSAEVWDESLEAPF

SEQ ID NO: 53417 - protein, 110 aa, Glycine max
  peptide (1)..(110): Ceres Seq. ID no. 12611966
  misc_feature (1)..(92): Homolog of NCBI NO: 34865818 NR Description: similar to alpha isoform of regulatory subunit B,
  misc_feature (1)..(64): Homolog of NCBI NO: 16905168 NR Description: putative phosphatase subunit, 3'-partial [Oryza
  misc_feature (1)..(110): Homolog of NCBI NO: 28393301 NR Description: putative protein phosphatase 2A [Arabidopsis
  misc_feature (1)..(110): Homolog of NCBI NO: 15219596 NR Description: putative protein phosphatase 2A; protein id:
  misc_feature (1)..(110): Homolog of NCBI NO: 15240089 NR Description: protein phosphatase 2A 62 kDa B regulatory
  misc_feature (1)..(110): Homolog of NCBI NO: 15221817 NR Description: protein phosphatase 2A 72 kDa regulatory subunit,
  misc_feature (1)..(110): Homolog of NCBI NO: 30692025 NR Description: protein phosphatase 2A regulatory subunit
  misc_feature (1)..(110): Homolog of NCBI NO: 18421273 NR Description: protein phosphatase 2A regulatory subunit B-like
  misc_feature (1)..(110): Homolog of NCBI NO: 15241978 NR Description: protein phosphatase 2A regulatory subunit B-like
  misc_feature (1)..(110): Homolog of NCBI NO: 37535364 NR Description: putative protein phosphatase 2A regulatory
MAQEPVLFEDILCQIIDMIGPEDESYITLRDLKGGKLSGSVFNILFNLNKFMAFETRDPFLIRQERENPTLTEWDRFAHREYIRLSMEEDVEDASNGSAEVWDESLEAPF

SEQ ID NO: 53418 - DNA, 1393 bp, Glycine max
  misc_feature (1)..(1393): Ceres Seq. ID no. 14304220
tattttttaaaaatgtattgttatttgctgaataccttttataagcaggaagtcaggcatatatagtttcaagaaggcccatgaaagggcatggaagggagatgattcagttgggtgttcgaattgctgatgccccagcagaaggggaaaatatgacaggagcctccaaagatatgaatgtagaatctattccttccttgtttcaagatattattgagcgtatggtttcctcgcaagtaatgactgtgaagcctgattgctgcattgtggatttctataatgagggtgatcactcacaaccccacagttggccatcatggtatggaaggcctgtttatgtgctttttctgactgaatgtgaaatgacttttggaagagtaattgcctcagagcatcctggggattataggggcagtatcaagctttctctagttcctgggtcccttctggttatgcagggtaaatccagtgattttgctaagcatgctcttccttccacacgcaaacaacgcatactggttaccttcacaaagtcccaaccaagaaagtcactatcaagtgatgctcaacagcttgcctcggcagtagcatcttctcattggggtccaccgccaagccgatctcccaatcatgttcgtcatcacgtaggccccaagcattacgctacacttccaacaactggggtactgccagctccacccattcgaccacaaatggcagctcccgttggcatgcaaccattgtttgttgctgctccagttgtacctcccatgccattttctgcacctgtgccaatcccagctggttctaccggatggacagctgcacctcctccaaggcatcctcctcctcgagtccctgctcctggaacaggagtcttcctacctccatcgggctcaggtaattcatctcaacagttaccagcaagtactttggctgaagttaacccaagcacggaaactccaaccatgccggagaaggaaaatgggaaaattaatcataatagtacaagtgcttcaccaaaaggaaaagtgcaaaagcaagaatgcaatgggcatgctgatggaactcaagttgaaccagctctagagacacggctagatagcaatgacaaagctgcaccaagtcattgagctgtaccatacttatagagagagagagagagagagaggtaaagcttatcacacgaacacgataggctgtgaacttaacttgagtttgaagcaaatgtaaagcgcggcaacaggagatatcactatatatatactgcagaggagaacaagggaaggaggtagaacttttggttctctctgtaatcctttctttgctccattccttttttgttgtcttaaaatattaactattacaggaagggaaacccattcttaattcg

SEQ ID NO: 53419 - protein, 350 aa, Glycine max
  peptide (1)..(350): Ceres Seq. ID no. 14304221
  misc_feature (57)..(149): Pfam Name: 2OG-Fe(II) oxygenase superfamily Pfam Description: 2OG-Fe(II) oxygenase superfamily
  misc_feature (1)..(156): Homolog of NCBI NO: 15234292 NR Description: oxidoreductase, 2OG-Fe(II) oxygenase family
  misc_feature (1)..(154): Homolog of NCBI NO: 30690892 NR Description: oxidoreductase, 2OG-Fe(II) oxygenase family
  misc_feature (1)..(154): Homolog of NCBI NO: 25409091 NR Description: hypothetical protein At2g48080 [imported] -
  misc_feature (1)..(156): Homolog of NCBI NO: 15227938 NR Description: oxidoreductase, 2OG-Fe(II) oxygenase family
  misc_feature (1)..(156): Homolog of NCBI NO: 7486990 NR Description: hypothetical protein T13L16.2 - Arabidopsis
  misc_feature (1)..(275): Homolog of NCBI NO: 15236223 NR Description: oxidoreductase, 2OG-Fe(II) oxygenase family
  misc_feature (1)..(240): Homolog of NCBI NO: 29367427 NR Description: unknown [Oryza sativa (japonica cultivar-group)]
  misc_feature (1)..(329): Homolog of NCBI NO: 37530586 NR Description: unknown protein [Oryza sativa (japonica
  misc_feature (1)..(273): Homolog of NCBI NO: 8778238 NR Description: F10B6.11 [Arabidopsis thaliana]
  misc_feature (1)..(273): Homolog of NCBI NO: 18394153 NR Description: proline-rich protein family [Arabidopsis
MKGHGREMIQLGVRIADAPAEGENMTGASKDMNVESIPSLFQDIIERMVSSQVMTVKPDCCIVDFYNEGDHSQPHSWPSWYGRPVYVLFLTECEMTFGRVIASEHPGDYRGSIKLSLVPGSLLVMQGKSSDFAKHALPSTRKQRILVTFTKSQPRKSLSSDAQQLASAVASSHWGPPPSRSPNHVRHHVGPKHYATLPTTGVLPAPPIRPQMAAPVGMQPLFVAAPVVPPMPFSAPVPIPAGSTGWTAAPPPRHPPPRVPAPGTGVFLPPSGSGNSSQQLPASTLAEVNPSTETPTMPEKENGKINHNSTSASPKGKVQKQECNGHADGTQVEPALETRLDSNDKAAPSH

SEQ ID NO: 53420 - protein, 343 aa, Glycine max
  peptide (1)..(343): Ceres Seq. ID no. 14304222
  misc_feature (50)..(142): Pfam Name: 2OG-Fe(II) oxygenase superfamily Pfam Description: 2OG-Fe(II) oxygenase superfamily
  misc_feature (1)..(149): Homolog of NCBI NO: 15234292 NR Description: oxidoreductase, 2OG-Fe(II) oxygenase family
  misc_feature (1)..(147): Homolog of NCBI NO: 30690892 NR Description: oxidoreductase, 2OG-Fe(II) oxygenase family
  misc_feature (1)..(147): Homolog of NCBI NO: 25409091 NR Description: hypothetical protein At2g48080 [imported] -
  misc_feature (1)..(149): Homolog of NCBI NO: 15227938 NR Description: oxidoreductase, 2OG-Fe(II) oxygenase family
  misc_feature (1)..(149): Homolog of NCBI NO: 7486990 NR Description: hypothetical protein T13L16.2 - Arabidopsis
  misc_feature (1)..(268): Homolog of NCBI NO: 15236223 NR Description: oxidoreductase, 2OG-Fe(II) oxygenase family
  misc_feature (1)..(233): Homolog of NCBI NO: 29367427 NR Description: unknown [Oryza sativa (japonica cultivar-group)]
  misc_feature (1)..(322): Homolog of NCBI NO: 37530586 NR Description: unknown protein [Oryza sativa (japonica
  misc_feature (1)..(266): Homolog of NCBI NO: 8778238 NR Description: F10B6.11 [Arabidopsis thaliana]
  misc_feature (1)..(266): Homolog of NCBI NO: 18394153 NR Description: proline-rich protein family [Arabidopsis
MIQLGVRIADAPAEGENMTGASKDMNVESIPSLFQDIIERMVSSQVMTVKPDCCIVDFYNEGDHSQPHSWPSWYGRPVYVLFLTECEMTFGRVIASEHPGDYRGSIKLSLVPGSLLVMQGKSSDFAKHALPSTRKQRILVTFTKSQPRKSLSSDAQQLASAVASSHWGPPPSRSPNHVRHHVGPKHYATLPTTGVLPAPPIRPQMAAPVGMQPLFVAAPVVPPMPFSAPVPIPAGSTGWTAAPPPRHPPPRVPAPGTGVFLPPSGSGNSSQQLPASTLAEVNPSTETPTMPEKENGKINHNSTSASPKGKVQKQECNGHADGTQVEPALETRLDSNDKAAPSH

SEQ ID NO: 53421 - protein, 326 aa, Glycine max
  peptide (1)..(326): Ceres Seq. ID no. 14304223
  misc_feature (33)..(125): Pfam Name: 2OG-Fe(II) oxygenase superfamily Pfam Description: 2OG-Fe(II) oxygenase superfamily
  misc_feature (1)..(132): Homolog of NCBI NO: 15234292 NR Description: oxidoreductase, 2OG-Fe(II) oxygenase family
  misc_feature (1)..(130): Homolog of NCBI NO: 30690892 NR Description: oxidoreductase, 2OG-Fe(II) oxygenase family
  misc_feature (1)..(130): Homolog of NCBI NO: 25409091 NR Description: hypothetical protein At2g48080 [imported] -
  misc_feature (1)..(132): Homolog of NCBI NO: 15227938 NR Description: oxidoreductase, 2OG-Fe(II) oxygenase family
  misc_feature (1)..(132): Homolog of NCBI NO: 7486990 NR Description: hypothetical protein T13L16.2 - Arabidopsis
  misc_feature (1)..(251): Homolog of NCBI NO: 15236223 NR Description: oxidoreductase, 2OG-Fe(II) oxygenase family
  misc_feature (1)..(216): Homolog of NCBI NO: 29367427 NR Description: unknown [Oryza sativa (japonica cultivar-group)]
  misc_feature (1)..(305): Homolog of NCBI NO: 37530586 NR Description: unknown protein [Oryza sativa (japonica
  misc_feature (1)..(249): Homolog of NCBI NO: 8778238 NR Description: F10B6.11 [Arabidopsis thaliana]
  misc_feature (1)..(249): Homolog of NCBI NO: 18394153 NR Description: proline-rich protein family [Arabidopsis
MTGASKDMNVESIPSLFQDIIERMVSSQVMTVKPDCCIVDFYNEGDHSQPHSWPSWYGRPVYVLFLTECEMTFGRVIASEHPGDYRGSIKLSLVPGSLLVMQGKSSDFAKHALPSTRKQRILVTFTKSQPRKSLSSDAQQLASAVASSHWGPPPSRSPNHVRHHVGPKHYATLPTTGVLPAPPIRPQMAAPVGMQPLFVAAPVVPPMPFSAPVPIPAGSTGWTAAPPPRHPPPRVPAPGTGVFLPPSGSGNSSQQLPASTLAEVNPSTETPTMPEKENGKINHNSTSASPKGKVQKQECNGHADGTQVEPALETRLDSNDKAAPSH

SEQ ID NO: 53422 - DNA, 1374 bp, Glycine max
  misc_feature (1)..(1374): Ceres Seq. ID no. 14304094
agagagatcagagatgtgtgggagagcacgttgtactctgagagcggatgatgtcccaagggcttgtcaccgcagcacttcccctactcgcactcttcatatcgaccggtataggccagcgtataatgtgtcaccgggattcgacgtgccagtggttcgtagagatgacgcgtctggcggtgaaggctatgttcttcaatgcatgaaatggggtttaatccccagttttacaaagaagacagagaagcctgatcactacaggatgtttaatgctcgatctgaatctatagatgaaaaggcatcatttcgccgtctgcttcctaaaagcaggtgccttgtggcagtagaaggattttatgagtggaaaaaggatggttcaaagaaacagccttactatattcacttcaaagatggacgaccacttgtctttgctgctctttatgactcatggcaaaattctgaaggtgaaacactatatacattcactattgttacaacctcttcatcttcagcacttcagtggcttcatgacaggatgcctgttattttgggcagcaaggaatcaactgatatttggctaagcagttctgcttccagttttaagagtgtgatgaagccatatgaagaatctgatttggtgtggtacccagtgacatctgctatgggcaaggcatcatttgatggacctgagtgcataaaggagattcaagtaaaagcacaagggaacacttcaatctctatgttcttttcaaaaaaaggagatgaaagtaaagacacaaagccagaacagaaagcatcatgtcctgaagttgtcaaaactgaacatacagaagacctgactgaaagtaaagacacaaagccagagcagaaaacatcaagtcatgaatttgtcaagactgaacctacagaagacttgagagaaagagctaaaactgaggagggaggcaatgacttaaaattccatggttcttcccattctcaaaatgtttctatgctcccaattaagcgtgagtatgagacattttcggctgctgattcaaagccagcattggcaaatcatgatcagataagtccaaaccctgcaaagaaaaaggaaaaagcaaagactgctaatgataaacaaccaaccctgttttcatactttggaaaaagtaaccactaaactaactggttttggttttgcattaacatgaggattgctatgtttgtattggtgtaaattacacatgcattttcttttagcttgtgtatttccatgtaggccttgttttatatgcacattttcaatctctactcttgttggaaggtctttctttagtccatggttcatgttcaagaggagctttataattaaatagcaaggctttttgtatt

SEQ ID NO: 53423 - protein, 386 aa, Glycine max
  peptide (1)..(386): Ceres Seq. ID no. 14304095
  misc_feature (5)..(230): Pfam Name: Uncharacterised ACR, COG2135 Pfam Description: Uncharacterised ACR, COG2135
  misc_feature (41)..(235): Homolog of NCBI NO: 22963055 NR Description: hypothetical protein [Rhodopseudomonas palustris]
  misc_feature (5)..(235): Homolog of NCBI NO: 23098326 NR Description: hypothetical protein [Oceanobacillus iheyensis
  misc_feature (26)..(332): Homolog of NCBI NO: 6323761 NR Description: Hypothetical ORF; Ymr114cp [Saccharomyces
  misc_feature (5)..(235): Homolog of NCBI NO: 37522067 NR Description: hypothetical protein gll2498 [Gloeobacter
  misc_feature (5)..(135): Homolog of NCBI NO: 38494381 NR Description: Unknown (protein for MGC:75607) [Silurana
  misc_feature (118)..(310): Homolog of NCBI NO: 38494381 NR Description: Unknown (protein for MGC:75607) [Silurana
  misc_feature (5)..(235): Homolog of NCBI NO: 39995151 NR Description: conserved hypothetical protein [Geobacter
  misc_feature (5)..(37): Homolog of NCBI NO: 7487880 NR Description: hypothetical protein At2g26470 [imported] -
  misc_feature (37)..(285): Homolog of NCBI NO: 7487880 NR Description: hypothetical protein At2g26470 [imported] -
  misc_feature (5)..(285): Homolog of NCBI NO: 30683129 NR Description: expressed protein [Arabidopsis thaliana]
ERSEMCGRARCTLRADDVPRACHRSTSPTRTLHIDRYRPAYNVSPGFDVPVVRRDDASGGEGYVLQCMKWGLIPSFTKKTEKPDHYRMFNARSESIDEKASFRRLLPKSRCLVAVEGFYEWKKDGSKKQPYYIHFKDGRPLVFAALYDSWQNSEGETLYTFTIVTTSSSSALQWLHDRMPVILGSKESTDIWLSSSASSFKSVMKPYEESDLVWYPVTSAMGKASFDGPECIKEIQVKAQGNTSISMFFSKKGDESKDTKPEQKASCPEVVKTEHTEDLTESKDTKPEQKTSSHEFVKTEPTEDLRERAKTEEGGNDLKFHGSSHSQNVSMLPIKREYETFSAADSKPALANHDQISPNPAKKKEKAKTANDKQPTLFSYFGKSNH

SEQ ID NO: 53424 - protein, 382 aa, Glycine max
  peptide (1)..(382): Ceres Seq. ID no. 14304096
  misc_feature (1)..(226): Pfam Name: Uncharacterised ACR, COG2135 Pfam Description: Uncharacterised ACR, COG2135
  misc_feature (37)..(231): Homolog of NCBI NO: 22963055 NR Description: hypothetical protein [Rhodopseudomonas palustris]
  misc_feature (1)..(231): Homolog of NCBI NO: 23098326 NR Description: hypothetical protein [Oceanobacillus iheyensis
  misc_feature (22)..(328): Homolog of NCBI NO: 6323761 NR Description: Hypothetical ORF; Ymr114cp [Saccharomyces
  misc_feature (1)..(231): Homolog of NCBI NO: 37522067 NR Description: hypothetical protein gll2498 [Gloeobacter
  misc_feature (1)..(131): Homolog of NCBI NO: 38494381 NR Description: Unknown (protein for MGC:75607) [Silurana
  misc_feature (114)..(306): Homolog of NCBI NO: 38494381 NR Description: Unknown (protein for MGC:75607) [Silurana
  misc_feature (1)..(231): Homolog of NCBI NO: 39995151 NR Description: conserved hypothetical protein [Geobacter
  misc_feature (1)..(33): Homolog of NCBI NO: 7487880 NR Description: hypothetical protein At2g26470 [imported] -
  misc_feature (33)..(281): Homolog of NCBI NO: 7487880 NR Description: hypothetical protein At2g26470 [imported] -
  misc_feature (1)..(281): Homolog of NCBI NO: 30683129 NR Description: expressed protein [Arabidopsis thaliana]
MCGRARCTLRADDVPRACHRSTSPTRTLHIDRYRPAYNVSPGFDVPVVRRDDASGGEGYVLQCMKWGLIPSFTKKTEKPDHYRMFNARSESIDEKASFRRLLPKSRCLVAVEGFYEWKKDGSKKQPYYIHFKDGRPLVFAALYDSWQNSEGETLYTFTIVTTSSSSALQWLHDRMPVILGSKESTDIWLSSSASSFKSVMKPYEESDLVWYPVTSAMGKASFDGPECIKEIQVKAQGNTSISMFFSKKGDESKDTKPEQKASCPEVVKTEHTEDLTESKDTKPEQKTSSHEFVKTEPTEDLRERAKTEEGGNDLKFHGSSHSQNVSMLPIKREYETFSAADSKPALANHDQISPNPAKKKEKAKTANDKQPTLFSYFGKSNH

SEQ ID NO: 53425 - protein, 319 aa, Glycine max
  peptide (1)..(319): Ceres Seq. ID no. 14304097
  misc_feature (1)..(163): Pfam Name: Uncharacterised ACR, COG2135 Pfam Description: Uncharacterised ACR, COG2135
  misc_feature (1)..(236): Homolog of NCBI NO: 40740232 NR Description: hypothetical protein AN4161.2 [Aspergillus
  misc_feature (1)..(168): Homolog of NCBI NO: 22963055 NR Description: hypothetical protein [Rhodopseudomonas palustris]
  misc_feature (1)..(168): Homolog of NCBI NO: 23098326 NR Description: hypothetical protein [Oceanobacillus iheyensis
  misc_feature (1)..(265): Homolog of NCBI NO: 6323761 NR Description: Hypothetical ORF; Ymr114cp [Saccharomyces
  misc_feature (1)..(168): Homolog of NCBI NO: 37522067 NR Description: hypothetical protein gll2498 [Gloeobacter
  misc_feature (1)..(68): Homolog of NCBI NO: 38494381 NR Description: Unknown (protein for MGC:75607) [Silurana
  misc_feature (51)..(243): Homolog of NCBI NO: 38494381 NR Description: Unknown (protein for MGC:75607) [Silurana
  misc_feature (1)..(168): Homolog of NCBI NO: 39995151 NR Description: conserved hypothetical protein [Geobacter
  misc_feature (1)..(218): Homolog of NCBI NO: 7487880 NR Description: hypothetical protein At2g26470 [imported] -
  misc_feature (1)..(218): Homolog of NCBI NO: 30683129 NR Description: expressed protein [Arabidopsis thaliana]
MKWGLIPSFTKKTEKPDHYRMFNARSESIDEKASFRRLLPKSRCLVAVEGFYEWKKDGSKKQPYYIHFKDGRPLVFAALYDSWQNSEGETLYTFTIVTTSSSSALQWLHDRMPVILGSKESTDIWLSSSASSFKSVMKPYEESDLVWYPVTSAMGKASFDGPECIKEIQVKAQGNTSISMFFSKKGDESKDTKPEQKASCPEVVKTEHTEDLTESKDTKPEQKTSSHEFVKTEPTEDLRERAKTEEGGNDLKFHGSSHSQNVSMLPIKREYETFSAADSKPALANHDQISPNPAKKKEKAKTANDKQPTLFSYFGKSNH

SEQ ID NO: 53426 - DNA, 1352 bp, Glycine max
  misc_feature (1)..(1352): Ceres Seq. ID no. 15225034
aattcatgcttgtctttgccaatattctaaagtttgaattttcatcgcaacaggttagttgggatgagcctgatttgctacataatgtgaagcgagtgagcccatggttggttgagttggtatctaacgtgccaatcatccatctggcagccttctctccaccaaggaagaagcttaggttcccccttgacgttcagtttccgataccatcgttttcaggcaacccctttgggtcttctagctctagcagccccttttgttgtctctctgataacgctcctgcaggcatacagggagccaggcattctcaaattggaatatctttatcagatctccaccttaacaataagctgcagttggggttgcttccaactaaagtccaccagcttaatttgcacgccgggatttctaatgctaagagtaaagaaagtctatcatccttgctctccatgggaaattctaacatgactttggagaaatctgatcatgtcaagagacaccattttttgcttttcggtcaaccgatactcaccgagcaacaaatctctagatcttctagtgatgtcgccacggatgatgagaataaggaaaagaagaagaagggatttcttagtgactcccagtcttcagtttcaccaggaaatttatcttctactgccgagttctcttggcaactcggttctgataccagtcattgcaaggttttcatggagtctgaagatgtaggacggacacttgacttgtcctgcctttcttcttatcaagagttgtacatgagactcgctaacatgtttggaatagagaggtctgatatgttgagtcatgttctctactgcgactcatccggtgctcttaagcaaattggagaggaacccttcagtgagttcatgaagacagcaaaaagattgaccattctgacggattcaaacaacaaagatagtagaaggtgggagaaagaaaattaatgaaatatgtataggatgtgcttccggggaagatactattgtatgtgcaagtgtaactgttccttcctctttgtgacttcaaagtctgttttgcagggtttggatcacaggaactcgaaatgctgaacatggattggatgctgcatcaaataagacaggtcctctcagtatatttgcttaatatggtgtggcatggcatcggagacattgtttttagatatgaaaagttgaaggacatagttattactcagttgtaagagatgctaatatgaactgaaaattccatcaatattggcgtctttgttttcgatgtccatttgtagaaaataatgatttttcctgtatgatggacaattactattctaatattaattaattaattaacct

SEQ ID NO: 53427 - protein, 320 aa, Glycine max
  peptide (1)..(320): Ceres Seq. ID no. 15225035
  misc_feature (203)..(314): Pfam Name: AUX/IAA family Pfam Description: AUX/IAA family
  misc_feature (135)..(315): Homolog of NCBI NO: 19352051 NR Description: auxin response factor 10 [Oryza sativa]
  misc_feature (17)..(186): Homolog of NCBI NO: 37535416 NR Description: putative transcription factor
  misc_feature (17)..(259): Homolog of NCBI NO: 19352051 NR Description: auxin response factor 10 [Oryza sativa]
  misc_feature (17)..(122): Homolog of NCBI NO: 21741865 NR Description: OSJNBa0019D11.3 [Oryza sativa (japonica
  misc_feature (158)..(310): Homolog of NCBI NO: 21741865 NR Description: OSJNBa0019D11.3 [Oryza sativa (japonica
  misc_feature (53)..(314): Homolog of NCBI NO: 37535416 NR Description: putative transcription factor
  misc_feature (17)..(316): Homolog of NCBI NO: 15226389 NR Description: auxin response transcription factor [Arabidopsis
  misc_feature (17)..(292): Homolog of NCBI NO: 7484815 NR Description: auxin response factor 7 homolog F6G3.110 -
  misc_feature (17)..(316): Homolog of NCBI NO: 6165644 NR Description: auxin response factor 10 [Arabidopsis thaliana]
  misc_feature (17)..(311): Homolog of NCBI NO: 18417527 NR Description: transcription factor-related protein [Arabidopsis
FMLVFANILKFEFSSQQVSWDEPDLLHNVKRVSPWLVELVSNVPIIHLAAFSPPRKKLRFPLDVQFPIPSFSGNPFGSSSSSSPFCCLSDNAPAGIQGARHSQIGISLSDLHLNNKLQLGLLPTKVHQLNLHAGISNAKSKESLSSLLSMGNSNMTLEKSDHVKRHHFLLFGQPILTEQQISRSSSDVATDDENKEKKKKGFLSDSQSSVSPGNLSSTAEFSWQLGSDTSHCKVFMESEDVGRTLDLSCLSSYQELYMRLANMFGIERSDMLSHVLYCDSSGALKQIGEEPFSEFMKTAKRLTILTDSNNKDSRRWEKEN

SEQ ID NO: 53428 - protein, 319 aa, Glycine max
  peptide (1)..(319): Ceres Seq. ID no. 15225036
  misc_feature (202)..(313): Pfam Name: AUX/IAA family Pfam Description: AUX/IAA family
  misc_feature (134)..(314): Homolog of NCBI NO: 19352051 NR Description: auxin response factor 10 [Oryza sativa]
  misc_feature (16)..(185): Homolog of NCBI NO: 37535416 NR Description: putative transcription factor
  misc_feature (16)..(258): Homolog of NCBI NO: 19352051 NR Description: auxin response factor 10 [Oryza sativa]
  misc_feature (16)..(121): Homolog of NCBI NO: 21741865 NR Description: OSJNBa0019D11.3 [Oryza sativa (japonica
  misc_feature (157)..(309): Homolog of NCBI NO: 21741865 NR Description: OSJNBa0019D11.3 [Oryza sativa (japonica
  misc_feature (52)..(313): Homolog of NCBI NO: 37535416 NR Description: putative transcription factor
  misc_feature (16)..(315): Homolog of NCBI NO: 15226389 NR Description: auxin response transcription factor [Arabidopsis
  misc_feature (16)..(291): Homolog of NCBI NO: 7484815 NR Description: auxin response factor 7 homolog F6G3.110 -
  misc_feature (16)..(315): Homolog of NCBI NO: 6165644 NR Description: auxin response factor 10 [Arabidopsis thaliana]
  misc_feature (16)..(310): Homolog of NCBI NO: 18417527 NR Description: transcription factor-related protein [Arabidopsis
MLVFANILKFEFSSQQVSWDEPDLLHNVKRVSPWLVELVSNVPIIHLAAFSPPRKKLRFPLDVQFPIPSFSGNPFGSSSSSSPFCCLSDNAPAGIQGARHSQIGISLSDLHLNNKLQLGLLPTKVHQLNLHAGISNAKSKESLSSLLSMGNSNMTLEKSDHVKRHHFLLFGQPILTEQQISRSSSDVATDDENKEKKKKGFLSDSQSSVSPGNLSSTAEFSWQLGSDTSHCKVFMESEDVGRTLDLSCLSSYQELYMRLANMFGIERSDMLSHVLYCDSSGALKQIGEEPFSEFMKTAKRLTILTDSNNKDSRRWEKEN

SEQ ID NO: 53429 - protein, 171 aa, Glycine max
  peptide (1)..(171): Ceres Seq. ID no. 15225037
  misc_feature (54)..(165): Pfam Name: AUX/IAA family Pfam Description: AUX/IAA family
  misc_feature (1)..(166): Homolog of NCBI NO: 19352051 NR Description: auxin response factor 10 [Oryza sativa]
  misc_feature (1)..(37): Homolog of NCBI NO: 37535416 NR Description: putative transcription factor
  misc_feature (1)..(110): Homolog of NCBI NO: 19352051 NR Description: auxin response factor 10 [Oryza sativa]
  misc_feature (9)..(161): Homolog of NCBI NO: 21741865 NR Description: OSJNBa0019D11.3 [Oryza sativa (japonica
  misc_feature (1)..(165): Homolog of NCBI NO: 37535416 NR Description: putative transcription factor
  misc_feature (1)..(167): Homolog of NCBI NO: 15226389 NR Description: auxin response transcription factor [Arabidopsis
  misc_feature (1)..(143): Homolog of NCBI NO: 7484815 NR Description: auxin response factor 7 homolog F6G3.110 -
  misc_feature (1)..(167): Homolog of NCBI NO: 6165644 NR Description: auxin response factor 10 [Arabidopsis thaliana]
  misc_feature (1)..(162): Homolog of NCBI NO: 18417527 NR Description: transcription factor-related protein [Arabidopsis
MGNSNMTLEKSDHVKRHHFLLFGQPILTEQQISRSSSDVATDDENKEKKKKGFLSDSQSSVSPGNLSSTAEFSWQLGSDTSHCKVFMESEDVGRTLDLSCLSSYQELYMRLANMFGIERSDMLSHVLYCDSSGALKQIGEEPFSEFMKTAKRLTILTDSNNKDSRRWEKEN

SEQ ID NO: 53430 - DNA, 796 bp, Glycine max
  misc_feature (1)..(796): Ceres Seq. ID no. 12581497
aaggattattctaaaaaaatacagggatttgaaatttcatttgttgaatcttgcttactttcattttaatataatgatctctattagttaatctattaatatctattagttaatctattaatagaatataagtaatatagaatctaagtaattcacggttaggatagatctaaaccagctcattatatatatattacaacttactatgccaactatgaaacaacttattagaaacacaagacagccaatccgaaacgtcacaaaatccccagctcttcggggatgccctcagcgccgaggaacgtgtaccagggtgtatgtgcgactcgttcagatcatatactaagaagaaaaaaccaatttcattttttcagtattgttgatcggttaagatagtgtgaatgtagttttcccattcagactatcttaacttatatatatacattctttacattcttctatcttgtatcaaatttatggtttcgattggtgcaaacccaatagtcttaatttacaatttaagatgagaaggactttcccatcggtaacaaaacaaatataaagttacccgttaagcggagaaaatactatttcaattaaagataaagtatgtccttaatgaatgaattttgatggattttggacgaacggaataagaaggtcagctacccagcaaattttcataattaaataccgttactgtataactagatttcattgtgaaaaaatctacttactaaactaaatattggatgggtagagccaaagagtgtgaactgtacaagttaacaataac

SEQ ID NO: 53431 - protein, 46 aa, Glycine max
  peptide (1)..(46): Ceres Seq. ID no. 12581498
MPTMKQLIRNTRQPIRNVTKSPALRGCPQRRGTCTRVYVRLVQIIY

SEQ ID NO: 53432 - protein, 43 aa, Glycine max
  peptide (1)..(43): Ceres Seq. ID no. 12581499
MKQLIRNTRQPIRNVTKSPALRGCPQRRGTCTRVYVRLVQIIY

SEQ ID NO: 53433 - protein, 40 aa, Glycine max
  peptide (1)..(40): Ceres Seq. ID no. 12581500
MNFDGFWTNGIRRSATQQIFIIKYRYCITRFHCEKIYLLN

SEQ ID NO: 53434 - DNA, 1076 bp, Glycine max
  misc_feature (1)..(1076): Ceres Seq. ID no. 15176051
ttttttagttaaaattttcacttatttgatgataccaagttctttgtatatattattattcactcttgattcagaggaatggcaattgaggatccctgtgccccccacggccttcgccttgtgatagaggactacccttatgctgttgatggactagaaatatgggatgctattcagacatgggttaagaactatgtctccttgtattacccaacagatgatgcaattaagaaagactctgagctccaagcttggtggaaggaagctgttgagacgggtcacggtgacttgaaagacaagccatggtggcctaagttgaacactcctcaagatttggttcacatttgctccattatcatatggatagcttcagctctccatgcagcagtgaattttggacaatacccttatggaggtttgatcctaaaccgtccaactttaaccagaagatttctccctgaaccaggaagcaaagaatatgaggagctttcaaccaattatcaaaaggcttacctgagaacaattacaagaaagattgaggcccttgtggacctttcagtgatagagatattgtcaagacatgcttctgatgagatctaccttgggaagagggacagtgacgattggactgatgaccaaaaggcaattcaagcctttgaaaagtttggaaccaagctgaaggaaattgaggccaaaatcaattcgaggaacaaagattcaagccttagaaaccgtaatggaccggttcagatgccttatactgtgcttcttcctaccagtgaggaaggccttactttcagaggaattcccaacagcatctctatctaaggccagagtgcgtttatgtgtggttctctttccaaacctacgttacctttctcgttgacgagtaaatatgcaagcttatgcatgcatataataattgtcttatgcattcttaagtgttgtatgtggacgttatctagttttcgtatttaataagaatggtatcaccattactttgtttttactatcatgttcacccgtagtatgtaagattgatatcccaaactatgattatgaaatcaaatttctcc

SEQ ID NO: 53435 - protein, 249 aa, Glycine max
  peptide (1)..(249): Ceres Seq. ID no. 15176052
  misc_feature (1)..(233): Pfam Name: Lipoxygenase Pfam Description: Lipoxygenase
  misc_feature (1)..(249): Homolog of NCBI NO: 7433150 NR Description: lipoxygenase (EC 1.13.11.12) - garden pea
  misc_feature (1)..(249): Homolog of NCBI NO: 7208773 NR Description: lipoxygenase [Cicer arietinum]
  misc_feature (1)..(249): Homolog of NCBI NO: 7433162 NR Description: lipoxygenase (EC 1.13.11.12) - kidney bean
  misc_feature (1)..(249): Homolog of NCBI NO: 126409 NR Description: Lipoxygenase 1
MAIEDPCAPHGLRLVIEDYPYAVDGLEIWDAIQTWVKNYVSLYYPTDDAIKKDSELQAWWKEAVETGHGDLKDKPWWPKLNTPQDLVHICSIIIWIASALHAAVNFGQYPYGGLILNRPTLTRRFLPEPGSKEYEELSTNYQKAYLRTITRKIEALVDLSVIEILSRHASDEIYLGKRDSDDWTDDQKAIQAFEKFGTKLKEIEAKINSRNKDSSLRNRNGPVQMPYTVLLPTSEEGLTFRGIPNSISI

SEQ ID NO: 53436 - DNA, 849 bp, Glycine max
  misc_feature (1)..(849): Ceres Seq. ID no. 14304536
atatttcaagcctcttcatagtttccatggttatctaaatataccatttgagattttgaatactatttgggtattgaatgtcacttgagaggagtgaggactaatactttttcttttgtataattgcatcaaattttgcagaatactactcaagtgagatactttgatttaactccctttgttcatggatgaaaaactcaattgaagtaattcactggactactttgtcctcttggtctgaggttgaagctatttgatttctgaatttcgctagtttcttaatctgagtatggctgggaaccaagatcagttagagatcaagtttctgttgagtgatggtacagatattggccccaaaagttatgctgctgccactagtattgcaacactgaaagaaagtgttcttgctcaatggccaaaagataaagagtatggaccaagaactgtaaaagatttgaagttaattagtgccggaaaaatattggagaacaacagaacagtgggagaatgtcagagtcccctgtgtgatctacctggtggagttataacaatgcatgtggttgtgcaaccaccttctgtggagaaagataagaaagtagcaagtgaagcgaagcagagcaaatgtgtttgtgtgatattatagtgtccaaattgaatagaagttgtcatgtatttaggtggttaaaagttacacttgtattcattttaaaagtaatctatggctttcaaaagatttcctcatacacaaattctttgggtgcatgcctcattgtctgattgatgtaaatgctgattgaaatgaactctaaaattattctcgtgcttcagcttgaaaaaaaaaaaaaaaag

SEQ ID NO: 53437 - protein, 117 aa, Glycine max
  peptide (1)..(117): Ceres Seq. ID no. 14304537
  misc_feature (8)..(95): Pfam Name: Ubiquitin family Pfam Description: Ubiquitin family
  misc_feature (5)..(117): Homolog of NCBI NO: 15234839 NR Description: ubiquitin family [Arabidopsis thaliana]
  misc_feature (6)..(117): Homolog of NCBI NO: 38347220 NR Description: OSJNBa0055C08.14 [Oryza sativa (japonica
  misc_feature (3)..(117): Homolog of NCBI NO: 15218145 NR Description: expressed protein [Arabidopsis thaliana]
  misc_feature (1)..(99): Homolog of NCBI NO: 25402954 NR Description: protein F2E2.12 [imported] - Arabidopsis thaliana
  misc_feature (3)..(117): Homolog of NCBI NO: 21592966 NR Description: ubiquitin-fusion protein, putative [Arabidopsis
  misc_feature (1)..(99): Homolog of NCBI NO: 11358132 NR Description: hypothetical protein T20K14_70 - Arabidopsis
  misc_feature (5)..(117): Homolog of NCBI NO: 4097587 NR Description: NTGP5 [Nicotiana tabacum]
  misc_feature (1)..(117): Homolog of NCBI NO: 15219188 NR Description: ubiquitin family [Arabidopsis thaliana]
  misc_feature (1)..(117): Homolog of NCBI NO: 15232032 NR Description: ubiquitin family [Arabidopsis thaliana]
  misc_feature (1)..(115): Homolog of NCBI NO: 18417680 NR Description: expressed protein [Arabidopsis thaliana]
MAGNQDQLEIKFLLSDGTDIGPKSYAAATSIATLKESVLAQWPKDKEYGPRTVKDLKLISAGKILENNRTVGECQSPLCDLPGGVITMHVVVQPPSVEKDKKVASEAKQSKCVCVIL

SEQ ID NO: 53438 - DNA, 1341 bp, Glycine max
  misc_feature (1)..(1341): Ceres Seq. ID no. 14304475
gtggttgtgggtaggtgctgctgctgcttccattcctattcttacagtgaaggttcaatggaagggacaatgcagcttgcatacgagactgttgtgaagctcatgctggctgcactcgaacgcaacgtgctccctgacgtcatcaccaggagactcacgcgcttgctgttggctactcgccttcgctctgcttacaaaccctcctcccaacttcaactctccgatctcctctacttcgcgcattcattacaagagatgcccatagcaatcaacactgacaagcctaagtctcaacattatgaattaccaaccgctttcttcaagctcgtcctcggaaacaatctcaaatacagctgttgttatttctcttctgcctcaatgacgctggatgatgctgaagaagcaatgttgaaactgtactgtgagagatcaaacctgaaagatggtcatacagtgcttgatgtgggatgcggttggggatcgttggctctatacattgccaagaattacactaactgtagggttacaggaatctgcaattccacaactcaaaaggcttatattgaggagaagtgtagggatcttcagctgcaaaatttgaatattatagttgctgatattagcacatttgaaatggagacttcttatgacagaatattttccatagaaatgtttgagcatatgaagaactataaagatcttctgaagaagatatccaaatggatgaaagaggatagccttttatttgttcattacttctgccacaaagcatttgcctaccactttgaggacaaaaatgaagatgactggattacaagatacttctttactggaggaactatgccttcggcaaatctacttctttatttccaagatgatgttactgtcaccaaccattggctagtaaatgggaaacactacgcacagaccagtgaagaatggctcaaaagaatggaccagagaatgactttcatcaagccaattatgcaatcaacatacggcaaggactcagctaccaagtggactgcttattggagaacattcttcatagctgtagcagaactttttggatacaataacggtgaagaatggatggttgcacacttccttttcaaaaagaaataaataagccgaaacctagtctttttatttgactatttgagaacggccttaggacaaaaaagctgctacacgaggttgcacccttcaataatgttgtatacttttattagttaacttgttttagttggttgcttgtctttatttttccctgttgtaatggtgttgccactccaaccttattttatcttaaattttgggaaagtccaattcaaccctcgg

SEQ ID NO: 53439 - protein, 374 aa, Glycine max
  peptide (1)..(374): Ceres Seq. ID no. 14304476
  misc_feature (203)..(373): Pfam Name: Cyclopropane-fatty-acyl-phospholipid synthase Pfam Description: Cyclopropane-fatty-acyl-phospholipid synthase
  misc_feature (40)..(374): Homolog of NCBI NO: 21230783 NR Description: conserved hypothetical protein
  misc_feature (35)..(373): Homolog of NCBI NO: 39997416 NR Description: cyclopropane-fatty-acyl-phospholipid synthase,
  misc_feature (40)..(374): Homolog of NCBI NO: 21242125 NR Description: conserved hypothetical protein
  misc_feature (35)..(374): Homolog of NCBI NO: 33413898 NR Description: S-adenosyl-L-methionine:coclaurine
  misc_feature (31)..(374): Homolog of NCBI NO: 16754879 NR Description: coclaurine N-methyltransferase [Coptis japonica]
  misc_feature (86)..(374): Homolog of NCBI NO: 7486450 NR Description: hypothetical protein F4I10.50 - Arabidopsis
  misc_feature (20)..(374): Homolog of NCBI NO: 30689611 NR Description: expressed protein [Arabidopsis thaliana]
  misc_feature (20)..(374): Homolog of NCBI NO: 21593795 NR Description: coclaurine N-methyltransferase [Arabidopsis
  misc_feature (20)..(374): Homolog of NCBI NO: 18418151 NR Description: expressed protein [Arabidopsis thaliana]
  misc_feature (20)..(374): Homolog of NCBI NO: 26451688 NR Description: unknown protein [Arabidopsis thaliana]
VVVGRCCCCFHSYSYSEGSMEGTMQLAYETVVKLMLAALERNVLPDVITRRLTRLLLATRLRSAYKPSSQLQLSDLLYFAHSLQEMPIAINTDKPKSQHYELPTAFFKLVLGNNLKYSCCYFSSASMTLDDAEEAMLKLYCERSNLKDGHTVLDVGCGWGSLALYIAKNYTNCRVTGICNSTTQKAYIEEKCRDLQLQNLNIIVADISTFEMETSYDRIFSIEMFEHMKNYKDLLKKISKWMKEDSLLFVHYFCHKAFAYHFEDKNEDDWITRYFFTGGTMPSANLLLYFQDDVTVTNHWLVNGKHYAQTSEEWLKRMDQRMTFIKPIMQSTYGKDSATKWTAYWRTFFIAVAELFGYNNGEEWMVAHFLFKKK

SEQ ID NO: 53440 - protein, 355 aa, Glycine max
  peptide (1)..(355): Ceres Seq. ID no. 14304477
  misc_feature (184)..(354): Pfam Name: Cyclopropane-fatty-acyl-phospholipid synthase Pfam Description: Cyclopropane-fatty-acyl-phospholipid synthase
  misc_feature (21)..(355): Homolog of NCBI NO: 21230783 NR Description: conserved hypothetical protein
  misc_feature (16)..(354): Homolog of NCBI NO: 39997416 NR Description: cyclopropane-fatty-acyl-phospholipid synthase,
  misc_feature (21)..(355): Homolog of NCBI NO: 21242125 NR Description: conserved hypothetical protein
  misc_feature (16)..(355): Homolog of NCBI NO: 33413898 NR Description: S-adenosyl-L-methionine:coclaurine
  misc_feature (12)..(355): Homolog of NCBI NO: 16754879 NR Description: coclaurine N-methyltransferase [Coptis japonica]
  misc_feature (67)..(355): Homolog of NCBI NO: 7486450 NR Description: hypothetical protein F4I10.50 - Arabidopsis
  misc_feature (1)..(355): Homolog of NCBI NO: 30689611 NR Description: expressed protein [Arabidopsis thaliana]
  misc_feature (1)..(355): Homolog of NCBI NO: 21593795 NR Description: coclaurine N-methyltransferase [Arabidopsis
  misc_feature (1)..(355): Homolog of NCBI NO: 18418151 NR Description: expressed protein [Arabidopsis thaliana]
  misc_feature (1)..(355): Homolog of NCBI NO: 26451688 NR Description: unknown protein [Arabidopsis thaliana]
MEGTMQLAYETVVKLMLAALERNVLPDVITRRLTRLLLATRLRSAYKPSSQLQLSDLLYFAHSLQEMPIAINTDKPKSQHYELPTAFFKLVLGNNLKYSCCYFSSASMTLDDAEEAMLKLYCERSNLKDGHTVLDVGCGWGSLALYIAKNYTNCRVTGICNSTTQKAYIEEKCRDLQLQNLNIIVADISTFEMETSYDRIFSIEMFEHMKNYKDLLKKISKWMKEDSLLFVHYFCHKAFAYHFEDKNEDDWITRYFFTGGTMPSANLLLYFQDDVTVTNHWLVNGKHYAQTSEEWLKRMDQRMTFIKPIMQSTYGKDSATKWTAYWRTFFIAVAELFGYNNGEEWMVAHFLFKKK

SEQ ID NO: 53441 - protein, 351 aa, Glycine max
  peptide (1)..(351): Ceres Seq. ID no. 14304478
  misc_feature (180)..(350): Pfam Name: Cyclopropane-fatty-acyl-phospholipid synthase Pfam Description: Cyclopropane-fatty-acyl-phospholipid synthase
  misc_feature (17)..(351): Homolog of NCBI NO: 21230783 NR Description: conserved hypothetical protein
  misc_feature (12)..(350): Homolog of NCBI NO: 39997416 NR Description: cyclopropane-fatty-acyl-phospholipid synthase,
  misc_feature (17)..(351): Homolog of NCBI NO: 21242125 NR Description: conserved hypothetical protein
  misc_feature (12)..(351): Homolog of NCBI NO: 33413898 NR Description: S-adenosyl-L-methionine:coclaurine
  misc_feature (8)..(351): Homolog of NCBI NO: 16754879 NR Description: coclaurine N-methyltransferase [Coptis japonica]
  misc_feature (63)..(351): Homolog of NCBI NO: 7486450 NR Description: hypothetical protein F4I10.50 - Arabidopsis
  misc_feature (1)..(351): Homolog of NCBI NO: 30689611 NR Description: expressed protein [Arabidopsis thaliana]
  misc_feature (1)..(351): Homolog of NCBI NO: 21593795 NR Description: coclaurine N-methyltransferase [Arabidopsis
  misc_feature (1)..(351): Homolog of NCBI NO: 18418151 NR Description: expressed protein [Arabidopsis thaliana]
  misc_feature (1)..(351): Homolog of NCBI NO: 26451688 NR Description: unknown protein [Arabidopsis thaliana]
MQLAYETVVKLMLAALERNVLPDVITRRLTRLLLATRLRSAYKPSSQLQLSDLLYFAHSLQEMPIAINTDKPKSQHYELPTAFFKLVLGNNLKYSCCYFSSASMTLDDAEEAMLKLYCERSNLKDGHTVLDVGCGWGSLALYIAKNYTNCRVTGICNSTTQKAYIEEKCRDLQLQNLNIIVADISTFEMETSYDRIFSIEMFEHMKNYKDLLKKISKWMKEDSLLFVHYFCHKAFAYHFEDKNEDDWITRYFFTGGTMPSANLLLYFQDDVTVTNHWLVNGKHYAQTSEEWLKRMDQRMTFIKPIMQSTYGKDSATKWTAYWRTFFIAVAELFGYNNGEEWMVAHFLFKKK

SEQ ID NO: 53442 - DNA, 1203 bp, Glycine max
  misc_feature (1)..(1203): Ceres Seq. ID no. 14306557
gacaatttctcttctagcaatcaaccatctttggatcaaccctccaatttgtttacaatatggaacagaccctctcctttgaatttgagcatgaatttgttcaaaacacggcaagagtgaaatctgttgatatgcatccaactgagccatggattctactgggtttgtattcaggaactatttctatttggaactatcagacaaagactgaagagaagtctttaaaaatcagcgaatctccagtgagatcagcaaagttcattgctcgggaaaactggattgttgcagctacggatgacaaaaacattcacgtctacaattatgacaaaatggaaaagatagtagaatttgcggaacataaagattatatcaggagtttagctgttcatcctgtcctgccatatgtaatatcagcttcagatgatcaggttctaaaattgtggaattggaggaaaggttggtcttgttatgagaactttgaagggcactcacattatgtgatgcaagtggcattcaaccctaaggatccatctacctttgctagtgcatcccttgatggcaccttgaagatctggagccttgattcctctgctccaaattttaccctggaaggacaccagaaaggagtgaattgtgttgattacttcataaccaacgacaaacaatatcttttaagtggttctgatgattacactgccaaggtatgggattatcattctagaaactgtgtacagacgcttgaaggacatgaaaacaatgttacagcaatatgtgctcatcctgagcttcctataataataacagcttcagaggattctactgttaaaatatgggatgctgtcacttacaggcttcaaaccacgttgaactttggtctcaagagagtatggagtattggatacaagaaaggatcatctcagcttgcatttggttgtgaccaaggatttctaattgttaagatttcagaaggaagaccccaataagccaacatctggtagccagatgactagttatgatgagcttaactgcccagagaacatcatattctgccgttggttgtttatttctgagttgttactagttactagaataaattaatttagaatctacatattaccttatgtaatatattggtgtatgtacctgtgtgttcggattaatgtgttgccatttgagtgatatatataatatattttttttatc

SEQ ID NO: 53443 - protein, 307 aa, Glycine max
  peptide (1)..(307): Ceres Seq. ID no. 14306558
  misc_feature (179)..(217): Pfam Name: WD domain, G-beta repeat Pfam Description: WD domain, G-beta repeat
  misc_feature (5)..(306): Homolog of NCBI NO: 27805865 NR Description: coatomer protein complex, subunit beta 2 (beta
  misc_feature (5)..(306): Homolog of NCBI NO: 4758032 NR Description: coatomer protein complex, subunit beta 2 (beta
  misc_feature (5)..(306): Homolog of NCBI NO: 486784 NR Description: Golgi-associated particle 102K chain - human
  misc_feature (5)..(306): Homolog of NCBI NO: 27697187 NR Description: Similar to coatomer protein complex, subunit beta
  misc_feature (12)..(306): Homolog of NCBI NO: 12324597 NR Description: putative coatomer protein complex, subunit beta 2
  misc_feature (5)..(306): Homolog of NCBI NO: 30699476 NR Description: coatomer protein complex, subunit beta 2 (beta
  misc_feature (12)..(306): Homolog of NCBI NO: 9294445 NR Description: coatomer protein complex, beta prime; beta'-COP
  misc_feature (5)..(306): Homolog of NCBI NO: 30683865 NR Description: coatomer protein complex, subunit beta 2 (beta
  misc_feature (5)..(306): Homolog of NCBI NO: 30683862 NR Description: coatomer protein complex, subunit beta 2 (beta
  misc_feature (5)..(306): Homolog of NCBI NO: 15218215 NR Description: coatomer protein complex, subunit beta 2 (beta
MEQTLSFEFEHEFVQNTARVKSVDMHPTEPWILLGLYSGTISIWNYQTKTEEKSLKISESPVRSAKFIARENWIVAATDDKNIHVYNYDKMEKIVEFAEHKDYIRSLAVHPVLPYVISASDDQVLKLWNWRKGWSCYENFEGHSHYVMQVAFNPKDPSTFASASLDGTLKIWSLDSSAPNFTLEGHQKGVNCVDYFITNDKQYLLSGSDDYTAKVWDYHSRNCVQTLEGHENNVTAICAHPELPIIITASEDSTVKIWDAVTYRLQTTLNFGLKRVWSIGYKKGSSQLAFGCDQGFLIVKISEGRPQ

SEQ ID NO: 53444 - protein, 283 aa, Glycine max
  peptide (1)..(283): Ceres Seq. ID no. 14306559
  misc_feature (155)..(193): Pfam Name: WD domain, G-beta repeat Pfam Description: WD domain, G-beta repeat
  misc_feature (1)..(282): Homolog of NCBI NO: 4758032 NR Description: coatomer protein complex, subunit beta 2 (beta
  misc_feature (1)..(282): Homolog of NCBI NO: 27805865 NR Description: coatomer protein complex, subunit beta 2 (beta
  misc_feature (1)..(282): Homolog of NCBI NO: 486784 NR Description: Golgi-associated particle 102K chain - human
  misc_feature (1)..(282): Homolog of NCBI NO: 27697187 NR Description: Similar to coatomer protein complex, subunit beta
  misc_feature (1)..(282): Homolog of NCBI NO: 12324597 NR Description: putative coatomer protein complex, subunit beta 2
  misc_feature (1)..(282): Homolog of NCBI NO: 30699476 NR Description: coatomer protein complex, subunit beta 2 (beta
  misc_feature (1)..(282): Homolog of NCBI NO: 9294445 NR Description: coatomer protein complex, beta prime; beta'-COP
  misc_feature (1)..(282): Homolog of NCBI NO: 30683865 NR Description: coatomer protein complex, subunit beta 2 (beta
  misc_feature (1)..(282): Homolog of NCBI NO: 30683862 NR Description: coatomer protein complex, subunit beta 2 (beta
  misc_feature (1)..(282): Homolog of NCBI NO: 15218215 NR Description: coatomer protein complex, subunit beta 2 (beta
MHPTEPWILLGLYSGTISIWNYQTKTEEKSLKISESPVRSAKFIARENWIVAATDDKNIHVYNYDKMEKIVEFAEHKDYIRSLAVHPVLPYVISASDDQVLKLWNWRKGWSCYENFEGHSHYVMQVAFNPKDPSTFASASLDGTLKIWSLDSSAPNFTLEGHQKGVNCVDYFITNDKQYLLSGSDDYTAKVWDYHSRNCVQTLEGHENNVTAICAHPELPIIITASEDSTVKIWDAVTYRLQTTLNFGLKRVWSIGYKKGSSQLAFGCDQGFLIVKISEGRPQ

SEQ ID NO: 53445 - protein, 217 aa, Glycine max
  peptide (1)..(217): Ceres Seq. ID no. 14306560
  misc_feature (89)..(127): Pfam Name: WD domain, G-beta repeat Pfam Description: WD domain, G-beta repeat
  misc_feature (1)..(216): Homolog of NCBI NO: 27805865 NR Description: coatomer protein complex, subunit beta 2 (beta
  misc_feature (1)..(216): Homolog of NCBI NO: 4758032 NR Description: coatomer protein complex, subunit beta 2 (beta
  misc_feature (1)..(216): Homolog of NCBI NO: 486784 NR Description: Golgi-associated particle 102K chain - human
  misc_feature (1)..(216): Homolog of NCBI NO: 27697187 NR Description: Similar to coatomer protein complex, subunit beta
  misc_feature (1)..(216): Homolog of NCBI NO: 12324597 NR Description: putative coatomer protein complex, subunit beta 2
  misc_feature (1)..(216): Homolog of NCBI NO: 30699476 NR Description: coatomer protein complex, subunit beta 2 (beta
  misc_feature (1)..(216): Homolog of NCBI NO: 9294445 NR Description: coatomer protein complex, beta prime; beta'-COP
  misc_feature (1)..(216): Homolog of NCBI NO: 30683865 NR Description: coatomer protein complex, subunit beta 2 (beta
  misc_feature (1)..(216): Homolog of NCBI NO: 30683862 NR Description: coatomer protein complex, subunit beta 2 (beta
  misc_feature (1)..(216): Homolog of NCBI NO: 15218215 NR Description: coatomer protein complex, subunit beta 2 (beta
MEKIVEFAEHKDYIRSLAVHPVLPYVISASDDQVLKLWNWRKGWSCYENFEGHSHYVMQVAFNPKDPSTFASASLDGTLKIWSLDSSAPNFTLEGHQKGVNCVDYFITNDKQYLLSGSDDYTAKVWDYHSRNCVQTLEGHENNVTAICAHPELPIIITASEDSTVKIWDAVTYRLQTTLNFGLKRVWSIGYKKGSSQLAFGCDQGFLIVKISEGRPQ

SEQ ID NO: 53446 - DNA, 1142 bp, Glycine max
  misc_feature (1)..(1142): Ceres Seq. ID no. 14304090
gttctctctgtagcacggaacagaggatcgaaaataatcagccgcatcacacaccgtttccaccacgatccaattatggaggttgagattgatggctctgttactgtcgaaacagtaggaaatactgctatgggtgaggtcagtagcatagctgatgacaacagagaaggtggaagttctgttgaaccaaatgacaaacaagatcaacatgataacatgactcaagattcctctggagggatcactatcccaactgcaattcccacagtatcagttgtttcagttgaagagccctatgtgggtcaggagtttgggtcagaagcagcagcacatgcattttataatgcttatgctacagatgttggattcattgtacgtgtgagtaaactctcgcggtcaaggcgtgatggaactgctattggacgcactcttgtttgcaacaaagagggtttcagaatggctgacaaacgtgaaaagattgtgaggcaaagggctgagaccagggttggttgcagggcaatgattatggtgaggaaacttagttctggcaaatgggttattgcaaagtttgtaaaggaacacacacatccgttgactcctggcaaaggtagaagggatttctactatgaacaatatccgactgaacaagataaaattcgggaactatctcagcagttggcaactgagaaaaagcgatctgcggcctataaaaggcatcttgaattgatatttgagcaaattgaagagcagaacgagaacctttcaaagaaaatacagcacatagtagacagtgtgaaggagatggaagccaaagaagaacatagtagacagtgggaaggagatggaagccaaagaagaacatattagacagtgtgaaggagatggaaaccaaagaacaacagtgtagactctgatagattcaactttgaacgcgatacttttagttggtagaagaaactagttcagtcaaatgtagaggtcctttgagtccactattgtcaagttgtgccaacaatgtaataactcataacagacattcaaacgccctgatagagtttcattcttccatcatttttctagtatttcctttgtgtatagaatgagactgctgttgagaatgctgtggctgaatattctccatc

SEQ ID NO: 53447 - protein, 288 aa, Glycine max
  peptide (1)..(288): Ceres Seq. ID no. 14304091
  misc_feature (113)..(272): Pfam Name: FAR1 family Pfam Description: FAR1 family
  misc_feature (89)..(196): Homolog of NCBI NO: 28301931 NR Description: putative transposase [Oryza sativa (japonica
  misc_feature (113)..(272): Homolog of NCBI NO: 25370598 NR Description: hypothetical protein At2g43280 [imported] -
  misc_feature (93)..(271): Homolog of NCBI NO: 15235502 NR Description: hypothetical protein [Arabidopsis thaliana]
  misc_feature (97)..(272): Homolog of NCBI NO: 30689328 NR Description: expressed protein [Arabidopsis thaliana]
  misc_feature (198)..(267): Homolog of NCBI NO: 15233732 NR Description: expressed protein [Arabidopsis thaliana]
  misc_feature (97)..(200): Homolog of NCBI NO: 15233732 NR Description: expressed protein [Arabidopsis thaliana]
  misc_feature (60)..(270): Homolog of NCBI NO: 6041845 NR Description: hypothetical protein [Arabidopsis thaliana]
  misc_feature (97)..(270): Homolog of NCBI NO: 30680320 NR Description: expressed protein [Arabidopsis thaliana]
  misc_feature (46)..(272): Homolog of NCBI NO: 18411179 NR Description: expressed protein [Arabidopsis thaliana]
  misc_feature (46)..(281): Homolog of NCBI NO: 11358055 NR Description: hypothetical protein T16L24.20 - Arabidopsis
VLSVARNRGSKIISRITHRFHHDPIMEVEIDGSVTVETVGNTAMGEVSSIADDNREGGSSVEPNDKQDQHDNMTQDSSGGITIPTAIPTVSVVSVEEPYVGQEFGSEAAAHAFYNAYATDVGFIVRVSKLSRSRRDGTAIGRTLVCNKEGFRMADKREKIVRQRAETRVGCRAMIMVRKLSSGKWVIAKFVKEHTHPLTPGKGRRDFYYEQYPTEQDKIRELSQQLATEKKRSAAYKRHLELIFEQIEEQNENLSKKIQHIVDSVKEMEAKEEHSRQWEGDGSQRRTY

SEQ ID NO: 53448 - protein, 263 aa, Glycine max
  peptide (1)..(263): Ceres Seq. ID no. 14304092
  misc_feature (88)..(247): Pfam Name: FAR1 family Pfam Description: FAR1 family
  misc_feature (64)..(171): Homolog of NCBI NO: 28301931 NR Description: putative transposase [Oryza sativa (japonica
  misc_feature (88)..(247): Homolog of NCBI NO: 25370598 NR Description: hypothetical protein At2g43280 [imported] -
  misc_feature (68)..(246): Homolog of NCBI NO: 15235502 NR Description: hypothetical protein [Arabidopsis thaliana]
  misc_feature (72)..(247): Homolog of NCBI NO: 30689328 NR Description: expressed protein [Arabidopsis thaliana]
  misc_feature (173)..(242): Homolog of NCBI NO: 15233732 NR Description: expressed protein [Arabidopsis thaliana]
  misc_feature (72)..(175): Homolog of NCBI NO: 15233732 NR Description: expressed protein [Arabidopsis thaliana]
  misc_feature (35)..(245): Homolog of NCBI NO: 6041845 NR Description: hypothetical protein [Arabidopsis thaliana]
  misc_feature (72)..(245): Homolog of NCBI NO: 30680320 NR Description: expressed protein [Arabidopsis thaliana]
  misc_feature (21)..(247): Homolog of NCBI NO: 18411179 NR Description: expressed protein [Arabidopsis thaliana]
  misc_feature (21)..(256): Homolog of NCBI NO: 11358055 NR Description: hypothetical protein T16L24.20 - Arabidopsis
MEVEIDGSVTVETVGNTAMGEVSSIADDNREGGSSVEPNDKQDQHDNMTQDSSGGITIPTAIPTVSVVSVEEPYVGQEFGSEAAAHAFYNAYATDVGFIVRVSKLSRSRRDGTAIGRTLVCNKEGFRMADKREKIVRQRAETRVGCRAMIMVRKLSSGKWVIAKFVKEHTHPLTPGKGRRDFYYEQYPTEQDKIRELSQQLATEKKRSAAYKRHLELIFEQIEEQNENLSKKIQHIVDSVKEMEAKEEHSRQWEGDGSQRRTY

SEQ ID NO: 53449 - protein, 245 aa, Glycine max
  peptide (1)..(245): Ceres Seq. ID no. 14304093
  misc_feature (70)..(229): Pfam Name: FAR1 family Pfam Description: FAR1 family
  misc_feature (46)..(153): Homolog of NCBI NO: 28301931 NR Description: putative transposase [Oryza sativa (japonica
  misc_feature (70)..(229): Homolog of NCBI NO: 25370598 NR Description: hypothetical protein At2g43280 [imported] -
  misc_feature (50)..(228): Homolog of NCBI NO: 15235502 NR Description: hypothetical protein [Arabidopsis thaliana]
  misc_feature (54)..(229): Homolog of NCBI NO: 30689328 NR Description: expressed protein [Arabidopsis thaliana]
  misc_feature (155)..(224): Homolog of NCBI NO: 15233732 NR Description: expressed protein [Arabidopsis thaliana]
  misc_feature (54)..(157): Homolog of NCBI NO: 15233732 NR Description: expressed protein [Arabidopsis thaliana]
  misc_feature (17)..(227): Homolog of NCBI NO: 6041845 NR Description: hypothetical protein [Arabidopsis thaliana]
  misc_feature (54)..(227): Homolog of NCBI NO: 30680320 NR Description: expressed protein [Arabidopsis thaliana]
  misc_feature (3)..(229): Homolog of NCBI NO: 18411179 NR Description: expressed protein [Arabidopsis thaliana]
  misc_feature (3)..(238): Homolog of NCBI NO: 11358055 NR Description: hypothetical protein T16L24.20 - Arabidopsis
MGEVSSIADDNREGGSSVEPNDKQDQHDNMTQDSSGGITIPTAIPTVSVVSVEEPYVGQEFGSEAAAHAFYNAYATDVGFIVRVSKLSRSRRDGTAIGRTLVCNKEGFRMADKREKIVRQRAETRVGCRAMIMVRKLSSGKWVIAKFVKEHTHPLTPGKGRRDFYYEQYPTEQDKIRELSQQLATEKKRSAAYKRHLELIFEQIEEQNENLSKKIQHIVDSVKEMEAKEEHSRQWEGDGSQRRTY

SEQ ID NO: 53450 - DNA, 952 bp, Glycine max
  misc_feature (1)..(952): Ceres Seq. ID no. 14306634
aaacagtgcaaattaacaatcgttgttacaactttgcaacacaaacgtatttggaatttggggctaggttcatatatcggttgctacttaattcattatctatggccagtgaggcagcaggtattacaagacgggatggaacaagaacaacctcagcagcagcagcagcagcagcggtggttgaagagatcgtacctaattcgggatggacagacgaccattcgagccattttcttcttgtggatcttcctgaatttaggaaggaggaggtgacccttcaagttgatggctccgatggccgtataattgtgaaaggcgaaaggcaaacaaatgaacagaaacgtattcactttgagctggcctttccattgccaccagattcagatgtggataatatatccggaaactttgacagtgaaatccttcacgtgcatgtccccaagcgagcttcacatcaagaacacagagaaagtggtcatgagatagagagagcttcaaataatggcagtgttggaaggccacaagaaattgtaagtgaggaacacgaagttgttaatgaggggagggatcatggtcatttatcaacacgaggaagatagagataagaaggaagaaagaagaaatgaaaatgcacagtacatggataatggttattctaaaaaattaacaaggaagttggagcaaaaacgcgacatgtcaagagctctagtggaggttttgatgagaaacaagggagttgttacaactgctgttgtggccttttcgtttgggttgtatgtatctaataagttccattcatggaatgaaccataagtggagtcccttcatgacatgcatccatgaataacatgcataccatactgcttttatttctcatgcttgagtatatagatacaatcaataatgtatgtaccatgctgatgttataagcaatgcaataacatgtcgacgc

SEQ ID NO: 53451 - protein, 198 aa, Glycine max
  peptide (1)..(198): Ceres Seq. ID no. 14306635
  misc_feature (51)..(161): Homolog of NCBI NO: 15209175 NR Description: hypothetical protein [Solanum demissum]
  misc_feature (59)..(147): Homolog of NCBI NO: 21592618 NR Description: unknown [Arabidopsis thaliana]
  misc_feature (54)..(147): Homolog of NCBI NO: 18401331 NR Description: expressed protein [Arabidopsis thaliana]
  misc_feature (51)..(161): Homolog of NCBI NO: 15209179 NR Description: hypothetical protein [Solanum demissum]
  misc_feature (46)..(148): Homolog of NCBI NO: 34912180 NR Description: P0700A11.16 [Oryza sativa (japonica
TVQINNRCYNFATQTYLEFGARFIYRLLLNSLSMASEAAGITRRDGTRTTSAAAAAAAVVEEIVPNSGWTDDHSSHFLLVDLPEFRKEEVTLQVDGSDGRIIVKGERQTNEQKRIHFELAFPLPPDSDVDNISGNFDSEILHVHVPKRASHQEHRESGHEIERASNNGSVGRPQEIVSEEHEVVNEGRDHGHLSTRGR

SEQ ID NO: 53452 - protein, 165 aa, Glycine max
  peptide (1)..(165): Ceres Seq. ID no. 14306636
  misc_feature (18)..(128): Homolog of NCBI NO: 15209175 NR Description: hypothetical protein [Solanum demissum]
  misc_feature (26)..(114): Homolog of NCBI NO: 21592618 NR Description: unknown [Arabidopsis thaliana]
  misc_feature (21)..(114): Homolog of NCBI NO: 18401331 NR Description: expressed protein [Arabidopsis thaliana]
  misc_feature (18)..(128): Homolog of NCBI NO: 15209179 NR Description: hypothetical protein [Solanum demissum]
  misc_feature (13)..(115): Homolog of NCBI NO: 34912180 NR Description: P0700A11.16 [Oryza sativa (japonica
MASEAAGITRRDGTRTTSAAAAAAAVVEEIVPNSGWTDDHSSHFLLVDLPEFRKEEVTLQVDGSDGRIIVKGERQTNEQKRIHFELAFPLPPDSDVDNISGNFDSEILHVHVPKRASHQEHRESGHEIERASNNGSVGRPQEIVSEEHEVVNEGRDHGHLSTRGR

SEQ ID NO: 53453 - DNA, 1281 bp, Glycine max
  misc_feature (1)..(1281): Ceres Seq. ID no. 14304170
ataataatcacttggaaacaaccgcgctaaggttggaacttggaggaacttgtgtctgtgtgtccttttttccagagtcatggctatggctttgagtctctcccaattccctgttcgtgggtctgtttctttgcccaaaagaagactacccagaagaagcttttgcattaggggcatgtcagaaacctcttccacttcttctgtgagcacccaacaagaacaaccaacttctgataatgcttcttcagtgacaattgctcctccccctaacttcaagccccctgagcctaaacgctttgcaattaggcctgataagaccagtgaagtgtttggagctttgcttcctttgatctttcgttttgccactggagttttcgtttctgggtattctttttcaattgtttctaaggatgaaattcctacagacgaatatgctttggaacttaatggcgttaccataaaagaaacagcaaaattaggccctcgcccagagaagcctattgaaatatatgaatttgagagctgtccattttgccgaaaggttagagaaattgttgccattttggatcttgatgttcttttctatccttgtccaagaaatggcccaaatttccgtcaaaaggttctagagatgggtggcaaactgcagttcccctacatggttgacccaaacacaggcgcttcaatgtatgaatcagatgacataattcggtatttggttgacaaatatggcgatggaaacgttcctttatctttatcacttggatttttaacgacactaacggctggtcttggtatgcttagtcgtatttcaaaggggactacttatactccagcgaagttccctccaaagcctcttaaattatgggcatatgaggggtctcctttctgcaaacttgtacgtgaagtacttgtggaattggagctgccacacttgcttgtcagttgtgctaggggtagcccaaagagacatatactttatcagaaaactggaactttccaggcaccttttttggaagatccaaacactgggatagaaatgtttgaaagtgcagaaatcatagagtatctaagagcaacatacgctctttagtaagtgatgctatgatagggagaggcttgtaagggtttttaagtctcatgatatgcaccttcatttccttttgtaaatgtaattgctaatggttctaagttctaacgggtaaatcaaattttctctatatagaaatttcaaatagtggaatcaagtgcctcaatatttagcaatggtttgaggtggtt

SEQ ID NO: 53454 - protein, 337 aa, Glycine max
  peptide (1)..(337): Ceres Seq. ID no. 14304171
  misc_feature (141)..(213): Pfam Name: Glutathione S-transferase, N-terminal domain Pfam Description: Glutathione S-transferase, N-terminal domain
  misc_feature (131)..(253): Homolog of NCBI NO: 15488040 NR Description: unknown [Photobacterium profundum]
  misc_feature (137)..(336): Homolog of NCBI NO: 7487730 NR Description: hypothetical protein T5L19.130 - Arabidopsis
  misc_feature (137)..(336): Homolog of NCBI NO: 21593568 NR Description: unknown [Arabidopsis thaliana]
  misc_feature (137)..(336): Homolog of NCBI NO: 18413285 NR Description: expressed protein [Arabidopsis thaliana]
  misc_feature (7)..(336): Homolog of NCBI NO: 11282317 NR Description: hypothetical protein F8F6.90 - Arabidopsis
  misc_feature (7)..(336): Homolog of NCBI NO: 21593275 NR Description: unknown [Arabidopsis thaliana]
  misc_feature (7)..(336): Homolog of NCBI NO: 18414386 NR Description: auxin-regulated protein [Arabidopsis thaliana]
MAMALSLSQFPVRGSVSLPKRRLPRRSFCIRGMSETSSTSSVSTQQEQPTSDNASSVTIAPPPNFKPPEPKRFAIRPDKTSEVFGALLPLIFRFATGVFVSGYSFSIVSKDEIPTDEYALELNGVTIKETAKLGPRPEKPIEIYEFESCPFCRKVREIVAILDLDVLFYPCPRNGPNFRQKVLEMGGKLQFPYMVDPNTGASMYESDDIIRYLVDKYGDGNVPLSLSLGFLTTLTAGLGMLSRISKGTTYTPAKFPPKPLKLWAYEGSPFCKLVREVLVELELPHLLVSCARGSPKRHILYQKTGTFQAPFLEDPNTGIEMFESAEIIEYLRATYAL

SEQ ID NO: 53455 - protein, 335 aa, Glycine max
  peptide (1)..(335): Ceres Seq. ID no. 14304172
  misc_feature (139)..(211): Pfam Name: Glutathione S-transferase, N-terminal domain Pfam Description: Glutathione S-transferase, N-terminal domain
  misc_feature (129)..(251): Homolog of NCBI NO: 15488040 NR Description: unknown [Photobacterium profundum]
  misc_feature (135)..(334): Homolog of NCBI NO: 7487730 NR Description: hypothetical protein T5L19.130 - Arabidopsis
  misc_feature (135)..(334): Homolog of NCBI NO: 21593568 NR Description: unknown [Arabidopsis thaliana]
  misc_feature (135)..(334): Homolog of NCBI NO: 18413285 NR Description: expressed protein [Arabidopsis thaliana]
  misc_feature (5)..(334): Homolog of NCBI NO: 11282317 NR Description: hypothetical protein F8F6.90 - Arabidopsis
  misc_feature (5)..(334): Homolog of NCBI NO: 21593275 NR Description: unknown [Arabidopsis thaliana]
  misc_feature (5)..(334): Homolog of NCBI NO: 18414386 NR Description: auxin-regulated protein [Arabidopsis thaliana]
MALSLSQFPVRGSVSLPKRRLPRRSFCIRGMSETSSTSSVSTQQEQPTSDNASSVTIAPPPNFKPPEPKRFAIRPDKTSEVFGALLPLIFRFATGVFVSGYSFSIVSKDEIPTDEYALELNGVTIKETAKLGPRPEKPIEIYEFESCPFCRKVREIVAILDLDVLFYPCPRNGPNFRQKVLEMGGKLQFPYMVDPNTGASMYESDDIIRYLVDKYGDGNVPLSLSLGFLTTLTAGLGMLSRISKGTTYTPAKFPPKPLKLWAYEGSPFCKLVREVLVELELPHLLVSCARGSPKRHILYQKTGTFQAPFLEDPNTGIEMFESAEIIEYLRATYAL

SEQ ID NO: 53456 - protein, 305 aa, Glycine max
  peptide (1)..(305): Ceres Seq. ID no. 14304173
  misc_feature (109)..(181): Pfam Name: Glutathione S-transferase, N-terminal domain Pfam Description: Glutathione S-transferase, N-terminal domain
  misc_feature (99)..(221): Homolog of NCBI NO: 15488040 NR Description: unknown [Photobacterium profundum]
  misc_feature (105)..(304): Homolog of NCBI NO: 7487730 NR Description: hypothetical protein T5L19.130 - Arabidopsis
  misc_feature (105)..(304): Homolog of NCBI NO: 21593568 NR Description: unknown [Arabidopsis thaliana]
  misc_feature (105)..(304): Homolog of NCBI NO: 18413285 NR Description: expressed protein [Arabidopsis thaliana]
  misc_feature (1)..(304): Homolog of NCBI NO: 11282317 NR Description: hypothetical protein F8F6.90 - Arabidopsis
  misc_feature (1)..(304): Homolog of NCBI NO: 21593275 NR Description: unknown [Arabidopsis thaliana]
  misc_feature (1)..(304): Homolog of NCBI NO: 18414386 NR Description: auxin-regulated protein [Arabidopsis thaliana]
MSETSSTSSVSTQQEQPTSDNASSVTIAPPPNFKPPEPKRFAIRPDKTSEVFGALLPLIFRFATGVFVSGYSFSIVSKDEIPTDEYALELNGVTIKETAKLGPRPEKPIEIYEFESCPFCRKVREIVAILDLDVLFYPCPRNGPNFRQKVLEMGGKLQFPYMVDPNTGASMYESDDIIRYLVDKYGDGNVPLSLSLGFLTTLTAGLGMLSRISKGTTYTPAKFPPKPLKLWAYEGSPFCKLVREVLVELELPHLLVSCARGSPKRHILYQKTGTFQAPFLEDPNTGIEMFESAEIIEYLRATYAL

SEQ ID NO: 53457 - DNA, 1395 bp, Glycine max
  misc_feature (1)..(1395): Ceres Seq. ID no. 15170403
aagtttgaagcggcgccaccatagttggtgtagctagcgagggagggatatagggggaagcgtttattcattcattaagatggcatcggagcttcaattgcccccaggcttcagattccatccaacggaccaggagctggtgttgcactatctctgccgtaaatgcgcatcgcagcctatcgccgttcccatcatcgccgaaatcgacctctacaaatacgacccctgggacctacccggattggcttcctacggagagaaagagtggtacttcttttcaccacgggaccggaaatacccgaacggttccaggccgaaccgggcggcgggaaccggttactggaaggcaaccggggcggataagcccattggccaccccaaaccggttgggataaaaaaagctttggtgttttacgcagggaaagctccgaaaggggacaagagcaattggatcatgcacgagtatcgtctcgccgatgtagatcgctccgttcgcaaaaagaacagcctaaggttagatgattgggtgctttgccgtatttacaacaagaagggcacgatcgagaagttccaaccaagcagcgatgttgttgttagccgaaaaatggaatcatcggagatcgaagacaggaagccggagattctgaaaagcggaggaggttgtcttctgccgccggttccgccgccgcaagcgaaggcggcggtgaagaaggattacatgtacttcgacccgtcggattcaatcccgaagctgcacacggactcgagctgttcggagcacgtggtatcgccggaattcgcgagcgaggtgcagagcgagccaaagtggaaggagtgggagaaaagcctcgagtttccgtttaattacgtggatgccactctgaacaacagcaacagcttcacgacgcaattccagggcaataatcagatgatgtcgccgctgcaggacatgttcatgtactggcccaacaagcccttctgaacaaaccgatccacgccgcccattcgcatttgcacggtagcacgagactcaaggtctatgagtgtgcctgtgcgaccacacacagacgattatttatcaagttagcttagctagggcaaagaaagataaaaacattgaagctggaaacgcatgtgtttgttgggtccaccgtctgcaccggttctttttggtgttttgctatgtgacgacgacgacgacgatgacgatccaacggtgcatgtttgttgacctgtccctagtagtagtagcatgtgtacagctattgtatgtagaatgtagataggtacactactacacgttgttgtcatgtgatcatagaagctctcttaccgggaaaaataaaaattgatagaaggatggaaggtgtatttggaccttccctaattaatatt

SEQ ID NO: 53458 - protein, 300 aa, Glycine max
  peptide (1)..(300): Ceres Seq. ID no. 15170404
  misc_feature (7)..(132): Pfam Name: No apical meristem (NAM) protein Pfam Description: No apical meristem (NAM) protein
  misc_feature (1)..(163): Homolog of NCBI NO: 15223963 NR Description: No apical meristem (NAM) protein family
  misc_feature (1)..(237): Homolog of NCBI NO: 31322580 NR Description: NAC-domain protein 14 [Brassica napus]
  misc_feature (4)..(300): Homolog of NCBI NO: 14485513 NR Description: putative NAC domain protein [Solanum tuberosum]
  misc_feature (4)..(300): Homolog of NCBI NO: 40647397 NR Description: NAC domain protein [Lycopersicon esculentum]
  misc_feature (4)..(300): Homolog of NCBI NO: 21105734 NR Description: nam-like protein 3 [Petunia x hybrida]
  misc_feature (4)..(300): Homolog of NCBI NO: 25458553 NR Description: OsNAC6 protein [imported] - rice
  misc_feature (3)..(300): Homolog of NCBI NO: 31322576 NR Description: NAC-domain protein 5-11 [Brassica napus]
  misc_feature (1)..(300): Homolog of NCBI NO: 15223456 NR Description: No apical meristem (NAM) protein family
  misc_feature (3)..(300): Homolog of NCBI NO: 31322578 NR Description: NAC-domain protein 18 [Brassica napus]
  misc_feature (3)..(300): Homolog of NCBI NO: 21105748 NR Description: nam-like protein 10 [Petunia x hybrida]
MASELQLPPGFRFHPTDQELVLHYLCRKCASQPIAVPIIAEIDLYKYDPWDLPGLASYGEKEWYFFSPRDRKYPNGSRPNRAAGTGYWKATGADKPIGHPKPVGIKKALVFYAGKAPKGDKSNWIMHEYRLADVDRSVRKKNSLRLDDWVLCRIYNKKGTIEKFQPSSDVVVSRKMESSEIEDRKPEILKSGGGCLLPPVPPPQAKAAVKKDYMYFDPSDSIPKLHTDSSCSEHVVSPEFASEVQSEPKWKEWEKSLEFPFNYVDATLNNSNSFTTQFQGNNQMMSPLQDMFMYWPNKPF

SEQ ID NO: 53459 - protein, 175 aa, Glycine max
  peptide (1)..(175): Ceres Seq. ID no. 15170405
  misc_feature (1)..(38): Homolog of NCBI NO: 15223963 NR Description: No apical meristem (NAM) protein family
  misc_feature (1)..(112): Homolog of NCBI NO: 31322580 NR Description: NAC-domain protein 14 [Brassica napus]
  misc_feature (1)..(175): Homolog of NCBI NO: 14485513 NR Description: putative NAC domain protein [Solanum tuberosum]
  misc_feature (1)..(175): Homolog of NCBI NO: 40647397 NR Description: NAC domain protein [Lycopersicon esculentum]
  misc_feature (1)..(175): Homolog of NCBI NO: 21105734 NR Description: nam-like protein 3 [Petunia x hybrida]
  misc_feature (1)..(175): Homolog of NCBI NO: 25458553 NR Description: OsNAC6 protein [imported] - rice
  misc_feature (1)..(175): Homolog of NCBI NO: 31322576 NR Description: NAC-domain protein 5-11 [Brassica napus]
  misc_feature (1)..(175): Homolog of NCBI NO: 15223456 NR Description: No apical meristem (NAM) protein family
  misc_feature (1)..(175): Homolog of NCBI NO: 31322578 NR Description: NAC-domain protein 18 [Brassica napus]
  misc_feature (1)..(175): Homolog of NCBI NO: 21105748 NR Description: nam-like protein 10 [Petunia x hybrida]
MHEYRLADVDRSVRKKNSLRLDDWVLCRIYNKKGTIEKFQPSSDVVVSRKMESSEIEDRKPEILKSGGGCLLPPVPPPQAKAAVKKDYMYFDPSDSIPKLHTDSSCSEHVVSPEFASEVQSEPKWKEWEKSLEFPFNYVDATLNNSNSFTTQFQGNNQMMSPLQDMFMYWPNKPF

SEQ ID NO: 53460 - DNA, 1216 bp, Glycine max
  misc_feature (1)..(1216): Ceres Seq. ID no. 15174595
ttctccctcttgcttctttcaacaacttagcattgtattgtcttcaaactttgcttcttccatactttcttctttttccttagccatcattgattgttgcctttcttggctttaaaatggagttcgaggaccgcttcagacaccaggctcagagaccaaaatatgactgccttctttttgatttagatgacactttgtatcccctcaaatctggtcttgcaaaatcatgtctccaaaatattaaagactacatggttgagaagcttggcatacaccctagcaaaattgatgacttgtccaacctcctttacaagaattatggaacaactatggctggtctaagggcaattggatatgactttgactatgatgaatatcacagttttgttcatggaagattaccttatgagaacctaaaaccagaccaagttctgaggaacctgttgctgagcctaccctatagaaaacttatcttcacaaacgcagacaaagttcacgcggcgaaggcgcttaacaggcttggattagaagactgctttgaaggaatcatatgctttgagacccttaatcccatccacaagagcattgtttctgatgatgaagatgacattgagtttgtaggttcaagaaccaccaatccaaccaccacttgtaatggttcaggcacctctcaaatctttgacatcatagggcattttgctcagctcaatcccagtgcagtcttgccaaagacaccaattgtttgcaagccatcagaaaatgccattgaactggccctcaatatagccaatcttaacccacagagaactttgttcttcgaggacagtacccgcaacatacaagctggaaaacgtgtggggcttcacactgtgctggttggtacatcacaaagatgtaaaggtgcagattatgctttggaaagcattcacaaccttagggaggctgtgcctgaactatgggaggctgatataaaatcagaagctgcataccctggaaagctagctgtggagacatcagtcacagcttgagattattattatgtgcatgaaattaattaagccccttcaatattgttcatttaatcaaaattgaaaacccgaccaccaacaaaaaaaaaagagagagagagaagaagcccacgggaattcccccaacttcagatgatgtagttgtagttgatgtagatgctttgtaagttgcaataaattagtcattc

SEQ ID NO: 53461 - protein, 303 aa, Glycine max
  peptide (1)..(303): Ceres Seq. ID no. 15174596
  misc_feature (16)..(169): Pfam Name: haloacid dehalogenase-like hydrolase Pfam Description: haloacid dehalogenase-like hydrolase
  misc_feature (1)..(203): Homolog of NCBI NO: 30697236 NR Description: haloacid dehalogenase-like hydrolase family
  misc_feature (1)..(203): Homolog of NCBI NO: 21618155 NR Description: putative ripening-related protein-like
  misc_feature (1)..(203): Homolog of NCBI NO: 30697234 NR Description: haloacid dehalogenase-like hydrolase family
  misc_feature (208)..(281): Homolog of NCBI NO: 19033569 NR Description: putative sugar-starvation induced protein
  misc_feature (11)..(152): Homolog of NCBI NO: 19033569 NR Description: putative sugar-starvation induced protein
  misc_feature (1)..(169): Homolog of NCBI NO: 21593165 NR Description: unknown [Arabidopsis thaliana]
  misc_feature (1)..(169): Homolog of NCBI NO: 15241720 NR Description: haloacid dehalogenase-like hydrolase family
  misc_feature (200)..(303): Homolog of NCBI NO: 34913328 NR Description: contains ESTs
  misc_feature (15)..(166): Homolog of NCBI NO: 34913328 NR Description: contains ESTs
  misc_feature (1)..(303): Homolog of NCBI NO: 7406669 NR Description: putative ripening-related protein [Vitis vinifera]
MEFEDRFRHQAQRPKYDCLLFDLDDTLYPLKSGLAKSCLQNIKDYMVEKLGIHPSKIDDLSNLLYKNYGTTMAGLRAIGYDFDYDEYHSFVHGRLPYENLKPDQVLRNLLLSLPYRKLIFTNADKVHAAKALNRLGLEDCFEGIICFETLNPIHKSIVSDDEDDIEFVGSRTTNPTTTCNGSGTSQIFDIIGHFAQLNPSAVLPKTPIVCKPSENAIELALNIANLNPQRTLFFEDSTRNIQAGKRVGLHTVLVGTSQRCKGADYALESIHNLREAVPELWEADIKSEAAYPGKLAVETSVTA

SEQ ID NO: 53462 - protein, 258 aa, Glycine max
  peptide (1)..(258): Ceres Seq. ID no. 15174597
  misc_feature (1)..(124): Pfam Name: haloacid dehalogenase-like hydrolase Pfam Description: haloacid dehalogenase-like hydrolase
  misc_feature (1)..(158): Homolog of NCBI NO: 30697236 NR Description: haloacid dehalogenase-like hydrolase family
  misc_feature (1)..(158): Homolog of NCBI NO: 21618155 NR Description: putative ripening-related protein-like
  misc_feature (1)..(158): Homolog of NCBI NO: 30697234 NR Description: haloacid dehalogenase-like hydrolase family
  misc_feature (163)..(236): Homolog of NCBI NO: 19033569 NR Description: putative sugar-starvation induced protein
  misc_feature (1)..(107): Homolog of NCBI NO: 19033569 NR Description: putative sugar-starvation induced protein
  misc_feature (1)..(124): Homolog of NCBI NO: 21593165 NR Description: unknown [Arabidopsis thaliana]
  misc_feature (1)..(124): Homolog of NCBI NO: 15241720 NR Description: haloacid dehalogenase-like hydrolase family
  misc_feature (155)..(258): Homolog of NCBI NO: 34913328 NR Description: contains ESTs
  misc_feature (1)..(121): Homolog of NCBI NO: 34913328 NR Description: contains ESTs
  misc_feature (1)..(258): Homolog of NCBI NO: 7406669 NR Description: putative ripening-related protein [Vitis vinifera]
MVEKLGIHPSKIDDLSNLLYKNYGTTMAGLRAIGYDFDYDEYHSFVHGRLPYENLKPDQVLRNLLLSLPYRKLIFTNADKVHAAKALNRLGLEDCFEGIICFETLNPIHKSIVSDDEDDIEFVGSRTTNPTTTCNGSGTSQIFDIIGHFAQLNPSAVLPKTPIVCKPSENAIELALNIANLNPQRTLFFEDSTRNIQAGKRVGLHTVLVGTSQRCKGADYALESIHNLREAVPELWEADIKSEAAYPGKLAVETSVTA

SEQ ID NO: 53463 - protein, 232 aa, Glycine max
  peptide (1)..(232): Ceres Seq. ID no. 15174598
  misc_feature (1)..(98): Pfam Name: haloacid dehalogenase-like hydrolase Pfam Description: haloacid dehalogenase-like hydrolase
  misc_feature (1)..(132): Homolog of NCBI NO: 30697236 NR Description: haloacid dehalogenase-like hydrolase family
  misc_feature (1)..(132): Homolog of NCBI NO: 21618155 NR Description: putative ripening-related protein-like
  misc_feature (1)..(132): Homolog of NCBI NO: 30697234 NR Description: haloacid dehalogenase-like hydrolase family
  misc_feature (137)..(210): Homolog of NCBI NO: 19033569 NR Description: putative sugar-starvation induced protein
  misc_feature (1)..(81): Homolog of NCBI NO: 19033569 NR Description: putative sugar-starvation induced protein
  misc_feature (1)..(98): Homolog of NCBI NO: 21593165 NR Description: unknown [Arabidopsis thaliana]
  misc_feature (1)..(98): Homolog of NCBI NO: 15241720 NR Description: haloacid dehalogenase-like hydrolase family
  misc_feature (129)..(232): Homolog of NCBI NO: 34913328 NR Description: contains ESTs
  misc_feature (1)..(95): Homolog of NCBI NO: 34913328 NR Description: contains ESTs
  misc_feature (1)..(232): Homolog of NCBI NO: 7406669 NR Description: putative ripening-related protein [Vitis vinifera]
MAGLRAIGYDFDYDEYHSFVHGRLPYENLKPDQVLRNLLLSLPYRKLIFTNADKVHAAKALNRLGLEDCFEGIICFETLNPIHKSIVSDDEDDIEFVGSRTTNPTTTCNGSGTSQIFDIIGHFAQLNPSAVLPKTPIVCKPSENAIELALNIANLNPQRTLFFEDSTRNIQAGKRVGLHTVLVGTSQRCKGADYALESIHNLREAVPELWEADIKSEAAYPGKLAVETSVTA

SEQ ID NO: 53464 - DNA, 1546 bp, Glycine max
  misc_feature (1)..(1546): Ceres Seq. ID no. 14303850
acaaaaacctaaactcactcagtcctacgatacgattctcttccgcctcccttcccttcaactccacggcgcagatccgaggagtttgggaaaccctaattcattcctctttgcttcttctatctctattcctctaacaccagtgatggcaggtttggctccagaaggatcgcagtttgatgctcggcaatatgattctaagatgaatgaattgctttccgccgatggacaagaatttttcacttcatatgacgaagtctatgatagttttgatgcaatgggccttcaagaaaatcttctgagaggcatatatgcttatggttttgagaggccttctgcaatccagcagaggggaattgttcctttctgcaagggtctggatgtgattcagcaggctcagtctggaactggaaagacagcaacgttctgttcaggaattttgcagcagcttgactatggattggttcagtgtcaggctttggttttggcaccaacaagggagcttgcacagcagattgagaaggttatgcgagctctaggtgattaccttggtgtcaaggttcatgcttgtgttggtgggaccagtgttcgtgaggatcagcgcattctccaagctggtgtccatactgttgttggcactcctgggcgtgtatttgacatgctacggagacagtctcttcgtccagatcacataaagatgtttgttttggatgaggctgatgaaatgctttctcgtggtttcaaggaccagatctatgacatcttccagcttctgccgggtcaaattcaggttggagtgttctctgctacaatgccacctgaggccttggagattacgaggaagttcatgaataagccagtgagaatcctggtaaagcgtgatgaattgacccttgagggtatcaaacagttttatgtgaatgttgataaggaagactggaaactagagacattatgtgacctttatgagactttggctatcacccagagtgtcatctttgtgaacacaaggcgtaaggtggactggctcactgacaagatgcgaagcaatgaccatacagtctcagccacccatggagacatggaccaaaacactcgtgacatcatcatgcgggaatttcgctctggctcttctcgagttctaattaccactgacctcttggctcgtggtatagatgtacagcaggtgtctttggttataaactatgatctgccaacccaacctgaaaattatcttcatcgcataggacgaagtgggcgttttggaagaaaaggtgttgccataaactttgtgactttggatgatgcaagaatgctgtctgatattcaaaagttctacaatgtgactgtagaggagttgccatcaaatgttgctgatctgctctgatgggttaattttcattctttgttaagtcatcagagggctattactttttgccaattattattttgtgctctttgtttttctttttcaaattttagcattagagttccaatacacctgactttatttttataatggattctataaaatttgtttatttgc

SEQ ID NO: 53465 - protein, 461 aa, Glycine max
  peptide (1)..(461): Ceres Seq. ID no. 14303851
  misc_feature (101)..(304): Pfam Name: DEAD/DEAH box helicase Pfam Description: DEAD/DEAH box helicase
  misc_feature (49)..(461): Homolog of NCBI NO: 2500516 NR Description: Eukaryotic initiation factor 4A-7 (eIF-4A-7)
  misc_feature (49)..(461): Homolog of NCBI NO: 2500521 NR Description: Eukaryotic initiation factor 4A-15 (eIF-4A-15)
  misc_feature (49)..(461): Homolog of NCBI NO: 2500520 NR Description: Eukaryotic initiation factor 4A-14 (eIF-4A-14)
  misc_feature (49)..(461): Homolog of NCBI NO: 2500517 NR Description: Eukaryotic initiation factor 4A-9 (eIF-4A-9)
  misc_feature (49)..(461): Homolog of NCBI NO: 2119934 NR Description: translation initiation factor eIF-4A.7 - common
  misc_feature (49)..(461): Homolog of NCBI NO: 2119938 NR Description: translation initiation factor eIF-4A.14 - common
  misc_feature (49)..(461): Homolog of NCBI NO: 2119932 NR Description: translation initiation factor eIF-4A.9 - common
  misc_feature (49)..(461): Homolog of NCBI NO: 1170508 NR Description: Eukaryotic initiation factor 4A-8 (eIF-4A-8)
  misc_feature (49)..(461): Homolog of NCBI NO: 2119935 NR Description: translation initiation factor eIF-4A.15 - common
  misc_feature (49)..(461): Homolog of NCBI NO: 1170511 NR Description: Eukaryotic initiation factor 4A-10 (eIF-4A-10)
QKPKLTQSYDTILFRLPSLQLHGADPRSLGNPNSFLFASSISIPLTPVMAGLAPEGSQFDARQYDSKMNELLSADGQEFFTSYDEVYDSFDAMGLQENLLRGIYAYGFERPSAIQQRGIVPFCKGLDVIQQAQSGTGKTATFCSGILQQLDYGLVQCQALVLAPTRELAQQIEKVMRALGDYLGVKVHACVGGTSVREDQRILQAGVHTVVGTPGRVFDMLRRQSLRPDHIKMFVLDEADEMLSRGFKDQIYDIFQLLPGQIQVGVFSATMPPEALEITRKFMNKPVRILVKRDELTLEGIKQFYVNVDKEDWKLETLCDLYETLAITQSVIFVNTRRKVDWLTDKMRSNDHTVSATHGDMDQNTRDIIMREFRSGSSRVLITTDLLARGIDVQQVSLVINYDLPTQPENYLHRIGRSGRFGRKGVAINFVTLDDARMLSDIQKFYNVTVEELPSNVADLL

SEQ ID NO: 53466 - protein, 413 aa, Glycine max
  peptide (1)..(413): Ceres Seq. ID no. 14303852
  misc_feature (53)..(256): Pfam Name: DEAD/DEAH box helicase Pfam Description: DEAD/DEAH box helicase
  misc_feature (1)..(413): Homolog of NCBI NO: 2500516 NR Description: Eukaryotic initiation factor 4A-7 (eIF-4A-7)
  misc_feature (1)..(413): Homolog of NCBI NO: 2500521 NR Description: Eukaryotic initiation factor 4A-15 (eIF-4A-15)
  misc_feature (1)..(413): Homolog of NCBI NO: 2500520 NR Description: Eukaryotic initiation factor 4A-14 (eIF-4A-14)
  misc_feature (1)..(413): Homolog of NCBI NO: 2500517 NR Description: Eukaryotic initiation factor 4A-9 (eIF-4A-9)
  misc_feature (1)..(413): Homolog of NCBI NO: 2119934 NR Description: translation initiation factor eIF-4A.7 - common
  misc_feature (1)..(413): Homolog of NCBI NO: 2119938 NR Description: translation initiation factor eIF-4A.14 - common
  misc_feature (1)..(413): Homolog of NCBI NO: 2119932 NR Description: translation initiation factor eIF-4A.9 - common
  misc_feature (1)..(413): Homolog of NCBI NO: 1170508 NR Description: Eukaryotic initiation factor 4A-8 (eIF-4A-8)
  misc_feature (1)..(413): Homolog of NCBI NO: 2119935 NR Description: translation initiation factor eIF-4A.15 - common
  misc_feature (1)..(413): Homolog of NCBI NO: 1170511 NR Description: Eukaryotic initiation factor 4A-10 (eIF-4A-10)
MAGLAPEGSQFDARQYDSKMNELLSADGQEFFTSYDEVYDSFDAMGLQENLLRGIYAYGFERPSAIQQRGIVPFCKGLDVIQQAQSGTGKTATFCSGILQQLDYGLVQCQALVLAPTRELAQQIEKVMRALGDYLGVKVHACVGGTSVREDQRILQAGVHTVVGTPGRVFDMLRRQSLRPDHIKMFVLDEADEMLSRGFKDQIYDIFQLLPGQIQVGVFSATMPPEALEITRKFMNKPVRILVKRDELTLEGIKQFYVNVDKEDWKLETLCDLYETLAITQSVIFVNTRRKVDWLTDKMRSNDHTVSATHGDMDQNTRDIIMREFRSGSSRVLITTDLLARGIDVQQVSLVINYDLPTQPENYLHRIGRSGRFGRKGVAINFVTLDDARMLSDIQKFYNVTVEELPSNVADLL

SEQ ID NO: 53467 - protein, 394 aa, Glycine max
  peptide (1)..(394): Ceres Seq. ID no. 14303853
  misc_feature (34)..(237): Pfam Name: DEAD/DEAH box helicase Pfam Description: DEAD/DEAH box helicase
  misc_feature (1)..(394): Homolog of NCBI NO: 2500516 NR Description: Eukaryotic initiation factor 4A-7 (eIF-4A-7)
  misc_feature (1)..(394): Homolog of NCBI NO: 2500520 NR Description: Eukaryotic initiation factor 4A-14 (eIF-4A-14)
  misc_feature (1)..(394): Homolog of NCBI NO: 2500521 NR Description: Eukaryotic initiation factor 4A-15 (eIF-4A-15)
  misc_feature (1)..(394): Homolog of NCBI NO: 2500517 NR Description: Eukaryotic initiation factor 4A-9 (eIF-4A-9)
  misc_feature (1)..(394): Homolog of NCBI NO: 2119934 NR Description: translation initiation factor eIF-4A.7 - common
  misc_feature (1)..(394): Homolog of NCBI NO: 2119938 NR Description: translation initiation factor eIF-4A.14 - common
  misc_feature (1)..(394): Homolog of NCBI NO: 2119932 NR Description: translation initiation factor eIF-4A.9 - common
  misc_feature (1)..(394): Homolog of NCBI NO: 1170508 NR Description: Eukaryotic initiation factor 4A-8 (eIF-4A-8)
  misc_feature (1)..(394): Homolog of NCBI NO: 2119935 NR Description: translation initiation factor eIF-4A.15 - common
  misc_feature (1)..(394): Homolog of NCBI NO: 1170511 NR Description: Eukaryotic initiation factor 4A-10 (eIF-4A-10)
MNELLSADGQEFFTSYDEVYDSFDAMGLQENLLRGIYAYGFERPSAIQQRGIVPFCKGLDVIQQAQSGTGKTATFCSGILQQLDYGLVQCQALVLAPTRELAQQIEKVMRALGDYLGVKVHACVGGTSVREDQRILQAGVHTVVGTPGRVFDMLRRQSLRPDHIKMFVLDEADEMLSRGFKDQIYDIFQLLPGQIQVGVFSATMPPEALEITRKFMNKPVRILVKRDELTLEGIKQFYVNVDKEDWKLETLCDLYETLAITQSVIFVNTRRKVDWLTDKMRSNDHTVSATHGDMDQNTRDIIMREFRSGSSRVLITTDLLARGIDVQQVSLVINYDLPTQPENYLHRIGRSGRFGRKGVAINFVTLDDARMLSDIQKFYNVTVEELPSNVADLL

SEQ ID NO: 53468 - DNA, 1223 bp, Glycine max
  misc_feature (1)..(1223): Ceres Seq. ID no. 15176383
tctttgcagtttgcacacatggctctgtcgtcgccacttcagaacctctctgcactgatctctgccagcggcaatgccacaacagctacagcacggcctccgagagggcggccctgggcggttcacgcggcgtcgtcggacactaccaccgccgcgcaagcgcagttgggtaggtacgaagaagggaagctggagcgacccaagtgggttggggagacccctctttcacgtctcgttcaagctctcatctccttcaagcccttgttctctgtcctcaagcttggtgctagaagggctttgataagtacagctgagaagaacaatataccttggaggaaaatggcacaagagattttagagtcagaagtgtatagggagctggagagcattcaaaaccagtctttagtgtatcctgattattatttgaatccatttcatgcatatgaagagggaaatcttacatggctggcagcagcagaagcagaggctgctacaatgtcaatggccagacgagcacttcctgatgcttcttcaatacaggaagcaaatcagatactgcgtggcaattggcttcatgcaattgaacaacaccatatgcagtattcagaatcatgtgtgatcgatgacattctagatattggatgctctgtaggtataagcacaagatatcttgcagacaagttccccacagccaaagtcaccggacttgatctgtcaccctattttctagctgtggctcagcataaggaaaagagagcaatgcctagaaaatttcctataaaatggatacatgcaaatggggaagacacaggcttgccttctaaatcgtttgatcttgtctctattgcttttgtgcttcatgaatgtcctacaagagttatagtgaatttggtaagagaggcattccgtctccttcggcccggtggcacactagctttgacagatttttcgctgaagtcaaaggtccttcaggaattgtctccggttctgtttacattggttaagagcacggaaccctttctggatgagtactacttgactgatatggatgaaacacttagggaagctggttttgtgaacataacatcaattcttacggaccccagacacgtgacaattacagcaacagtgcctcaatgaaacatcacatcttcttgagatattttatttgtcaagatgcttaaaaaggattttatttattcataatgcatggttgttcctac

SEQ ID NO: 53469 - protein, 379 aa, Glycine max
  peptide (1)..(379): Ceres Seq. ID no. 15176384
  misc_feature (210)..(363): Homolog of NCBI NO: 23125274 NR Description: hypothetical protein [Nostoc punctiforme]
  misc_feature (210)..(361): Homolog of NCBI NO: 17231019 NR Description: similar to ubiquinone/menaquinone biosynthesis
  misc_feature (73)..(377): Homolog of NCBI NO: 16332323 NR Description: unknown protein [Synechocystis sp. PCC 6803]
  misc_feature (75)..(375): Homolog of NCBI NO: 37523046 NR Description: hypothetical protein gll3477 [Gloeobacter
  misc_feature (76)..(377): Homolog of NCBI NO: 17229577 NR Description: hypothetical protein [Nostoc sp. PCC 7120]
  misc_feature (70)..(377): Homolog of NCBI NO: 23129131 NR Description: hypothetical protein [Nostoc punctiforme]
  misc_feature (76)..(377): Homolog of NCBI NO: 23039316 NR Description: hypothetical protein [Trichodesmium erythraeum
  misc_feature (63)..(378): Homolog of NCBI NO: 17230530 NR Description: hypothetical protein [Nostoc sp. PCC 7120]
  misc_feature (319)..(378): Homolog of NCBI NO: 37531718 NR Description: unknown protein [Oryza sativa (japonica
  misc_feature (21)..(285): Homolog of NCBI NO: 37531718 NR Description: unknown protein [Oryza sativa (japonica
SLQFAHMALSSPLQNLSALISASGNATTATARPPRGRPWAVHAASSDTTTAAQAQLGRYEEGKLERPKWVGETPLSRLVQALISFKPLFSVLKLGARRALISTAEKNNIPWRKMAQEILESEVYRELESIQNQSLVYPDYYLNPFHAYEEGNLTWLAAAEAEAATMSMARRALPDASSIQEANQILRGNWLHAIEQHHMQYSESCVIDDILDIGCSVGISTRYLADKFPTAKVTGLDLSPYFLAVAQHKEKRAMPRKFPIKWIHANGEDTGLPSKSFDLVSIAFVLHECPTRVIVNLVREAFRLLRPGGTLALTDFSLKSKVLQELSPVLFTLVKSTEPFLDEYYLTDMDETLREAGFVNITSILTDPRHVTITATVPQ

SEQ ID NO: 53470 - protein, 373 aa, Glycine max
  peptide (1)..(373): Ceres Seq. ID no. 15176385
  misc_feature (204)..(357): Homolog of NCBI NO: 23125274 NR Description: hypothetical protein [Nostoc punctiforme]
  misc_feature (204)..(355): Homolog of NCBI NO: 17231019 NR Description: similar to ubiquinone/menaquinone biosynthesis
  misc_feature (67)..(371): Homolog of NCBI NO: 16332323 NR Description: unknown protein [Synechocystis sp. PCC 6803]
  misc_feature (69)..(369): Homolog of NCBI NO: 37523046 NR Description: hypothetical protein gll3477 [Gloeobacter
  misc_feature (70)..(371): Homolog of NCBI NO: 17229577 NR Description: hypothetical protein [Nostoc sp. PCC 7120]
  misc_feature (64)..(371): Homolog of NCBI NO: 23129131 NR Description: hypothetical protein [Nostoc punctiforme]
  misc_feature (70)..(371): Homolog of NCBI NO: 23039316 NR Description: hypothetical protein [Trichodesmium erythraeum
  misc_feature (57)..(372): Homolog of NCBI NO: 17230530 NR Description: hypothetical protein [Nostoc sp. PCC 7120]
  misc_feature (313)..(372): Homolog of NCBI NO: 37531718 NR Description: unknown protein [Oryza sativa (japonica
  misc_feature (15)..(279): Homolog of NCBI NO: 37531718 NR Description: unknown protein [Oryza sativa (japonica
MALSSPLQNLSALISASGNATTATARPPRGRPWAVHAASSDTTTAAQAQLGRYEEGKLERPKWVGETPLSRLVQALISFKPLFSVLKLGARRALISTAEKNNIPWRKMAQEILESEVYRELESIQNQSLVYPDYYLNPFHAYEEGNLTWLAAAEAEAATMSMARRALPDASSIQEANQILRGNWLHAIEQHHMQYSESCVIDDILDIGCSVGISTRYLADKFPTAKVTGLDLSPYFLAVAQHKEKRAMPRKFPIKWIHANGEDTGLPSKSFDLVSIAFVLHECPTRVIVNLVREAFRLLRPGGTLALTDFSLKSKVLQELSPVLFTLVKSTEPFLDEYYLTDMDETLREAGFVNITSILTDPRHVTITATVPQ

SEQ ID NO: 53471 - protein, 266 aa, Glycine max
  peptide (1)..(266): Ceres Seq. ID no. 15176386
  misc_feature (97)..(250): Homolog of NCBI NO: 23125274 NR Description: hypothetical protein [Nostoc punctiforme]
  misc_feature (97)..(248): Homolog of NCBI NO: 17231019 NR Description: similar to ubiquinone/menaquinone biosynthesis
  misc_feature (1)..(264): Homolog of NCBI NO: 16332323 NR Description: unknown protein [Synechocystis sp. PCC 6803]
  misc_feature (1)..(262): Homolog of NCBI NO: 37523046 NR Description: hypothetical protein gll3477 [Gloeobacter
  misc_feature (1)..(264): Homolog of NCBI NO: 17229577 NR Description: hypothetical protein [Nostoc sp. PCC 7120]
  misc_feature (1)..(264): Homolog of NCBI NO: 23129131 NR Description: hypothetical protein [Nostoc punctiforme]
  misc_feature (1)..(264): Homolog of NCBI NO: 23039316 NR Description: hypothetical protein [Trichodesmium erythraeum
  misc_feature (1)..(265): Homolog of NCBI NO: 17230530 NR Description: hypothetical protein [Nostoc sp. PCC 7120]
  misc_feature (206)..(265): Homolog of NCBI NO: 37531718 NR Description: unknown protein [Oryza sativa (japonica
  misc_feature (1)..(172): Homolog of NCBI NO: 37531718 NR Description: unknown protein [Oryza sativa (japonica
MAQEILESEVYRELESIQNQSLVYPDYYLNPFHAYEEGNLTWLAAAEAEAATMSMARRALPDASSIQEANQILRGNWLHAIEQHHMQYSESCVIDDILDIGCSVGISTRYLADKFPTAKVTGLDLSPYFLAVAQHKEKRAMPRKFPIKWIHANGEDTGLPSKSFDLVSIAFVLHECPTRVIVNLVREAFRLLRPGGTLALTDFSLKSKVLQELSPVLFTLVKSTEPFLDEYYLTDMDETLREAGFVNITSILTDPRHVTITATVPQ

SEQ ID NO: 53472 - DNA, 987 bp, Glycine max
  misc_feature (1)..(987): Ceres Seq. ID no. 14304569
gcgaaattctcccatctgcttctcactgatctccattcccattccatggcttccactgaatcatcccctttcaagaaaattcagattcaaagggatgacactacatttgacgcatatgtggttggaaaagaggatgctcctggaattgttgtgattcaggagtggtggggtgtggattacgaaattaagaaccatgccgtgaagatttctcagcttggtagtgggtttaaagctcttattccagatttatacagaggaaaggttggtctggatgttgctgaagctcagcatttgatggatggtcttgattggcaaggtgctgtgaaggatattgctgcttcggttaactggcttaaagcaaatggctcaaagaaggctggtgtaactggattttgtatgggaggtgctctctctattgccagttctgtcttggttcaagaggttgacgcttctgtagcattctatggagttcctgcttctcaacttgctgaccctgcacaagccaaggctcctgttcaggctcattttggagagctggacaattttgttggcttttcagatgttacagcggccaaggcattggaagagaagctgaaggcatccggaattccacatgaggtacatatctatcctggcaatgcacatgcattcatgaacaggtcaactgaaggaatccagaggaggaagaacatgggaatgcctgatgaagatgaagctgcagttcagcttgcttggtctcgctttgagacatggatgacccgttatctgtctagttagataatttcctagctagctcaattccgaagtcacatgctgcatgtgtattccaccttttaagtggttatattgaacccgttttaatggccccacaaactgtggagaccctgctgcttgctacacttcatttatttcctgaagtttggatgcatgtgtgaaatttgagttggaaataatattgaaatatttgtggcttttcttcaattaagt

SEQ ID NO: 53473 - protein, 258 aa, Glycine max
  peptide (1)..(258): Ceres Seq. ID no. 14304570
  misc_feature (36)..(256): Pfam Name: Dienelactone hydrolase family Pfam Description: Dienelactone hydrolase family
  misc_feature (47)..(257): Homolog of NCBI NO: 23105000 NR Description: hypothetical protein [Azotobacter vinelandii]
  misc_feature (38)..(256): Homolog of NCBI NO: 23472687 NR Description: hypothetical protein [Pseudomonas syringae pv.
  misc_feature (38)..(256): Homolog of NCBI NO: 28869992 NR Description: dienelactone hydrolase family protein
  misc_feature (45)..(256): Homolog of NCBI NO: 27377598 NR Description: blr2487 [Bradyrhizobium japonicum]
  misc_feature (46)..(257): Homolog of NCBI NO: 22963172 NR Description: hypothetical protein [Rhodopseudomonas palustris]
  misc_feature (27)..(256): Homolog of NCBI NO: 17549527 NR Description: PUTATIVE TRANSMEMBRANE PROTEIN [Ralstonia
  misc_feature (44)..(256): Homolog of NCBI NO: 22988407 NR Description: hypothetical protein [Burkholderia fungorum]
  misc_feature (15)..(258): Homolog of NCBI NO: 34913460 NR Description: putative carboxymethylenebutenolidase
  misc_feature (22)..(257): Homolog of NCBI NO: 21554208 NR Description: putative carboxymethylenebutenolidase
  misc_feature (22)..(257): Homolog of NCBI NO: 15225693 NR Description: carboxymethylenebutenolidase -related
AKFSHLLLTDLHSHSMASTESSPFKKIQIQRDDTTFDAYVVGKEDAPGIVVIQEWWGVDYEIKNHAVKISQLGSGFKALIPDLYRGKVGLDVAEAQHLMDGLDWQGAVKDIAASVNWLKANGSKKAGVTGFCMGGALSIASSVLVQEVDASVAFYGVPASQLADPAQAKAPVQAHFGELDNFVGFSDVTAAKALEEKLKASGIPHEVHIYPGNAHAFMNRSTEGIQRRKNMGMPDEDEAAVQLAWSRFETWMTRYLSS

SEQ ID NO: 53474 - protein, 243 aa, Glycine max
  peptide (1)..(243): Ceres Seq. ID no. 14304571
  misc_feature (21)..(241): Pfam Name: Dienelactone hydrolase family Pfam Description: Dienelactone hydrolase family
  misc_feature (32)..(242): Homolog of NCBI NO: 23105000 NR Description: hypothetical protein [Azotobacter vinelandii]
  misc_feature (23)..(241): Homolog of NCBI NO: 23472687 NR Description: hypothetical protein [Pseudomonas syringae pv.
  misc_feature (23)..(241): Homolog of NCBI NO: 28869992 NR Description: dienelactone hydrolase family protein
  misc_feature (30)..(241): Homolog of NCBI NO: 27377598 NR Description: blr2487 [Bradyrhizobium japonicum]
  misc_feature (31)..(242): Homolog of NCBI NO: 22963172 NR Description: hypothetical protein [Rhodopseudomonas palustris]
  misc_feature (12)..(241): Homolog of NCBI NO: 17549527 NR Description: PUTATIVE TRANSMEMBRANE PROTEIN [Ralstonia
  misc_feature (29)..(241): Homolog of NCBI NO: 22988407 NR Description: hypothetical protein [Burkholderia fungorum]
  misc_feature (1)..(243): Homolog of NCBI NO: 34913460 NR Description: putative carboxymethylenebutenolidase
  misc_feature (7)..(242): Homolog of NCBI NO: 21554208 NR Description: putative carboxymethylenebutenolidase
  misc_feature (7)..(242): Homolog of NCBI NO: 15225693 NR Description: carboxymethylenebutenolidase -related
MASTESSPFKKIQIQRDDTTFDAYVVGKEDAPGIVVIQEWWGVDYEIKNHAVKISQLGSGFKALIPDLYRGKVGLDVAEAQHLMDGLDWQGAVKDIAASVNWLKANGSKKAGVTGFCMGGALSIASSVLVQEVDASVAFYGVPASQLADPAQAKAPVQAHFGELDNFVGFSDVTAAKALEEKLKASGIPHEVHIYPGNAHAFMNRSTEGIQRRKNMGMPDEDEAAVQLAWSRFETWMTRYLSS

SEQ ID NO: 53475 - protein, 160 aa, Glycine max
  peptide (1)..(160): Ceres Seq. ID no. 14304572
  misc_feature (1)..(158): Pfam Name: Dienelactone hydrolase family Pfam Description: Dienelactone hydrolase family
  misc_feature (1)..(159): Homolog of NCBI NO: 23105000 NR Description: hypothetical protein [Azotobacter vinelandii]
  misc_feature (1)..(158): Homolog of NCBI NO: 23472687 NR Description: hypothetical protein [Pseudomonas syringae pv.
  misc_feature (1)..(158): Homolog of NCBI NO: 28869992 NR Description: dienelactone hydrolase family protein
  misc_feature (1)..(158): Homolog of NCBI NO: 27377598 NR Description: blr2487 [Bradyrhizobium japonicum]
  misc_feature (1)..(159): Homolog of NCBI NO: 22963172 NR Description: hypothetical protein [Rhodopseudomonas palustris]
  misc_feature (1)..(158): Homolog of NCBI NO: 17549527 NR Description: PUTATIVE TRANSMEMBRANE PROTEIN [Ralstonia
  misc_feature (1)..(158): Homolog of NCBI NO: 22988407 NR Description: hypothetical protein [Burkholderia fungorum]
  misc_feature (1)..(160): Homolog of NCBI NO: 34913460 NR Description: putative carboxymethylenebutenolidase
  misc_feature (1)..(159): Homolog of NCBI NO: 21554208 NR Description: putative carboxymethylenebutenolidase
  misc_feature (1)..(159): Homolog of NCBI NO: 15225693 NR Description: carboxymethylenebutenolidase -related
MDGLDWQGAVKDIAASVNWLKANGSKKAGVTGFCMGGALSIASSVLVQEVDASVAFYGVPASQLADPAQAKAPVQAHFGELDNFVGFSDVTAAKALEEKLKASGIPHEVHIYPGNAHAFMNRSTEGIQRRKNMGMPDEDEAAVQLAWSRFETWMTRYLSS

SEQ ID NO: 53476 - DNA, 1988 bp, Glycine max
  misc_feature (1)..(1988): Ceres Seq. ID no. 15226393
tcagctacgtaggccccccccccatacatcttttggcatccaaatcatctgaaatggctagtgctgatgacatcagtggtaaactgaaaagcagttcagacttggttctgtccaaacaagatgaaaaagtagaaaaatctgataaaaatgggctttctgatattgagcagctggttcaagggaagaaattctctagagttgaatttgatcgtttagtggcggtactaaattcaagggtgatggacctttctaatgttgaacaaggaaaggaaattacaaatttgagttctaggaaagatgatgaggggcttgcgatgacacgtggacttccgaaagtttcaaatgagcaaaggcttgaagagtcaactggggccatatggggaacctcaacacctcttggtctgtcaaagggtcaggatgaaattggtgcttcaccaatagagattgctagagcatatatggattcccgtgcattagaagcaggtccctgttctaagaacatgattcatactgttgaaagcactatgttgcatggtgatgaagctgcaataaaaccatatgatccatcaccatcaaagaaatcgtcaacatgttggccgggtgctgtggtgcaggatgcttacataacgccacaaagtcagagaaacagatatggacttcataacttcccccgtactccttattccagaactcttttaacaaagtccaagtccaagttgattcatatgaaaggagatagcagccagatttcatcaactcccgtccgtcaatcacatactactatgtatccggaggataaatctaaagctggagcatcagaaagtggatatggatctgttggacctattcgtcgaactaggcataaggttggtgcacaattgtcttcaagaagagtggcttattcatctgtgtatggccctttacagagagaaagttctggtgttattgaaggtttcactcctgttsaaaagagaacggaacctgttgggacaagctgcactcataagccactaggccttgaggtgagtgttccaacagtacacatgcatagcagtttgatggctatgaagattttagaccatattgatagaaacattcccacacctaaagagaaatctgctgagctcaagctggcaaccaaatggaagaaccctgaatcttctattgatttcagtactatctggtcaaatgaagataatggcttgcttaaattaaatgatgttagccctcataaatatgatgggcttgaaggaaagaaatctactctatggaatgaaggtaaggggaagtgccatattgatatgcaacctaaggaggagagtactgataaatctatcgatgtcagaaaagtaggaaatcgggcatctgatgtgaatgctaatagcagcatccctagacttggtaacaatgcaagcactacgcaaaattttggtggtcctcacattttttctatgaagtcttctaaagaggatgctatgaagacaactctcctaagtggtggtcatcctttaggggtaaatcaagaacagaagcttctcactaaccctgctaccattaaaccagctttacctcctatttcgatcaagaagcctgaatcaagatggacgttagcaactgacactggttccggatttacctttcctgtttcagcatccacttctgtattctctgagccaccaactccatccatcacgcctttgctttctgcccgggatcagcaccaattaaaagaaggatctactgaactgtcatacagttttggtttgaaaaagtccagtccagcagtagttttttccttcccttctactagcaatactgctattgagaatgaagttggagacataaagtttaactttggttcaactaagaagccaaggatatcgttctcatttggaaaaaatgctgtctgctcttaaaaataaaatgacaacaatgttccaaacgctatccaactttgtttagttctgattattgtatttttagccttt

SEQ ID NO: 53477 - protein, 637 aa, Glycine max
  peptide (1)..(637): Ceres Seq. ID no. 15226394
  misc_feature (13)..(229): Homolog of NCBI NO: 8567799 NR Description: hypothetical protein [Arabidopsis thaliana]
  misc_feature (13)..(313): Homolog of NCBI NO: 15228349 NR Description: expressed protein [Arabidopsis thaliana]
  misc_feature (42)..(636): Homolog of NCBI NO: 17064886 NR Description: Unknown protein [Arabidopsis thaliana]
  misc_feature (42)..(636): Homolog of NCBI NO: 15241292 NR Description: expressed protein [Arabidopsis thaliana]
  misc_feature (322)..(322): Xaa is any aa, unknown or other
SYVGPPPIHLLASKSSEMASADDISGKLKSSSDLVLSKQDEKVEKSDKNGLSDIEQLVQGKKFSRVEFDRLVAVLNSRVMDLSNVEQGKEITNLSSRKDDEGLAMTRGLPKVSNEQRLEESTGAIWGTSTPLGLSKGQDEIGASPIEIARAYMDSRALEAGPCSKNMIHTVESTMLHGDEAAIKPYDPSPSKKSSTCWPGAVVQDAYITPQSQRNRYGLHNFPRTPYSRTLLTKSKSKLIHMKGDSSQISSTPVRQSHTTMYPEDKSKAGASESGYGSVGPIRRTRHKVGAQLSSRRVAYSSVYGPLQRESSGVIEGFTPVXKRTEPVGTSCTHKPLGLEVSVPTVHMHSSLMAMKILDHIDRNIPTPKEKSAELKLATKWKNPESSIDFSTIWSNEDNGLLKLNDVSPHKYDGLEGKKSTLWNEGKGKCHIDMQPKEESTDKSIDVRKVGNRASDVNANSSIPRLGNNASTTQNFGGPHIFSMKSSKEDAMKTTLLSGGHPLGVNQEQKLLTNPATIKPALPPISIKKPESRWTLATDTGSGFTFPVSASTSVFSEPPTPSITPLLSARDQHQLKEGSTELSYSFGLKKSSPAVVFSFPSTSNTAIENEVGDIKFNFGSTKKPRISFSFGKNAVCS

SEQ ID NO: 53478 - protein, 620 aa, Glycine max
  peptide (1)..(620): Ceres Seq. ID no. 15226395
  misc_feature (1)..(212): Homolog of NCBI NO: 8567799 NR Description: hypothetical protein [Arabidopsis thaliana]
  misc_feature (1)..(296): Homolog of NCBI NO: 15228349 NR Description: expressed protein [Arabidopsis thaliana]
  misc_feature (25)..(619): Homolog of NCBI NO: 17064886 NR Description: Unknown protein [Arabidopsis thaliana]
  misc_feature (25)..(619): Homolog of NCBI NO: 15241292 NR Description: expressed protein [Arabidopsis thaliana]
  misc_feature (305)..(305): Xaa is any aa, unknown or other
MASADDISGKLKSSSDLVLSKQDEKVEKSDKNGLSDIEQLVQGKKFSRVEFDRLVAVLNSRVMDLSNVEQGKEITNLSSRKDDEGLAMTRGLPKVSNEQRLEESTGAIWGTSTPLGLSKGQDEIGASPIEIARAYMDSRALEAGPCSKNMIHTVESTMLHGDEAAIKPYDPSPSKKSSTCWPGAVVQDAYITPQSQRNRYGLHNFPRTPYSRTLLTKSKSKLIHMKGDSSQISSTPVRQSHTTMYPEDKSKAGASESGYGSVGPIRRTRHKVGAQLSSRRVAYSSVYGPLQRESSGVIEGFTPVXKRTEPVGTSCTHKPLGLEVSVPTVHMHSSLMAMKILDHIDRNIPTPKEKSAELKLATKWKNPESSIDFSTIWSNEDNGLLKLNDVSPHKYDGLEGKKSTLWNEGKGKCHIDMQPKEESTDKSIDVRKVGNRASDVNANSSIPRLGNNASTTQNFGGPHIFSMKSSKEDAMKTTLLSGGHPLGVNQEQKLLTNPATIKPALPPISIKKPESRWTLATDTGSGFTFPVSASTSVFSEPPTPSITPLLSARDQHQLKEGSTELSYSFGLKKSSPAVVFSFPSTSNTAIENEVGDIKFNFGSTKKPRISFSFGKNAVCS

SEQ ID NO: 53479 - protein, 558 aa, Glycine max
  peptide (1)..(558): Ceres Seq. ID no. 15226396
  misc_feature (1)..(150): Homolog of NCBI NO: 8567799 NR Description: hypothetical protein [Arabidopsis thaliana]
  misc_feature (1)..(234): Homolog of NCBI NO: 15228349 NR Description: expressed protein [Arabidopsis thaliana]
  misc_feature (1)..(557): Homolog of NCBI NO: 17064886 NR Description: Unknown protein [Arabidopsis thaliana]
  misc_feature (1)..(557): Homolog of NCBI NO: 15241292 NR Description: expressed protein [Arabidopsis thaliana]
  misc_feature (243)..(243): Xaa is any aa, unknown or other
MDLSNVEQGKEITNLSSRKDDEGLAMTRGLPKVSNEQRLEESTGAIWGTSTPLGLSKGQDEIGASPIEIARAYMDSRALEAGPCSKNMIHTVESTMLHGDEAAIKPYDPSPSKKSSTCWPGAVVQDAYITPQSQRNRYGLHNFPRTPYSRTLLTKSKSKLIHMKGDSSQISSTPVRQSHTTMYPEDKSKAGASESGYGSVGPIRRTRHKVGAQLSSRRVAYSSVYGPLQRESSGVIEGFTPVXKRTEPVGTSCTHKPLGLEVSVPTVHMHSSLMAMKILDHIDRNIPTPKEKSAELKLATKWKNPESSIDFSTIWSNEDNGLLKLNDVSPHKYDGLEGKKSTLWNEGKGKCHIDMQPKEESTDKSIDVRKVGNRASDVNANSSIPRLGNNASTTQNFGGPHIFSMKSSKEDAMKTTLLSGGHPLGVNQEQKLLTNPATIKPALPPISIKKPESRWTLATDTGSGFTFPVSASTSVFSEPPTPSITPLLSARDQHQLKEGSTELSYSFGLKKSSPAVVFSFPSTSNTAIENEVGDIKFNFGSTKKPRISFSFGKNAVCS

SEQ ID NO: 53480 - DNA, 1249 bp, Glycine max
  misc_feature (1)..(1249): Ceres Seq. ID no. 14310896
gaaggaagaagagaaggagaatgacggaaagttgcatccgatccgtcgtagaagccattcactcctctcctttccaagccgttctccatctcgccggtggagcttctcaggtggtgggttcgttgctatcagttcccggtgcttcgaatactgtgctcgaagttgtggttccttactctaagatgtctctcattcagttactcggaaagattccatcccaattttgtggccaacagactgctgaagatatggctttattggcgtataatcgcgctcttaagctctccaagccaggatccccggctgttggagtgggtttcactggttctttggccagcagtcgtccaaaactcggggaacacagattttatatgtcaacaaggacagccgaccaactttggatatcaagtgtgaccttgactaaggggcttcgtactcgagaagaagaggatagagtttctagtcatcttttgatcaaggcaattggaaatgcatgcaaagttcccggagcatctgttttgttgttgagtgagtcagatgtatctgatgaatgtgaaacacaattcaatgaagatcaacagttagaacaacttataaatggacaaatatgctttaaaatttacccatttgaaaatgagatatcagccgaaaggaaaataataatgcctggttctttcaatccattacatgatgggcatctgaagcttatggatgttgctactcgcatttgtggtgatgggtatccttgctttgaaatatcggcagtcaatgcagacaaacctccattatcagtgtctcagatcaaagatcgcatcaagcaatttgaaaaagttggaaagacggtaattatatccaatcagccttatttttataagaaggctgaacttttcccaggcagtgcttttgtaattggggccgacacggcagtgaggcttattaaccctgaatactacgatggtgactacaacaagatgctgaagatacttgttggttgtaaagaaacaggatgcactttccttgtgggtggtcggaatgttgatggtgctttcaaggttcttgacgatattgatgttccaaaagaactaaaagacatgttcgtctccattccagctgaacagttccgcatggatatatcctccactgaaataagaaatagaagtgggatgtaaataatttcatggctaaaggtcaatgtttaatctaggatgaaatcactaacacttaaaaaaaaaagggtttatattttttg

SEQ ID NO: 53481 - protein, 388 aa, Glycine max
  peptide (1)..(388): Ceres Seq. ID no. 14310897
  misc_feature (7)..(159): Homolog of NCBI NO: 25371182 NR Description: hypothetical protein At2g01220 [imported] -
  misc_feature (9)..(97): Homolog of NCBI NO: 34911372 NR Description: P0034C09.17 [Oryza sativa (japonica
  misc_feature (314)..(387): Homolog of NCBI NO: 34911372 NR Description: P0034C09.17 [Oryza sativa (japonica
  misc_feature (94)..(276): Homolog of NCBI NO: 34911372 NR Description: P0034C09.17 [Oryza sativa (japonica
  misc_feature (7)..(387): Homolog of NCBI NO: 9294466 NR Description: gb|AAD14522.1~gene_id:MGF10.2~similar to unknown
  misc_feature (7)..(387): Homolog of NCBI NO: 15232221 NR Description: expressed protein [Arabidopsis thaliana]
  misc_feature (7)..(387): Homolog of NCBI NO: 21537099 NR Description: unknown [Arabidopsis thaliana]
  misc_feature (7)..(387): Homolog of NCBI NO: 26451899 NR Description: unknown protein [Arabidopsis thaliana]
  misc_feature (7)..(387): Homolog of NCBI NO: 30677890 NR Description: expressed protein [Arabidopsis thaliana]
  misc_feature (7)..(387): Homolog of NCBI NO: 30677893 NR Description: expressed protein [Arabidopsis thaliana]
RKKRRRMTESCIRSVVEAIHSSPFQAVLHLAGGASQVVGSLLSVPGASNTVLEVVVPYSKMSLIQLLGKIPSQFCGQQTAEDMALLAYNRALKLSKPGSPAVGVGFTGSLASSRPKLGEHRFYMSTRTADQLWISSVTLTKGLRTREEEDRVSSHLLIKAIGNACKVPGASVLLLSESDVSDECETQFNEDQQLEQLINGQICFKIYPFENEISAERKIIMPGSFNPLHDGHLKLMDVATRICGDGYPCFEISAVNADKPPLSVSQIKDRIKQFEKVGKTVIISNQPYFYKKAELFPGSAFVIGADTAVRLINPEYYDGDYNKMLKILVGCKETGCTFLVGGRNVDGAFKVLDDIDVPKELKDMFVSIPAEQFRMDISSTEIRNRSGM

SEQ ID NO: 53482 - protein, 382 aa, Glycine max
  peptide (1)..(382): Ceres Seq. ID no. 14310898
  misc_feature (1)..(153): Homolog of NCBI NO: 25371182 NR Description: hypothetical protein At2g01220 [imported] -
  misc_feature (3)..(91): Homolog of NCBI NO: 34911372 NR Description: P0034C09.17 [Oryza sativa (japonica
  misc_feature (308)..(381): Homolog of NCBI NO: 34911372 NR Description: P0034C09.17 [Oryza sativa (japonica
  misc_feature (88)..(270): Homolog of NCBI NO: 34911372 NR Description: P0034C09.17 [Oryza sativa (japonica
  misc_feature (1)..(381): Homolog of NCBI NO: 9294466 NR Description: gb|AAD14522.1~gene_id:MGF10.2~similar to unknown
  misc_feature (1)..(381): Homolog of NCBI NO: 15232221 NR Description: expressed protein [Arabidopsis thaliana]
  misc_feature (1)..(381): Homolog of NCBI NO: 21537099 NR Description: unknown [Arabidopsis thaliana]
  misc_feature (1)..(381): Homolog of NCBI NO: 26451899 NR Description: unknown protein [Arabidopsis thaliana]
  misc_feature (1)..(381): Homolog of NCBI NO: 30677890 NR Description: expressed protein [Arabidopsis thaliana]
  misc_feature (1)..(381): Homolog of NCBI NO: 30677893 NR Description: expressed protein [Arabidopsis thaliana]
MTESCIRSVVEAIHSSPFQAVLHLAGGASQVVGSLLSVPGASNTVLEVVVPYSKMSLIQLLGKIPSQFCGQQTAEDMALLAYNRALKLSKPGSPAVGVGFTGSLASSRPKLGEHRFYMSTRTADQLWISSVTLTKGLRTREEEDRVSSHLLIKAIGNACKVPGASVLLLSESDVSDECETQFNEDQQLEQLINGQICFKIYPFENEISAERKIIMPGSFNPLHDGHLKLMDVATRICGDGYPCFEISAVNADKPPLSVSQIKDRIKQFEKVGKTVIISNQPYFYKKAELFPGSAFVIGADTAVRLINPEYYDGDYNKMLKILVGCKETGCTFLVGGRNVDGAFKVLDDIDVPKELKDMFVSIPAEQFRMDISSTEIRNRSGM

SEQ ID NO: 53483 - protein, 328 aa, Glycine max
  peptide (1)..(328): Ceres Seq. ID no. 14310899
  misc_feature (1)..(99): Homolog of NCBI NO: 25371182 NR Description: hypothetical protein At2g01220 [imported] -
  misc_feature (1)..(37): Homolog of NCBI NO: 34911372 NR Description: P0034C09.17 [Oryza sativa (japonica
  misc_feature (254)..(327): Homolog of NCBI NO: 34911372 NR Description: P0034C09.17 [Oryza sativa (japonica
  misc_feature (34)..(216): Homolog of NCBI NO: 34911372 NR Description: P0034C09.17 [Oryza sativa (japonica
  misc_feature (1)..(327): Homolog of NCBI NO: 9294466 NR Description: gb|AAD14522.1~gene_id:MGF10.2~similar to unknown
  misc_feature (1)..(327): Homolog of NCBI NO: 15232221 NR Description: expressed protein [Arabidopsis thaliana]
  misc_feature (1)..(327): Homolog of NCBI NO: 21537099 NR Description: unknown [Arabidopsis thaliana]
  misc_feature (1)..(327): Homolog of NCBI NO: 26451899 NR Description: unknown protein [Arabidopsis thaliana]
  misc_feature (1)..(327): Homolog of NCBI NO: 30677890 NR Description: expressed protein [Arabidopsis thaliana]
  misc_feature (1)..(327): Homolog of NCBI NO: 30677893 NR Description: expressed protein [Arabidopsis thaliana]
MSLIQLLGKIPSQFCGQQTAEDMALLAYNRALKLSKPGSPAVGVGFTGSLASSRPKLGEHRFYMSTRTADQLWISSVTLTKGLRTREEEDRVSSHLLIKAIGNACKVPGASVLLLSESDVSDECETQFNEDQQLEQLINGQICFKIYPFENEISAERKIIMPGSFNPLHDGHLKLMDVATRICGDGYPCFEISAVNADKPPLSVSQIKDRIKQFEKVGKTVIISNQPYFYKKAELFPGSAFVIGADTAVRLINPEYYDGDYNKMLKILVGCKETGCTFLVGGRNVDGAFKVLDDIDVPKELKDMFVSIPAEQFRMDISSTEIRNRSGM

SEQ ID NO: 53484 - DNA, 1433 bp, Glycine max
  misc_feature (1)..(1433): Ceres Seq. ID no. 14311059
acacagtagttacttcaaagtctaatgatagagttcagaagagagctagttctgttgaagaacctgacagactaggtaaacgacggaaaggggatgtggagctaagagattttgaaactgaactcagattctctgaaagagagaagatgatggatcctcgatttgctgatgacaaattgggaccagaggaacatggtctgtacagggcaagtgataagccattggaaaggacaaaagacaaaggcaacgaaagatatgaaagggatcacagggaaagaatggaccgtctggataagtctcgtggtgatgactttgttgcagaaaaacctagggataggtcaattgaaagatatggaagagaacgatctgttgagagaatgcaagagaggggtagtgataggagttttaatagactccctgagaaagccaaggatgaaagaaacaaggatgatagaaataaattacgatacaatgatgcatcagcagaaaaatctcatggtgatgatcgcttccatgggcaaagcttgcctccacctccccctttacctcctaatgtggttcctcaatctgtaggagctggtaggcgtgatgaagatgttgatagaaggtatggagctacaaggcactctcaaagactttctccaaggcatgaagaaaaagaacggagatggtctgaagagactgtggtttctcaggatgatgccaaacgccgaaaagaagacgattttcgagatcgaaaacgtgaggaaattaaggtggaagagagggagcgggaaagagagaaagcaaacattctaaaggaagagttggacttaaatgccgcatccaagagacgtaaactcaagagggagcatttaccaactgatgaacctggcgagtactctgcagtggcccatccaccttcttccgctggtactggcatgccgctggcatatgatggaagggacagaggagacagaaagggacccatcatgcagcatccaagttacatagatgaatcaagtctcaggattcacggtaaagaggcggccagcaagttgaatcgccgtgattcagatcccttgtatgaccgtgaatgggaggatgagaagagacaaagagctgatcagaagcgaaggcaccggaagtaacaaatcaaaaggggatttcaccagtaaacttttttgaaggttgtgtccgtttcatgcacgtgctataatgctaactttttgcgtgagttgaggtggtgggttcacaacacttttaactgtcagccccctcatttttctggcaacttgtgccaaatttcagcagttcaaattattagtcttctttctaaagtcagcatgaagaagttatgaaaattcttatacacttgtatatagtgttgtatattctggatagctgatgatcaaatatactctgaaaaatccgattatttcgtttgaactttc

SEQ ID NO: 53485 - protein, 375 aa, Glycine max
  peptide (1)..(375): Ceres Seq. ID no. 14311060
  misc_feature (45)..(289): Pfam Name: Caldesmon Pfam Description: Caldesmon
  misc_feature (26)..(375): Homolog of NCBI NO: 34858177 NR Description: similar to trichohyalin [Rattus norvegicus]
  misc_feature (26)..(295): Homolog of NCBI NO: 16198129 NR Description: LD33732p [Drosophila melanogaster]
  misc_feature (5)..(295): Homolog of NCBI NO: 24655483 NR Description: CG7971-PC [Drosophila melanogaster]
  misc_feature (5)..(295): Homolog of NCBI NO: 24655488 NR Description: CG7971-PA [Drosophila melanogaster]
  misc_feature (5)..(295): Homolog of NCBI NO: 24655493 NR Description: CG7971-PB [Drosophila melanogaster]
  misc_feature (5)..(290): Homolog of NCBI NO: 15292565 NR Description: SD07741p [Drosophila melanogaster]
  misc_feature (6)..(289): Homolog of NCBI NO: 24580684 NR Description: CG2839-PA [Drosophila melanogaster]
  misc_feature (7)..(375): Homolog of NCBI NO: 34906976 NR Description: P0413C03.11 [Oryza sativa (japonica
  misc_feature (2)..(354): Homolog of NCBI NO: 9945085 NR Description: F5A9.21 [Arabidopsis thaliana]
  misc_feature (2)..(375): Homolog of NCBI NO: 30689010 NR Description: F5A9.21 [Arabidopsis thaliana]
TVVTSKSNDRVQKRASSVEEPDRLGKRRKGDVELRDFETELRFSEREKMMDPRFADDKLGPEEHGLYRASDKPLERTKDKGNERYERDHRERMDRLDKSRGDDFVAEKPRDRSIERYGRERSVERMQERGSDRSFNRLPEKAKDERNKDDRNKLRYNDASAEKSHGDDRFHGQSLPPPPPLPPNVVPQSVGAGRRDEDVDRRYGATRHSQRLSPRHEEKERRWSEETVVSQDDAKRRKEDDFRDRKREEIKVEEREREREKANILKEELDLNAASKRRKLKREHLPTDEPGEYSAVAHPPSSAGTGMPLAYDGRDRGDRKGPIMQHPSYIDESSLRIHGKEAASKLNRRDSDPLYDREWEDEKRQRADQKRRHRK

SEQ ID NO: 53486 - protein, 327 aa, Glycine max
  peptide (1)..(327): Ceres Seq. ID no. 14311061
  misc_feature (1)..(241): Pfam Name: Caldesmon Pfam Description: Caldesmon
  misc_feature (1)..(327): Homolog of NCBI NO: 34858177 NR Description: similar to trichohyalin [Rattus norvegicus]
  misc_feature (1)..(247): Homolog of NCBI NO: 16198129 NR Description: LD33732p [Drosophila melanogaster]
  misc_feature (1)..(247): Homolog of NCBI NO: 24655483 NR Description: CG7971-PC [Drosophila melanogaster]
  misc_feature (1)..(247): Homolog of NCBI NO: 24655488 NR Description: CG7971-PA [Drosophila melanogaster]
  misc_feature (1)..(247): Homolog of NCBI NO: 24655493 NR Description: CG7971-PB [Drosophila melanogaster]
  misc_feature (1)..(242): Homolog of NCBI NO: 15292565 NR Description: SD07741p [Drosophila melanogaster]
  misc_feature (1)..(241): Homolog of NCBI NO: 24580684 NR Description: CG2839-PA [Drosophila melanogaster]
  misc_feature (1)..(327): Homolog of NCBI NO: 34906976 NR Description: P0413C03.11 [Oryza sativa (japonica
  misc_feature (1)..(306): Homolog of NCBI NO: 9945085 NR Description: F5A9.21 [Arabidopsis thaliana]
  misc_feature (1)..(327): Homolog of NCBI NO: 30689010 NR Description: F5A9.21 [Arabidopsis thaliana]
MMDPRFADDKLGPEEHGLYRASDKPLERTKDKGNERYERDHRERMDRLDKSRGDDFVAEKPRDRSIERYGRERSVERMQERGSDRSFNRLPEKAKDERNKDDRNKLRYNDASAEKSHGDDRFHGQSLPPPPPLPPNVVPQSVGAGRRDEDVDRRYGATRHSQRLSPRHEEKERRWSEETVVSQDDAKRRKEDDFRDRKREEIKVEEREREREKANILKEELDLNAASKRRKLKREHLPTDEPGEYSAVAHPPSSAGTGMPLAYDGRDRGDRKGPIMQHPSYIDESSLRIHGKEAASKLNRRDSDPLYDREWEDEKRQRADQKRRHRK

SEQ ID NO: 53487 - protein, 326 aa, Glycine max
  peptide (1)..(326): Ceres Seq. ID no. 14311062
  misc_feature (1)..(240): Pfam Name: Caldesmon Pfam Description: Caldesmon
  misc_feature (1)..(326): Homolog of NCBI NO: 34858177 NR Description: similar to trichohyalin [Rattus norvegicus]
  misc_feature (1)..(246): Homolog of NCBI NO: 16198129 NR Description: LD33732p [Drosophila melanogaster]
  misc_feature (1)..(246): Homolog of NCBI NO: 24655483 NR Description: CG7971-PC [Drosophila melanogaster]
  misc_feature (1)..(246): Homolog of NCBI NO: 24655488 NR Description: CG7971-PA [Drosophila melanogaster]
  misc_feature (1)..(246): Homolog of NCBI NO: 24655493 NR Description: CG7971-PB [Drosophila melanogaster]
  misc_feature (1)..(241): Homolog of NCBI NO: 15292565 NR Description: SD07741p [Drosophila melanogaster]
  misc_feature (1)..(240): Homolog of NCBI NO: 24580684 NR Description: CG2839-PA [Drosophila melanogaster]
  misc_feature (1)..(326): Homolog of NCBI NO: 34906976 NR Description: P0413C03.11 [Oryza sativa (japonica
  misc_feature (1)..(305): Homolog of NCBI NO: 9945085 NR Description: F5A9.21 [Arabidopsis thaliana]
  misc_feature (1)..(326): Homolog of NCBI NO: 30689010 NR Description: F5A9.21 [Arabidopsis thaliana]
MDPRFADDKLGPEEHGLYRASDKPLERTKDKGNERYERDHRERMDRLDKSRGDDFVAEKPRDRSIERYGRERSVERMQERGSDRSFNRLPEKAKDERNKDDRNKLRYNDASAEKSHGDDRFHGQSLPPPPPLPPNVVPQSVGAGRRDEDVDRRYGATRHSQRLSPRHEEKERRWSEETVVSQDDAKRRKEDDFRDRKREEIKVEEREREREKANILKEELDLNAASKRRKLKREHLPTDEPGEYSAVAHPPSSAGTGMPLAYDGRDRGDRKGPIMQHPSYIDESSLRIHGKEAASKLNRRDSDPLYDREWEDEKRQRADQKRRHRK

SEQ ID NO: 53488 - DNA, 1734 bp, Glycine max
  misc_feature (1)..(1734): Ceres Seq. ID no. 14315138
gaattttgcagttgcgtgcgtttctgttccatacaatttcgatttcaatggcgaggcctaatcaggaggcagtcgagacgttcgtcagcatcactggcttgacagaagcagtagcgctgcaaaaattagaggagcatggcggtaatctcaatgaagcagtcaatgcacattttagtgaaggagacagaaatctaacgaccggctctcgcaacagctctgccgtatttcctcaagatgatttcatggatatagatgatcagcatgatgcaggaattcccagaattccatcactacttccagctttagcagcaaatgttaatccattttctcttcttgatccaacaattgggagaggtatatttggtacacgttttgattcaacaatcgaggcaccatttgttacccatccaagagaggtaagggagattcctatagaggttaaggatggcagtcaatccactcctcaagctggccatgttccatccattgaagatgtcactggaactgtcgatgcccatggtccagatatccatgggactgtcataattgatgatgaagatgatgacgatattccacctgcacagattgcacatcaagatgagcaaacacaaaagatcttggctgatacttcactcaatagcagtgttagacctagtgctcctgaatctgagaatttgccagattacagcaatgacatagaagaagaaatgattcgtgcagccattgaggcttctaaacaggaggctgaggaaaattatagaaatcacaaacttgacaggcaaattgacttaagtgaatcaggatcacagccaaggcaatcatatttggaggatcctgagcttgcccatgcagtttcattgtccctgaagacagcagagcaagaaaaagcattgcgagtacacgggggagattctggatcaccaacagcagggccatctaagtcatcagaggctggactaggggaagtgacatcaaatggaagattacaggcaggaagcttgtcatttcatgatgaagctgaagatgttgaggagcagccactggttaggaatagatctagacatatgtcttcgggatccacaggattgggcaaagatgttgaacttgctgaggctagcacactaccaagcacagcaacagtgactgcaacacaggatagcagtaatcctcatcataatggaaattccttcccagatgagtggggtggcatttcttcagaggagcatgatgaagcagtaatgcttgaagcggcaatgtttggtggaattccagaagggactgggtatcactatggttatgcaccacatgagtttatgcaaaataggggtttcaatccccggccccaatatcgtcctccttcaccatcactggcagctcaacgcttgataagggaacagcaggatgatgaatatcttgcatcgttacaagcagacagagaaaaagaattgaaggccatggaggaagctgaggctgctcgtgaagaggaaagacagagagcagaagactctcgcaggaaattacaggaagaacaggaattggaaacaaaattagcagccaaagaagtctcactaccaccagaaccatcctcagatgatgataatgctgtaaacttgatggtaaaaatgccagatggcaatcgtcgtggacgtcgattcctaagatctgataggctacagtctctgtttgactacatagatattggtagggtggtgaaaccaggcagttacagactgg

SEQ ID NO: 53489 - protein, 577 aa, Glycine max
  peptide (1)..(577): Ceres Seq. ID no. 14315139
  misc_feature (16)..(235): Homolog of NCBI NO: 13160609 NR Description: Ara4-interacting protein [Arabidopsis thaliana]
  misc_feature (264)..(510): Homolog of NCBI NO: 13160609 NR Description: Ara4-interacting protein [Arabidopsis thaliana]
  misc_feature (13)..(63): Homolog of NCBI NO: 7486575 NR Description: hypothetical protein F7H19.230 - Arabidopsis
  misc_feature (79)..(251): Homolog of NCBI NO: 7486575 NR Description: hypothetical protein F7H19.230 - Arabidopsis
  misc_feature (285)..(576): Homolog of NCBI NO: 7486575 NR Description: hypothetical protein F7H19.230 - Arabidopsis
  misc_feature (16)..(63): Homolog of NCBI NO: 18416058 NR Description: expressed protein [Arabidopsis thaliana]
  misc_feature (79)..(251): Homolog of NCBI NO: 18416058 NR Description: expressed protein [Arabidopsis thaliana]
  misc_feature (285)..(576): Homolog of NCBI NO: 18416058 NR Description: expressed protein [Arabidopsis thaliana]
  misc_feature (81)..(249): Homolog of NCBI NO: 7487672 NR Description: hypothetical protein T5C23.170 - Arabidopsis
  misc_feature (216)..(558): Homolog of NCBI NO: 7487672 NR Description: hypothetical protein T5C23.170 - Arabidopsis
ILQLRAFLFHTISISMARPNQEAVETFVSITGLTEAVALQKLEEHGGNLNEAVNAHFSEGDRNLTTGSRNSSAVFPQDDFMDIDDQHDAGIPRIPSLLPALAANVNPFSLLDPTIGRGIFGTRFDSTIEAPFVTHPREVREIPIEVKDGSQSTPQAGHVPSIEDVTGTVDAHGPDIHGTVIIDDEDDDDIPPAQIAHQDEQTQKILADTSLNSSVRPSAPESENLPDYSNDIEEEMIRAAIEASKQEAEENYRNHKLDRQIDLSESGSQPRQSYLEDPELAHAVSLSLKTAEQEKALRVHGGDSGSPTAGPSKSSEAGLGEVTSNGRLQAGSLSFHDEAEDVEEQPLVRNRSRHMSSGSTGLGKDVELAEASTLPSTATVTATQDSSNPHHNGNSFPDEWGGISSEEHDEAVMLEAAMFGGIPEGTGYHYGYAPHEFMQNRGFNPRPQYRPPSPSLAAQRLIREQQDDEYLASLQADREKELKAMEEAEAAREEERQRAEDSRRKLQEEQELETKLAAKEVSLPPEPSSDDDNAVNLMVKMPDGNRRGRRFLRSDRLQSLFDYIDIGRVVKPGSYRL

SEQ ID NO: 53490 - protein, 562 aa, Glycine max
  peptide (1)..(562): Ceres Seq. ID no. 14315140
  misc_feature (1)..(220): Homolog of NCBI NO: 13160609 NR Description: Ara4-interacting protein [Arabidopsis thaliana]
  misc_feature (249)..(495): Homolog of NCBI NO: 13160609 NR Description: Ara4-interacting protein [Arabidopsis thaliana]
  misc_feature (1)..(48): Homolog of NCBI NO: 7486575 NR Description: hypothetical protein F7H19.230 - Arabidopsis
  misc_feature (64)..(236): Homolog of NCBI NO: 7486575 NR Description: hypothetical protein F7H19.230 - Arabidopsis
  misc_feature (270)..(561): Homolog of NCBI NO: 7486575 NR Description: hypothetical protein F7H19.230 - Arabidopsis
  misc_feature (1)..(48): Homolog of NCBI NO: 18416058 NR Description: expressed protein [Arabidopsis thaliana]
  misc_feature (64)..(236): Homolog of NCBI NO: 18416058 NR Description: expressed protein [Arabidopsis thaliana]
  misc_feature (270)..(561): Homolog of NCBI NO: 18416058 NR Description: expressed protein [Arabidopsis thaliana]
  misc_feature (66)..(234): Homolog of NCBI NO: 7487672 NR Description: hypothetical protein T5C23.170 - Arabidopsis
  misc_feature (201)..(543): Homolog of NCBI NO: 7487672 NR Description: hypothetical protein T5C23.170 - Arabidopsis
MARPNQEAVETFVSITGLTEAVALQKLEEHGGNLNEAVNAHFSEGDRNLTTGSRNSSAVFPQDDFMDIDDQHDAGIPRIPSLLPALAANVNPFSLLDPTIGRGIFGTRFDSTIEAPFVTHPREVREIPIEVKDGSQSTPQAGHVPSIEDVTGTVDAHGPDIHGTVIIDDEDDDDIPPAQIAHQDEQTQKILADTSLNSSVRPSAPESENLPDYSNDIEEEMIRAAIEASKQEAEENYRNHKLDRQIDLSESGSQPRQSYLEDPELAHAVSLSLKTAEQEKALRVHGGDSGSPTAGPSKSSEAGLGEVTSNGRLQAGSLSFHDEAEDVEEQPLVRNRSRHMSSGSTGLGKDVELAEASTLPSTATVTATQDSSNPHHNGNSFPDEWGGISSEEHDEAVMLEAAMFGGIPEGTGYHYGYAPHEFMQNRGFNPRPQYRPPSPSLAAQRLIREQQDDEYLASLQADREKELKAMEEAEAAREEERQRAEDSRRKLQEEQELETKLAAKEVSLPPEPSSDDDNAVNLMVKMPDGNRRGRRFLRSDRLQSLFDYIDIGRVVKPGSYRL

SEQ ID NO: 53491 - protein, 497 aa, Glycine max
  peptide (1)..(497): Ceres Seq. ID no. 14315141
  misc_feature (1)..(164): Homolog of NCBI NO: 30678726 NR Description: expressed protein [Arabidopsis thaliana]
  misc_feature (136)..(496): Homolog of NCBI NO: 18413644 NR Description: expressed protein [Arabidopsis thaliana]
  misc_feature (1)..(155): Homolog of NCBI NO: 13160609 NR Description: Ara4-interacting protein [Arabidopsis thaliana]
  misc_feature (184)..(430): Homolog of NCBI NO: 13160609 NR Description: Ara4-interacting protein [Arabidopsis thaliana]
  misc_feature (1)..(171): Homolog of NCBI NO: 7486575 NR Description: hypothetical protein F7H19.230 - Arabidopsis
  misc_feature (205)..(496): Homolog of NCBI NO: 7486575 NR Description: hypothetical protein F7H19.230 - Arabidopsis
  misc_feature (1)..(171): Homolog of NCBI NO: 18416058 NR Description: expressed protein [Arabidopsis thaliana]
  misc_feature (205)..(496): Homolog of NCBI NO: 18416058 NR Description: expressed protein [Arabidopsis thaliana]
  misc_feature (1)..(169): Homolog of NCBI NO: 7487672 NR Description: hypothetical protein T5C23.170 - Arabidopsis
  misc_feature (136)..(478): Homolog of NCBI NO: 7487672 NR Description: hypothetical protein T5C23.170 - Arabidopsis
MDIDDQHDAGIPRIPSLLPALAANVNPFSLLDPTIGRGIFGTRFDSTIEAPFVTHPREVREIPIEVKDGSQSTPQAGHVPSIEDVTGTVDAHGPDIHGTVIIDDEDDDDIPPAQIAHQDEQTQKILADTSLNSSVRPSAPESENLPDYSNDIEEEMIRAAIEASKQEAEENYRNHKLDRQIDLSESGSQPRQSYLEDPELAHAVSLSLKTAEQEKALRVHGGDSGSPTAGPSKSSEAGLGEVTSNGRLQAGSLSFHDEAEDVEEQPLVRNRSRHMSSGSTGLGKDVELAEASTLPSTATVTATQDSSNPHHNGNSFPDEWGGISSEEHDEAVMLEAAMFGGIPEGTGYHYGYAPHEFMQNRGFNPRPQYRPPSPSLAAQRLIREQQDDEYLASLQADREKELKAMEEAEAAREEERQRAEDSRRKLQEEQELETKLAAKEVSLPPEPSSDDDNAVNLMVKMPDGNRRGRRFLRSDRLQSLFDYIDIGRVVKPGSYRL

SEQ ID NO: 53492 - DNA, 2003 bp, Glycine max
  misc_feature (1)..(2003): Ceres Seq. ID no. 15225635
tcagctacgtaggcccccccccccaaaaaaaaaaaattctatcgaattggttccaactgcagttgttttgaccagggatgagtttgaaggagaatgtagctaagacaggcaacactgaggacaatgctagtcaaatgtggaccttatgcaaacatgctttctatgatttaactcatgtttctccggtggtgtttctgttcctgctgaaagaatgttattattatggcacatgtaaggcatcaacaaaattccgagcccttcaacatcaagtacatcttgttcttagtaatgatccaaaacccgaaccagcaacttttattgttcagtgcatgtatgtctctccattatttgaagatcatagtcaaggatttactcatctgataatatctgctcttcgccgattcctgaaaagatcaacaaccactacagaagactcattggaggtgaaagacctagttgcccatctacttgtagatattatttggggccagatcgatcatgatgaaaagattgtcctgaagctactcgagatttttgatgtaaaactaacaaatgttgagaaagcaatgtgtcaaattaaggaaaaacatgatttaagttgtggtacagcaaaagaatttgttgaacagtatattgttgagttggtaaaatcccagttgtacatgacagctgtcactttaatagagcaattctctgtctaccagtatggccagtcttttctccttgatatgatacagagtaatcaattcaaagccgcagagaagtgggcaacatttatggggaaacaaatgctatccacacttgtagaggagttcattgagaggaacatgctaaagaatgcccatgagattataaagaaaaataatctaaagcaggattttcctgatgtatacaaaaggtgtaaagaaagctcactaaaaaacttggcagaaaaaggatgctgggaggttgctgaggcaagaataaacaatgatagacagcttatggaatatctggtttatttggcaatggaagctggatacatggagaaagttgatgaactgtgtgatcggtactccctatccaggtttttggacatcaatgtacctgaaacaagtaatctgcaagggcattatttaaatcttgatgaattattggttgaaagcatcatttgggttgatgaagttgaaggtttgcttgatgcaacaaggcatattgagggttttaaagttataggtcttgactgtgaatggaaacccaattatataaaaggcagcaaaccaaacaaggtttctatcatgcagattgcttctgaagattcggcttttatctttgatctgataaagttacacaaagaagtgcctgacattttagataactgtctatctcgcattttgctgtcacctagaattctaaaacttggctataatttccaatgcgatgcaaagcaacttgcttattcgtatgaagagttgagatgtttcaagaactatgaaatgttgctggacatccagaatgtttttaaagaacctcggggtggtttggctgggcttacagagaaaatactgggagctagtttaaacaagacaagacgaaacagcaattgggagcaaagacctttaactccacatcaattagaatacgctgctctggatgctgttgtacttgttcacatattccgccatcttccttgtcaaggacataataaagataaatctgagtggaagtcttgcatcgtgtccctcaccgaaaacgccaagaaattcaagaaatgtgtaccaaagattgtagacacttgacaaggagaccagcaagcattgatttctgatgaattgagatcgaattttttaactgattgcatgtgtatatggaaaagttcctatagaaaaataagaaattttcaagaggtaaatgataattaatttcattgaatattttctttttctttttttgtatatgacatacaatttgaaatttggcattttgtacatgctatatttactagctgcaattacagttgtgtt

SEQ ID NO: 53493 - protein, 566 aa, Glycine max
  peptide (1)..(566): Ceres Seq. ID no. 15225636
  misc_feature (366)..(533): Homolog of NCBI NO: 21356549 NR Description: CG6744-PA [Drosophila melanogaster]
  misc_feature (463)..(557): Homolog of NCBI NO: 23619546 NR Description: hypothetical protein [Plasmodium falciparum 3D7]
  misc_feature (176)..(473): Homolog of NCBI NO: 23619546 NR Description: hypothetical protein [Plasmodium falciparum 3D7]
  misc_feature (362)..(527): Homolog of NCBI NO: 39590814 NR Description: Hypothetical protein CBG10060 [Caenorhabditis
  misc_feature (351)..(530): Homolog of NCBI NO: 34540197 NR Description: 3'-5' exonuclease domain protein [Porphyromonas
  misc_feature (366)..(535): Homolog of NCBI NO: 7485693 NR Description: hypothetical protein F18A5.260 - Arabidopsis
  misc_feature (366)..(530): Homolog of NCBI NO: 28195109 NR Description: Werner Syndrome-like exonuclease [Arabidopsis
  misc_feature (349)..(522): Homolog of NCBI NO: 34905456 NR Description: P0487H02.22 [Oryza sativa (japonica
  misc_feature (366)..(531): Homolog of NCBI NO: 30682626 NR Description: expressed protein [Arabidopsis thaliana]
  misc_feature (1)..(530): Homolog of NCBI NO: 15223514 NR Description: 3'-5' exonuclease -related [Arabidopsis thaliana]
MSLKENVAKTGNTEDNASQMWTLCKHAFYDLTHVSPVVFLFLLKECYYYGTCKASTKFRALQHQVHLVLSNDPKPEPATFIVQCMYVSPLFEDHSQGFTHLIISALRRFLKRSTTTTEDSLEVKDLVAHLLVDIIWGQIDHDEKIVLKLLEIFDVKLTNVEKAMCQIKEKHDLSCGTAKEFVEQYIVELVKSQLYMTAVTLIEQFSVYQYGQSFLLDMIQSNQFKAAEKWATFMGKQMLSTLVEEFIERNMLKNAHEIIKKNNLKQDFPDVYKRCKESSLKNLAEKGCWEVAEARINNDRQLMEYLVYLAMEAGYMEKVDELCDRYSLSRFLDINVPETSNLQGHYLNLDELLVESIIWVDEVEGLLDATRHIEGFKVIGLDCEWKPNYIKGSKPNKVSIMQIASEDSAFIFDLIKLHKEVPDILDNCLSRILLSPRILKLGYNFQCDAKQLAYSYEELRCFKNYEMLLDIQNVFKEPRGGLAGLTEKILGASLNKTRRNSNWEQRPLTPHQLEYAALDAVVLVHIFRHLPCQGHNKDKSEWKSCIVSLTENAKKFKKCVPKIVDT

SEQ ID NO: 53494 - protein, 547 aa, Glycine max
  peptide (1)..(547): Ceres Seq. ID no. 15225637
  misc_feature (347)..(514): Homolog of NCBI NO: 21356549 NR Description: CG6744-PA [Drosophila melanogaster]
  misc_feature (444)..(538): Homolog of NCBI NO: 23619546 NR Description: hypothetical protein [Plasmodium falciparum 3D7]
  misc_feature (157)..(454): Homolog of NCBI NO: 23619546 NR Description: hypothetical protein [Plasmodium falciparum 3D7]
  misc_feature (343)..(508): Homolog of NCBI NO: 39590814 NR Description: Hypothetical protein CBG10060 [Caenorhabditis
  misc_feature (332)..(511): Homolog of NCBI NO: 34540197 NR Description: 3'-5' exonuclease domain protein [Porphyromonas
  misc_feature (347)..(516): Homolog of NCBI NO: 7485693 NR Description: hypothetical protein F18A5.260 - Arabidopsis
  misc_feature (347)..(511): Homolog of NCBI NO: 28195109 NR Description: Werner Syndrome-like exonuclease [Arabidopsis
  misc_feature (330)..(503): Homolog of NCBI NO: 34905456 NR Description: P0487H02.22 [Oryza sativa (japonica
  misc_feature (347)..(512): Homolog of NCBI NO: 30682626 NR Description: expressed protein [Arabidopsis thaliana]
  misc_feature (1)..(511): Homolog of NCBI NO: 15223514 NR Description: 3'-5' exonuclease -related [Arabidopsis thaliana]
MWTLCKHAFYDLTHVSPVVFLFLLKECYYYGTCKASTKFRALQHQVHLVLSNDPKPEPATFIVQCMYVSPLFEDHSQGFTHLIISALRRFLKRSTTTTEDSLEVKDLVAHLLVDIIWGQIDHDEKIVLKLLEIFDVKLTNVEKAMCQIKEKHDLSCGTAKEFVEQYIVELVKSQLYMTAVTLIEQFSVYQYGQSFLLDMIQSNQFKAAEKWATFMGKQMLSTLVEEFIERNMLKNAHEIIKKNNLKQDFPDVYKRCKESSLKNLAEKGCWEVAEARINNDRQLMEYLVYLAMEAGYMEKVDELCDRYSLSRFLDINVPETSNLQGHYLNLDELLVESIIWVDEVEGLLDATRHIEGFKVIGLDCEWKPNYIKGSKPNKVSIMQIASEDSAFIFDLIKLHKEVPDILDNCLSRILLSPRILKLGYNFQCDAKQLAYSYEELRCFKNYEMLLDIQNVFKEPRGGLAGLTEKILGASLNKTRRNSNWEQRPLTPHQLEYAALDAVVLVHIFRHLPCQGHNKDKSEWKSCIVSLTENAKKFKKCVPKIVDT

SEQ ID NO: 53495 - protein, 482 aa, Glycine max
  peptide (1)..(482): Ceres Seq. ID no. 15225638
  misc_feature (282)..(449): Homolog of NCBI NO: 21356549 NR Description: CG6744-PA [Drosophila melanogaster]
  misc_feature (379)..(473): Homolog of NCBI NO: 23619546 NR Description: hypothetical protein [Plasmodium falciparum 3D7]
  misc_feature (92)..(389): Homolog of NCBI NO: 23619546 NR Description: hypothetical protein [Plasmodium falciparum 3D7]
  misc_feature (278)..(443): Homolog of NCBI NO: 39590814 NR Description: Hypothetical protein CBG10060 [Caenorhabditis
  misc_feature (267)..(446): Homolog of NCBI NO: 34540197 NR Description: 3'-5' exonuclease domain protein [Porphyromonas
  misc_feature (282)..(451): Homolog of NCBI NO: 7485693 NR Description: hypothetical protein F18A5.260 - Arabidopsis
  misc_feature (282)..(446): Homolog of NCBI NO: 28195109 NR Description: Werner Syndrome-like exonuclease [Arabidopsis
  misc_feature (265)..(438): Homolog of NCBI NO: 34905456 NR Description: P0487H02.22 [Oryza sativa (japonica
  misc_feature (282)..(447): Homolog of NCBI NO: 30682626 NR Description: expressed protein [Arabidopsis thaliana]
  misc_feature (1)..(446): Homolog of NCBI NO: 15223514 NR Description: 3'-5' exonuclease -related [Arabidopsis thaliana]
MYVSPLFEDHSQGFTHLIISALRRFLKRSTTTTEDSLEVKDLVAHLLVDIIWGQIDHDEKIVLKLLEIFDVKLTNVEKAMCQIKEKHDLSCGTAKEFVEQYIVELVKSQLYMTAVTLIEQFSVYQYGQSFLLDMIQSNQFKAAEKWATFMGKQMLSTLVEEFIERNMLKNAHEIIKKNNLKQDFPDVYKRCKESSLKNLAEKGCWEVAEARINNDRQLMEYLVYLAMEAGYMEKVDELCDRYSLSRFLDINVPETSNLQGHYLNLDELLVESIIWVDEVEGLLDATRHIEGFKVIGLDCEWKPNYIKGSKPNKVSIMQIASEDSAFIFDLIKLHKEVPDILDNCLSRILLSPRILKLGYNFQCDAKQLAYSYEELRCFKNYEMLLDIQNVFKEPRGGLAGLTEKILGASLNKTRRNSNWEQRPLTPHQLEYAALDAVVLVHIFRHLPCQGHNKDKSEWKSCIVSLTENAKKFKKCVPKIVDT

SEQ ID NO: 53496 - DNA, 1307 bp, Glycine max
  misc_feature (1)..(1307): Ceres Seq. ID no. 15169296
gacagacacagcatccaatatccatcgagagatgttggaggcgaagtgtctgaagaaagcagtggttccttccactctgattgaggacccttctcctggaagccttcagtgcacacgtcttgctctccgtgtttgcgaggacccaagttcttgttttgtctacatagcctccggtccccacatttataagctccacattgctctgggagaatcttcagtcagcgaaggaaaagatagcctattgatacctgaacacactgagattattgcctcttcgttactcaaccgatgccctcatcgttcagaaattcagagtattgctcttgctgaggtggagggctgtggctatatattgctgggaagtgtggattcacatggtcatctcattgtgtctaaactagatgcgtctggtgaagatgttgacaagctaacatattctgcattgcctcatgataatggtatcggggaaggaagttggtcaggactctgcttttgcccaaatcaatggtctatgacagttgttgctcgtagcttttgcaaaagcattgatgtttatgatcaagacatccacattcgctcattacgaccgctttggtaccctacttcgttaaacttcttgcaaaatggagtcaatggaaatcaaagtcctaccttagctattacggaaggaagccagctgacaacgtgggacttgagaatgaaagaaaatggtggttgtgtacatcggatttgtggcagccctggcgatatcttttatgctgtttgcagttcttccaatggtaatgttgctgtgggtggagctgatcgtactgtgactatttatgatcctcgcagatggtcggcattgtctagattggtgcactgttcaaaatatgagataacaggactggctttctcaacaattgaccctgactgtatctatattcaaggggttgattatgaggtcttttgtggacaatggaaagagaacaacaaaatattttcatttagaggagactcaaattggcttggctttagtaagtgctccgacaaagatgttttggctggatggtgtgattcaggcagcatatttatagctgatgttgcaagtgcaagttgataaagtggtgtctgtccagtaatttccccatctctgtagaaaattgtcacctcaatgtatgtaaccatggttgagtttcatgtttgaagggaaaaagaaaagtggtggatttattatgattaaacttcatatgcagtacatgttataatgcatttctaaccacagaatgtgacttaagattacggaatgcattatttttgtgcactgt

SEQ ID NO: 53497 - protein, 365 aa, Glycine max
  peptide (1)..(365): Ceres Seq. ID no. 15169297
  misc_feature (11)..(88): Homolog of NCBI NO: 34908604 NR Description: P0505D12.30 [Oryza sativa (japonica
  misc_feature (292)..(344): Homolog of NCBI NO: 34908606 NR Description: P0505D12.31 [Oryza sativa (japonica
  misc_feature (174)..(227): Homolog of NCBI NO: 34908606 NR Description: P0505D12.31 [Oryza sativa (japonica
TDTASNIHREMLEAKCLKKAVVPSTLIEDPSPGSLQCTRLALRVCEDPSSCFVYIASGPHIYKLHIALGESSVSEGKDSLLIPEHTEIIASSLLNRCPHRSEIQSIALAEVEGCGYILLGSVDSHGHLIVSKLDASGEDVDKLTYSALPHDNGIGEGSWSGLCFCPNQWSMTVVARSFCKSIDVYDQDIHIRSLRPLWYPTSLNFLQNGVNGNQSPTLAITEGSQLTTWDLRMKENGGCVHRICGSPGDIFYAVCSSSNGNVAVGGADRTVTIYDPRRWSALSRLVHCSKYEITGLAFSTIDPDCIYIQGVDYEVFCGQWKENNKIFSFRGDSNWLGFSKCSDKDVLAGWCDSGSIFIADVASAS

SEQ ID NO: 53498 - protein, 355 aa, Glycine max
  peptide (1)..(355): Ceres Seq. ID no. 15169298
  misc_feature (1)..(78): Homolog of NCBI NO: 34908604 NR Description: P0505D12.30 [Oryza sativa (japonica
  misc_feature (282)..(334): Homolog of NCBI NO: 34908606 NR Description: P0505D12.31 [Oryza sativa (japonica
  misc_feature (164)..(217): Homolog of NCBI NO: 34908606 NR Description: P0505D12.31 [Oryza sativa (japonica
MLEAKCLKKAVVPSTLIEDPSPGSLQCTRLALRVCEDPSSCFVYIASGPHIYKLHIALGESSVSEGKDSLLIPEHTEIIASSLLNRCPHRSEIQSIALAEVEGCGYILLGSVDSHGHLIVSKLDASGEDVDKLTYSALPHDNGIGEGSWSGLCFCPNQWSMTVVARSFCKSIDVYDQDIHIRSLRPLWYPTSLNFLQNGVNGNQSPTLAITEGSQLTTWDLRMKENGGCVHRICGSPGDIFYAVCSSSNGNVAVGGADRTVTIYDPRRWSALSRLVHCSKYEITGLAFSTIDPDCIYIQGVDYEVFCGQWKENNKIFSFRGDSNWLGFSKCSDKDVLAGWCDSGSIFIADVASAS

SEQ ID NO: 53499 - protein, 195 aa, Glycine max
  peptide (1)..(195): Ceres Seq. ID no. 15169299
  misc_feature (122)..(174): Homolog of NCBI NO: 34908606 NR Description: P0505D12.31 [Oryza sativa (japonica
  misc_feature (4)..(57): Homolog of NCBI NO: 34908606 NR Description: P0505D12.31 [Oryza sativa (japonica
MTVVARSFCKSIDVYDQDIHIRSLRPLWYPTSLNFLQNGVNGNQSPTLAITEGSQLTTWDLRMKENGGCVHRICGSPGDIFYAVCSSSNGNVAVGGADRTVTIYDPRRWSALSRLVHCSKYEITGLAFSTIDPDCIYIQGVDYEVFCGQWKENNKIFSFRGDSNWLGFSKCSDKDVLAGWCDSGSIFIADVASAS

SEQ ID NO: 53500 - DNA, 1056 bp, Glycine max
  misc_feature (1)..(1056): Ceres Seq. ID no. 14303877
tctcggaactttgaaaacgtggaagcacaccccagaccccacaccagtccccgtttgttccgctgcaaaacaaaaacaccgcgtcttccccgtgcggggaaaaagaaaagaaaagaaaagaaccctcaattttccgggaaaaccctccccacaatggtttcccgggaaaacaccaattggctcttcgattacggcttgatcgacgatattcccgttccggacgccaccttcggcgtcaattcctccgccttcacatggccccctaacgccttgaacgcttcctccaatgtcggcgttgaaattgatggctcgttgggggattctgacagtctcaaagagtctggctcaaagaaaagggttaggtctgagtcatgtgctgcttctggctccaaggcatgtcgggagaagttgagaagggataggcttaatgacaagtttgttgaattgggcgccattttggagcctggaaggcctgccaaaacagacaaggctgctatcctgattgatgctgtccgaatggtgacccagttacggggtgaagcccagaagttgaaagacactaatcagggtcttcaagaaaagattaaagagttaaaggctgagaagaacgaacttcgcgatgagaaacagaggctcaaggcagagaaggagaaactggagcagcagctgaaatctttgaatgcacagcctagtttcatgcctccccctgctgcaatgcctgctgcatttgcggcacaaggccaagcccatggcaacaagttggtaccttttattagttatcccggagttgcaatgtggcaattcatgccacctgctgcagtggatacctcacaggatcatgttctccgtccaccagttgcctaagctggcactgtacaattctctgggccagcattttggctcaaggttgtatccattttaccaataccttcttggctttgttagttctcttctaagtattctaactggacccagtggtgacttctgactatatctggcatatgatactattatgattaatgctggtagttgcatgtaaatcagtcaatgttaaat

SEQ ID NO: 53501 - protein, 287 aa, Glycine max
  peptide (1)..(287): Ceres Seq. ID no. 14303878
  misc_feature (127)..(178): Pfam Name: Helix-loop-helix DNA-binding domain Pfam Description: Helix-loop-helix DNA-binding domain
  misc_feature (99)..(287): Homolog of NCBI NO: 30682847 NR Description: bHLH protein [Arabidopsis thaliana]
  misc_feature (99)..(287): Homolog of NCBI NO: 18414212 NR Description: bHLH protein [Arabidopsis thaliana]
  misc_feature (91)..(287): Homolog of NCBI NO: 22331274 NR Description: bHLH protein [Arabidopsis thaliana]
  misc_feature (91)..(287): Homolog of NCBI NO: 20127030 NR Description: putative bHLH transcription factor [Arabidopsis
  misc_feature (87)..(287): Homolog of NCBI NO: 32352190 NR Description: hypothetical protein [Oryza sativa (japonica
  misc_feature (83)..(287): Homolog of NCBI NO: 29367409 NR Description: helix-loop-helix-like protein
  misc_feature (59)..(287): Homolog of NCBI NO: 38636768 NR Description: helix-loop-helix-like protein
  misc_feature (52)..(287): Homolog of NCBI NO: 15223710 NR Description: bHLH protein [Arabidopsis thaliana]
  misc_feature (52)..(287): Homolog of NCBI NO: 21592325 NR Description: bHLH transcription factor, putative [Arabidopsis
  misc_feature (52)..(287): Homolog of NCBI NO: 15239706 NR Description: bHLH protein [Arabidopsis thaliana]
SRNFENVEAHPRPHTSPRLFRCKTKTPRLPRAGKKKRKEKNPQFSGKTLPTMVSRENTNWLFDYGLIDDIPVPDATFGVNSSAFTWPPNALNASSNVGVEIDGSLGDSDSLKESGSKKRVRSESCAASGSKACREKLRRDRLNDKFVELGAILEPGRPAKTDKAAILIDAVRMVTQLRGEAQKLKDTNQGLQEKIKELKAEKNELRDEKQRLKAEKEKLEQQLKSLNAQPSFMPPPAAMPAAFAAQGQAHGNKLVPFISYPGVAMWQFMPPAAVDTSQDHVLRPPVA
